United States Patent Application Publication US 2015/0354009 A1 - sequence listing, part 17

SEQ ID NO: 414 - DNA, 441418 bp, Homo sapiens
ggcatcgggtttctggctcgtgatttgccggagctcctgcgctccccttctccaccccctccggctgtgtgagaggtcagcagaggggcggtctgcggggacaacaatggcggggttctgggtcgggacagcaccgctggtcgctgccggacggcgtgggcggtggccgccgcagcagctgatgctgagcgcggcgctgcggaccctgaaggtgaggagcaacggggcctcgcgggtccgggcttcactgggcttctagccgtgccgcctctgggcggctggcgccgggagagcgctggctgggtccggctgcccccgcgccccggttccgcatcagctacaccgcttgctttcctccctcccggagttcgcgtggcagcgggctcaggaggcatccctcgttgcagctgttcctcgcggggatcctgcggagcagagaggcctagggcagaggcagttgggtgcccgcacgccctccgaggcggctgatggctttgggcaggcatattgctcgaggtctgcttccagggccccgcggcattggctttgtcttaagctttccagggtgtctttttaggtgtccttatagtttccgtgttctgttgcctctttccagcatttttgaagggacactgtgaactgttgcttaagtagtgttagggttgtgagtttgtcttatcttttaaagtattataccatgtcaggactgccaatagattttacgtttcatttgaaagcctgttttaattgtatgacaccccagtctactgtgtaccaaatgcatcccgtgaacttactttccttttcggtatagtggtgagcctgattttggcactgttctaaacacatttcatgactgttctgtatacctaggctgtcatgatggcagattgacaaacaggttggagtgcttgtgtgtgcttctgagctctgtctccagtcaatgtcgagtctgtcgttaattctggggcacagaccacctaacctactttataaggtttgttgaggcacttgaacacattctttaaaatgaaggtcccctgaaaaccatctgtcagctggttcagtgtgcttgttaaacttccttttaaaaaataattattaaaacattgccacataacttgatttatagtcatttaattttagacgttgaagacactttagagacgacctgccccatcctactctttaaagaggagggaaccgagccccaggtgggcagtatgagagctggagcttatcgacatggaagtgagtggcacctatgtttgttttgtgtccaattcagcgtgcggactttcactgttttctgtgttcccatacagtttagtgttctttaatctttatcattctgttcatctgtgttggccacttcaattgcagctgtaagacttatgcatttacataggaggcaagttagtatggtgtaaagtgtgggctttggggtcaggcgcatgaggctttgtatattggacaggtctcttccttgggcgtcagcttcgtccttgtagctatttttttcaacaaatatttactgaatatctcctgtcttccacttctggggaatgaatatggtttctgctttcttagaaattttactctagtagggagactgtaacaagtgtaaaatggtattaggggagatgcccgggtgctataagaaaataaaatagagggatttgaccaagccaagattttgaattctgtgttctagatactgttctgttgctttgcttgaactaatttattcaatctcacaacagtcgtatgtcccccatttacagaagatgaaagtgaggcactgagtgttaatgtgacttgctcgaagctatagtgccaataagtggcaaacaggatttagaactccagaacctgtgctcttaatcatactatgctatctacggtaagggagtgttttcctttggaactgaaaattgagacaagttttgaaggatgaagtgaccttttctaacaaacagagatgaatgttataggtgagagagcagtgtatgcaaaggtcctgtggccagagggaatgacaggttagaagaactgaaaaaagcctacagaggctctgatgcagagagtagatggtgttggggaagctggcaggagtcagaccatctggctcttatagatcacattatgaggtttggtgtttgtcttagagcagtgggaagacattgatgttggaggtgggagggatgacactgacattttagattggagaggctgagaggaaggctgttactgtacttactgttgtacacttgttatacacttactgtgtaatacatacgctttgatgattcttacctggttttttccttttaatgtgttggcagagactgcatcttgtctatttctgtgttcttagtacaatgtttgacacaataggtgctgaatgtgtaacaatagagtagcattatgtttgtgccggtaaagaattcctccttggggtgggaagcatctctgaagttcactatcactctaggggaacttgagctgctgcttagcttctctctgcgcttctcttctatgaacttgaaatatgctctactgagtctgtttgaagctgaatcttttgaagattttaacccctcccatccctccctccacctctgcaaaccttttggttggttgaaaagcagccagctaactctagggtctagtctagagaattctgaccattcttttagccagtcaacagagtttatttatttttagggtatatgtagagttcaccttttagtcttatttgttttgtgtatcagctttttaagcacattctgttttaatgcctagttttttcttctgcgtaaatgttttcagtggctctaggatgttggttttatggtaattgctatagttattattgaactcttatatgccttgcatgatttttctttgcttttctttttttttgagatggggtctcgctctgttgccaggctggagtgcagtggcgcgatctcagctcactgtaacctccacctcctgggttcaagtgattcccttgcctcagcctcccaagtggctgggactacaggcgcacgccaccaccaccggctaatttttttttgtattttagtagagatggggtttcaccatgttggccacctcgatcttctgacctcttgatccactgccttggcctcccaaagtgcttggaattacaggcatgagccaccgagcccaatggtgtgatttttcatatatcttttatccttataacaactaggtaaaaaatcccaattttacagtagaggaaacaaagctcagggcagttaagtagttgcttaaaagcacaattggctgaagtagaatttgaaccttagataatatgattctgaaggctttcttttctttcttccttttttttttttgagatggggtctggctctgttggccaggctggagtgcagtggcatgatcttggcctactgcagcctctgcctcctgggctcaagccatcctcccatctcagcctcccaagtaggtgggaccacaggcacgtacgaccacacctggctattttttaattttaatttttattttttgtagagatggggttttgctatgttgcccaggctggtctcaaactcctgaactcaagcaatccacccacctcagcttgcttttctaattacaaattgtctcatttgaatcatggtctcattgtgtgatgcattcatgaaatttgaatgtttaagccctgtgttacttgacatccattattttcttttgtaatcagtaaatatggaaaagaatgtttaggcttatatgaatgctttagaattgcctggaggttaatgtttccaacatgctgataaatttctgacaaatcatttgggaaaagaaatttctgagattattacagaaactagtttctggtgtaaaaaaatgtttatagacatttatatatttatacatctaccatttggattttattctgttcctgagaggttcagaacagaggtaaaaactgctctagtccttttctaagaggaaaagatgtgacatttttgatgaagagtgagggaaaaggatttgtttaaatgattccaaactttaaaaaatgtaggtgggagaacaaggatgaaaaaggaatttgggaagaaacacttttttggtggggctggaaacatagtgtttcattgtaggtatctggagttagatgcccgcaggagccatgctgaggtgctgggtatcagtggctggcttttgggccagggatacgaggctagagttagagttagaactgtgagccctgacggatatagtgagtcagttaatatttaattgaataaatgcttcgttttataaccctaaattaggatttggaagaaggaagaagagacaagaggagttagaggtatggtttgagaggagccaatgtagtgtagtgttaccaaacctaggaaagaaatttcaagaagtagttagcattcattcattcatttgtctagagatctagctctttactcagaaagtgtttgtggagcattttctaagttccaggtactatggcacgtacagaggagagaaaaagaaattaaaacatattccctaactatgtcccaggtgcagagaggctaaggaataaaagattgatgaggccaggtgtggtagctcacgcctgcaatctcaaccctttgggaggccaaagtgggaggatttcttgagctcaggagtttgagaccagcctaggcaacataatgataccacccccacccccggctatctctacaaaataaaataaaataaaataaaaattagctgggtgtggtggcacgtgcctgtggttctaggtacttgggaggctgaggagggaggatcacttgagcccaggaggtcaaggctgcagtgagctgtgatcacaccaatgtactacagcctgggtgacacagcaagaccctgtctcaaaaaaaagtctgggcacgatggctcatgcctgtaatcccagcactttgggaggccgaggcaggcagatcacctgaggtcgggagttcaagaccagcctgaccaacatggagaaatcccgtctctactaaaaatacaaaattagccgggcatggtggcgcatgcctgtaatctcagctacttgggaggctgaggcaggagaatcacttgaacccaggaggtggaggttgcagtgagccgagattgcaccactgcactccagcctgggcaacaagagcgaaaatctgtctcaaaaaaaaaaaaaaaaaaaaaagattggtgaaagaatttgaaaagatctttgatctttaatgagaataattttagtagcatggtaaagtgttatatacaaaaaatactgcttttgacaacactcttgaatagttgaagcaaaattatattttttgaaagataagcatattgcataactttcaaaaattagtttctttattttaaatgcctattgacattttcgttagaaaaaaccccacaaactgatgggatcaacctaataagatcaaaataaaagtgaatttaaagaatgttggaagatacagttttgtgatttcattcacaaaacctaatacagcatccatgtggcatactctctttggtattgtttgtttgtttttgagatagagtctcatgttgtccaggctggagttcagtggtgtgatctccgctcacggcaacctccgcctccggggttcaagtgattctcctgcctcagcctcctgagtagctgggattacaggcatgtgccaccatgcccagctaatttttatatttttagtagagacggggtttcaccatgtcggcctggctggtcttgaactcttgacctcaattgatccgcctgcctcggcctcccaaagtgctgggattacagatgtgagccaccgtgcctgccctctctttggtattatttattcaagaaacctttggtttcctagagctgctgtacaaatgaccatggacctggtggcttaaaacaacaaattcattctcccacagtactaaaggcctgaagtctgaaatcaaggcatgagcagggccatgcttcgcctgaaggctctaggggagaatcctttcttgcctctttgagcttctggtggctgcattcattccttggcttgtggctgcatcactccagtctctgcctctgtcttcacatggctgccttctcctcctccttcttgtgcgtctttccctctcattcttttataaagacacttttcattggatttagggccatgacaagatctaggatgatttcatctcaagatccttcactttgttgtattggcaaagacactttatcacaggttccaggacgtggacacatcattttaggggctatcgttcaattcacctacacgtagtatgtgtcagacactacttagagctgggaatataattgtgactgtttctgctcccattgtggttacatttgagtaaggagactgtgctcgtataaatagaaaagttcagagagtgagaagtgctctcgaaggaaaaagataggttaatgggatagagagtggtagtggtgctgagttggggatgttacctaatgagaccatgggggacatttctgagcatgtggcatttggacaggaaactgagccagccagccatgtgactatatgggggcctagcattgcagaccaaggagtgccagggcaaaagctctgaggggagattgcatttggcataattaagggatgaatgtggctgctgtggttggagtgaactgaatgagggggtgatcttaggagatgagggaggaggagtgggtaggcgggacagagtcatcaggggcttgtatttggaatttagtaatgagagtccagttggaggcatttaagcacattgaatttatgtttggaaaagacgtttgtgactagtacgtagcgaatgtcttagtaggggtgggagtaggattggggactggggtgggaagagtggaaacagagagacccatcaggaagctgttgtagaagaccaagctagagatgatggtaacttgtgctagggcactggagttgctgagaactggtcagacttggaatgtattttggagctagagccagtatcttgctgtggggtttgaaggcagatacagatgtacctcatatcttggctttattgaccctgcagatactgctttttttttgttgtttttacagattgagggtttgtggcaaccctgctttgagcaactgtattggtgtcatctttccaatagcacatacttacttggtgtctctgtgaaacattttgataattttttcattattactatgtctgttatggtgatctgtgatcagtgatcttcgatattcttattgtaaatattttggggtgccgtgaaccacgcccatataagttggagaaacataattgataaatgtgtgagttttgacttctccaagcagttattcccctatgtctctccctctcctcaggcttccctaattctctgagatacaacaatattgaaattaggccaattaataatcttctaagcgttctagtgaaaggaagagtcacacatctctcactttgaatcaaaaactagaaatcattaagcttagtgaggaaggcctgtcaaaagccaagatagactgaaagttgggcctcttgtgccaaattgtaaatgcaaaggaaaagttctggaaggaaattagaagtgctactccagtgagcgcacaactgattaaaaaaagtgaaacagctttattgctgatatggcgaaagctttagtggtttggatagaagatcaaaccagccacaacatttccttaagccatagcctaatccagcgcaaggtcctcgcttcagttctgcgaaggctgagagaggtgaggatgctgcagaagaaaacttggaagcagaggttggttcatggggtttaagaaaagaagtgaggccgggcgcagtggttcacacctgtaatcccagtactttgggaggccgaggcgagtggatcacaaggtcaagagattgagaccattctggctaacatggtgaaggatcagatgattgttagcatttttgagcaataactgttttgaacaataattaattggacctgaacctacagtatctgtaaggtatgtacaaacagggaaaggaaggaattaagagtgacttttgaagggtagacacacaaggtcgctattgtgtgattttgtgtttatatgcagtctccagaatagactgatccatgaagacagaaagtagattagtggttgcccagggcctggaggagaggggatgggagtgactgcgaatagttaagggttgtctttttggggtgataaaaaatgtcctggaatcagtagccatcatggttccatgccttgtggatatactaaaaaccacggagttgtatacttttttaaaagggtgaattttatggtatgtgaattacatctcaattaaaaaataaaagaatggtccgggtgcagtggctcacacctgtaatcccagcactttgggaggccgaggcaggtggatcacctgaggtcgggagttcgagaccagcctgaccaacatgaagaaaccccatctctactaaaaatacaaaattagccaggcatggtggcacatgcctgtaatcccagctactcgggaggctgagacgggagaattgcttgaacctgggaggcagaggttgcagtgagccaagatggcaccactgcactccagcctggcgacagagtgagactccgtctcaaaaaacaaacaaacacaaatcttcgaatacttatgttaacaaagtaaagcaaagaggccaaggtgggaggatcacttgaggccagcagttcaagaccagcctggggaaaatagtgagaaccccccagccgcccagtctctacaaaaaataaaaaaattagtggggcatggtgacatgcatccatagtcccagctattcaggaggctgaggtgggaggattgcttgaatgcaggagttcaaggctgcagtgagctatgatcctatcactacacttcagtctgggcaacatagtgagatcctgtctcaaaaaaaaaaagtacaatgaagctaggtgtggtggcagggatgtgtagtctcagctacttaggaggctgaggtgggaagatcatttaagcctaggagttagaggctgccatgggctataattgtgcctgtgagtagtcactgcagtccagcctgggcaaacatagtgagacccccatctcttaaaaaaacaaaaaaagtaaaataaggtgaaattaatatattttacttaatatattcaaatattcaaagtattatttgaatatgtaaatgtaaaaattcactaatgaggtcttttacattttctgggtactaagttttcaaaatccagtgtgtagtttactcttagagcacatctgaatgtggctcgtggctgccatattggatggaacagctctagggcacagattgtgctactaatcaagtcccaccttgaggtgctgggactggccttttgaatgcagtgttagtcagcccttggccaggcagggtcgggggagctctcaggcttgatggagagctgtatagttgaggaacatggtcgagatgagggtgcaggtgtgagccgttagttgtcaacacagcagttagagaggatctgagtggccactgacaacatctgctacagcgggatggggaagaatggcctggcggaagagtcaagggtgggatgatggagctctagagttgacatgtatagtttcctggtgcttgagcttagtacagaggcagagcccagagaatcttgagtcttgaacatctctctcaaatattaggtgttcaacttggcttttggcagacactgaagattggaatggtctctaagatcctgaagactaaatagtctatttgaaagaaaagctgtgcttccaggaaaaagccagacctaattaagtgtcttcagagaagggcatgggctctgttacaatgcatgatgaaataccgtgtcataatacatggataagaccttcacctggaattttagagatgaagcaagatgaagtaaactaatgtttactttgaccttggtgagatcattttatagctccattaacccagttttgaggatagtttcttctttgaagcagaatgcattctgataatgaatttatctcataatgagttatttagtattattcatctgaatgctactgcgggtatgttaacaacagtagttttggttttggcagaaatagtgttcagattgttctttaagatatttgccagtggatttaccagttttaactgccacgtgaggccacatcttgcttatgaaagtaggtgctatctaatcttttttttttttttttttttgagatggagtcttgctctgtcacccagactggagtgcagtggcgtgatctcggctcactacaacctctgcctcccgggttcacgccattctcccgcctcagtctcccgagtagctgggactacaggcgcctgccaccacacccggctaattttttgtatttttcgtagagacagggtttcactgtgttagccaggatggtctcaatctcctgaccttgtgatccacctgcctcggcctctcaaagtgctgggattacaggcgtgagccactgtgcccagctggtgctatctaatcttaagaaaggatttttttccagccactgcaaacaggatttgtttccctgtttgcagtggctggaaggcatgcatccagtttgtctaaaagcctaccatttcccccgctttttgtgtaagttattgtgtgctgatgataatatatgcaagactgtgctagccatgttagacattctcatttaatcctcatagcagcattatgacctagataagtactattattatccccagtgtacaaatgaagaaactttctatatatctaggaaatgtcagagccaagatttgaatccaggtcagaatctgagtctagaccagaactcttattgactatattattctctaatggtaattcccaagtggttctggtataattttaagaaagaaggtgacagttacatatttggatttagttttcatgtaaaaccttacattttttggcactttactgtttataaaaactcatttgatccttttaataactccctaggaaatcagggaggtgtcatcacctacattttgtagatggaaacgggggcccagagaaatgattagctcaatgactcacagctgagagttgacccaagtcttgtgactctgagggtcaatgccacttcctatgtgccaagccattttcaggcatttcttttctatgtgtggaaaatacaggaaatcattattcctgtgggagagaaccagtggcaatatgttactggggagtcattttgcacacgctgacctctctcattttggctgtgattggctagcctttataaacagaattgattaaagttctttctcagaacctttgttgctaggaaataccttacaaagaattttggactgggcgtgtagccagtttgttacatgcttaacaaaaacaacaaacgttaaaattctgtgtagaggtccaaattagcagacttcttcaaacgttttccttcatttagaaaataaactttatgttgtggctttacacaaatggtctgagtgttgacctgattcttcatttttgaccttccatgaatgtctcccaggaggaaacaggaacagagcctttatggggctcattccaaaccagttcagacttgtcgtgggaatggttcacattggtagttgttctgttatagttgtgtttgcttgtacgagttctacttcttcttttttttttttttgttgagacagtgtttcgctctttttgcccaggctggagtgcaacggtacaaacttggctcactgcaacctcggctcactgcaacctccgcctcccgggttcaagcgattctcctgcctcagccatccgagtagctgggattacgggcatgcaccaccatgcccagctaattttgtatttttagtagagatggggtttctccatgttggtcaggctggtctcgaactcccaacctcaagtgatctgcccgcctcagcctcccaaagtgttgggattacaggcatgagccaccgtgcccggcccgagttctacttctagttactgggtaaccgggaggcatctatgctttttacagctttaggccacattattacaagttcacatgtgtgcaagctctgtggaacaatatcatatctttgagtagatattagtgtttatctgggaattgccactgtttttcttatctagaaataaaaaatttcagaaagctcttgaccaatctgtggttaaatcttataaccattacagcctcagcctgtgacctttgaaaagttaaagtccttgggactcaactttgtcataaaattggggataatactcttgtaactcacagttatgcttgaaggaatatatgagagatagtcttgatctttaatagggacacagtaataatttcccgttcacagttccttcttgttcttggtcttttacttggtaaaggttttattttataaactatatctttttgtatcttttacctccacttttatacagagattacattttttaaattaattaaataattaattaattttttctgaggagtttcgctcttgttgcccaggctggagtgcaatggcaggatctaggctcacagcaacctccacctcctgggttcaagcaattctacctcagcctcctgagtagctgggactacaggtgtgtgccaccatgccccgctaatttttttgtgtgtgtttttagtagagacgggatttcgccattttggccagtctggtcgcaaactcctgacctcaggtgatccacctgccttgacctcccaaagtgctaggattacaggcatgagccatggtgcccgactctttaaaaaatagttgtacaaatttttcagttcatttaaaaatgttgctataagaacattttgtttcttatttgagtcgttatcatcttagaaagttctaagaggtggtacctgttggttgccttttgctggtttttttcctccatttttttccttctagctttaacagtgactactgggaagttctctctctgtctctgtctgtctctctgtatctctctatctcttttctttttctcctttcttttctctcttttcagtggggtcttgctctgttgcctaggctggagtacagtggtgtgatcttggctcactgccacctcaaactctggggctcaagtaatactcccacctctgcctcctgagtagctgggattccaggctgtaccaccgtgcctggcttagtcacttttcttaatgtttttaagcattaagatacgctttcttcacaaacagttcaatgaatgagaaatatccttgattactgatattgctttttcatatttatcagccaaaccacttctgtaccagaaaatgtgaaataagaaatcatgctgaagacatcagcaaatataaaaagaatattttattatgttctggccactgttaaatttgaagctccttgagaccaagactctcgttttgtgtttttaaaagttctgtgtggtctgtgacatttctgaccctgctctatccttttgaatgatcagaaaggctttcttcaaatttgcttggcccctcgacaattcttgttttgcttttctggagatcgttttgatgcttttggtttctcttacataccaaggggctgtgtctgtagatatgatttcccttttgtaattatatttatggtatattgcctagaactacatttattgatcagacacgttcgctagaacctaactggaagaaatatcctgaaaaaatgttctaaagcccatcaagtatttgcaatttattttgctttcctttttttgtagcatgttctgtactattcaagacagtgcttaatggtgtcccgtaatcttggttcagtgggatatgatcctaatgaaaaagtaagtatttaaaagatattctcaacaactaaattaaacttatcatggttttactttctcgtctccacactgtgttcagtggacagatgagattttgttaaggctgtgtggtcattgatcactctagcattgtgtgtttctataggtgctcagtctttaggtattctgtttttcattgtgggccacagtctgaatctttttaattttgtatttatatctttagcaaaaattgaatgcatttacaatgtgtttcctttgtttccagcagaataactaagaaaacatttgttcttaaagactgggcatttgagagatttaattaaactattgagtttttctttcatttacttaatacttttttttttttttgagatggagtcatgctctatcacccaggctggagtgcagtggtgtgatctaggctcactgcaacctacgcctctggggttcaaacaattctcccacctcagcctcctgagtagctgggattacaggcgcccaccactgcacctggctaacatttatatttttagtagagatggggtttcaccatgttggccaggatggtctcgaactcctgacctcaggtgatccacctgcctcagcctcccaaagtgctgggatttcaggcatgagccaccgtgcacctggcctcatttacttaatatttatattatttatttatttatttgtgagatggagtcttgctcttttgcccaggctggagtacagtggtgtgatcttagctcactgcaacctccgcctcccggcttcaagagattctcctgtctcagcctcctgagtagctgggattacaggtgcgccccaccacgcccgtctaatttttgtgtttgtagtagagacagggtttcaccatgttggccaggctggtctcaaactcctgacctcaggtcatccgcctgcctcgagctcccaaagtgctgggattacaggcgtgagccactgtgcccggcctatatgattcatttagattgaaggtaattttgtgtattataaatttcaggacaaggggtttctaattaaaatgctattacaataatgtttgagccttgtagggactagaagaagtgattggaaataaaatatggtttcatgccttcatggcaatgaaggcatcgaagtgggcgggagttttggttaagaagggattgttcaaggtgagtgtcatcaaaatacaactgacaggaatgattatttgagaatgacatgtctgaggtatcttctgaatcatgtgctgaagtgcgcaatactgctttccagattcttttgaatctggaggcctggaggaagaaagagtctacatatcttcagttcagtagaaatacaatgtgaaacacagttgcagggtgatatggtttggctctgtccccatccaaatctcatctcgacctgtaatccccatgtgttgagggagggaggtgattggatcatgggggcagtttcttccatgtttttctcatgacagtgagttggttctcacaggatcttaagatcttacaagtgtttggaagttcctcctttgcactactctcccctgctgccttgtgaagaagggtcctgctttccttctgccatgattgtaagtttcctgaagtctccccagccatgcggaactgggagtcaattaaacctttgtttataaattacctagtcttgggtagtatcttcatagcaatgtaaaaaccaattaatacacagggcaaatgtgattttcaattttcctttttattttttatttttgagatggagtcttgctctgtcacccaggctgtagtgcagtggtgtgatcttggctcactgcaacctccacctcccaggttcaagcaattctcttgcctcagcctcccgagtagctgggattacaggtgtacgtcaccatgcccggctaatttttgtatttttagtagagacagggtttcaccatgttgggcaggctggtctcgaactcctgacctcaaatgtcttcctgcctcagcctcccaaagtgttgggattacaggcatgagccactgcacttggccaattttcaattttctaatagccacattaaaaaaaagtaaacaggcaaaattaataatatctcaatatctaaaatgttatttaagtacataatcagtataaaaagtattaacaagacaccttagattcttttttttgggccctaagtcttctaaatccagtgtatattttatacctctggcatatctcagtttgattagccacatttgaagagcccaataacctcatgtggccagtggctactatattggatagtgcaggtctattgaattagttatgataaactccctgttatgaaagctgtagtttaatttaaaatcttcatcataggtgatatgctttggggttcatgtatccatgtgttgcattccaatctcgaagtaatcagctatcctaagtggctacactcttaagagtaattaactaacatttgttgaagaggacacattatagaggggtggaatactacaaacggttcagccatctttctccttatacactggtagccttcctcattagcgtaataactgttagaagtgggctatcagccaggtgtgatggcccacgcctgtaatcccagcactttgggagtttgaggccagtggattgcttgaggtcaggaacttgagaccagcctggcgaaaccctgtctctaccaaaaaaaaaaaaaaaaaaaaaacaccccacaaaaattagctgggtgtggtggcgtgcaccagtagttccagctacacaggaagctaagttgggaggatcacttgagcccaggaggtcagggcttcagtgagccatgattgcaccactgtactccagactgctaggctaaagggcaagatcctgtctcaaaaaaaaaaaaaaaaaaaaaaaaaaaaaaaaagaaaagaaaaggaaaaaaagaaacgggctgtcattgaggaagtttgtggtattcgtcaatatatgttattggctattgctttagggaaattctgtgcctttgtactattagaatgtaataatgtagttggcctttaattctttacctttaaggataatactcgggcccgatccctaaatgaatagttctgtgttcagccacttgtctggtggattcttgatggcttagtctgacagtatggttagccaaagcagaatattgtttttttttgcctatggtgagcctttcttgcagtcttttggagccttacaaagtacaggaagttaagattccactgaacttatcaagcaggttttatgattctttttatgtcttaataaatgtttgtatgtgtggacagagtttggtctggtacttgctttcattataacctcatagtgaagttacagaaatagctaactgacctcccacattggtgaccactggtaattactaaaaataaataaatgtatgtaactgtctgggtttagcacatttatttatttatttttgagacagagtctcgctctgtcacccaggctggagtgcagtggcatgatcttggctcactgcaacctccaccttccgagttcaagcgattctcctgcctcagcctcccgagtagctgggattacaggcacacaccaccacatccggctaatttttttttgtatttttagtagagatggagtttcaccatgttggccaggctggtctcgaactcctgacctcaggtgatccacctgtctccacctcccaaagtgctggcattgtaggcatgagcgaccgtgcctggcccaggtttagcacatttaaagagatacgagggataaaggtgtagaagtggaatctccttggaattcacttagcatgtttcgtcataaatcctgaaatcaattctgctccctgctatctttgccatctcctttgctgtgcccttgcctaaggtgactgtggagaaactgtgtttccctcagtgagtgatgaatattctttggcacctattcatagtacaggtacatgttcagactaagttggtcgcttcacccttcacttgagggctgcacttaatcagacctttctccttcccggattcctgctgtccttgtaaccattcattaaatactgacctggtttgtttatacctactgtcccaagtgcaagtagacttggtctttggtgtaatacatatttgttaaataaattgattctcgtttgaatctgttattaactcatttcttattccacattttatcagtgacttacatcatgtgcaaattatccgggtgaaatttaatcattactgaaaacgttattttttttaacttgagttttaacaagctaacttgttgtcttatgtatgttcatgagaataaggaagatttaacttatggtagcttgcttggatcaagaccattaagtttcagttggccttaagttagtgtgagccagtacagtactgtgttgttcctgtcacactgatgtgagctggctgggctcagtggcttacgcctacagtccctgcgctctgggaggccgagacacgggattccttgagaccgagagttccatatcaacctgggtaacagagcaaaaccccgtctcttaagaaaaaaaaaagtgatcttaggtgttattaataacatagtgtttagagcttgcattgttatactctgattacattatatcatgatatttctgacatgaatacctggatgtgaactctctgactttgccactagtgaactttgtaagtgatttaaggcaagtgatttggcctcatcaagccttagttttcttatttgtaaaacggagatattatcagaactgacttcgtgggattattatgctaaatattgtcatcatagccattacctgatagatgagataatgcacagaagagattcatcacagtgcctgctgtatacaaaacgtgtcctaagtgtcggctgcttaatgtccttaactgaattttgcacatttggaaagcaagactcaaagcccatggatagtgagtagctgggtgtaaactcatgcctgtccttttccagagctggtggacttacccattgtgctgtatcctttctcagaagagttgggcaagtgacccagtgtccagagttctgccgtcattccaacaagtacccagtgcagggccagctcagtcctcttggtctctgaatggagtgtggtgctagctatggagttagagcctgggagagagcatctaaacctagggaagggaaaggaagaaggagggatagagagagaatgggttaagagaaaaataacaacagcaaaaaagatccttaggaaatcttttacttcagatgacattattagtacagttatagagcagctactgccaaagttcttcattatctcttctggtacctgaattctcatctatcttcaaggatccaggatcctaatttatagttgttttttcctgagtgtcttcagggtgccttatgagtgactctccacatataggatcaagtcccagttccttgaatggcatatgagtccttccatcatctggacttttttttatcctagctttatttgctacaactctcctaagcataccatgcgcttcagtcatattgagaattccttgtagttgcttagtgctaccctcttcttccagtgtcacggcctttacacatgctgttcatgtgctcccttctctgtgtgtagcatcctgcacaaagccttattagagcatttaacacaatttgttgtgtttgtgccatattttactttgaagttgccaaatgcacttgatatttacctgtaattgttgatgcagaggggcagttttaaggttgggtttaattgatttgtatgcatattcttttataggcatagcctacctggaagaatatataggagaccagtaacagtggttgccttttgggcagggacttgggtgtctcttcagtgtatccccttttgtactttaaaaattctgaattatatgcatctatgatttatttagaagaaaattttatgtatggaagattaattgatatgattagttttattgggttttatgcgctaattggtaatacattaatagcccttaacagagaagatgtgtcaggtgcaggtatttgttttgttatagcttttccccagttagacagataggggcacactcctaaattcataacagtctggcatgtagcccaaaggggtgaagaacagtagccatagctaatgctgaatgagtatatattacatgctagacattattctaaacactttaagagtgttaattcaaatcattctcacaacctcttgtggcaggtgctgtttttacccttattttacataccaggaaatgagaggcaagaagggtgacttgttcatagcaggacacacaggaggagaacatagaatgttgggagttcagcctgggtggcttggctgcagactgactcgtaatgaccattctgctgcctgaacagaaattagaatggggattcttgcttaattcttccattgttatcatgatttgttgtattcgctgtaacaattgcttaatatgtaatttctaggagtggtgtttgtggtgattatcagatgtggtctgtttcacagttaatattaacatcatattttaaaacccatttaagaaagtgtaaacattgtgttctcaggatatgcttactgtttaagaggggtttaccatgaccatttaaatacagaaaagtagatgattatgcattctcagacctgagatgtgagcaaggctctgagtggcttcgagttttatcacattagaagtttacctatttttaaggcaggggcttggctcgggttggaggagttaagacatatatgatgtaaaggttaaaccaagacctagcaagcttttttcacttctgagattctggactttttcctgtatgttaaaatactgctctaggccgggtgtggtggctcaggcttgtaatcccagcactttgggaggccgaggcaggcggatcacctgaagtcaggagttcgaggccggcctgaccaacatggggaaaccccatctctactaaaaatacaaagaaattagccgggcttggtggtgcgcacctgtaatcccagctattaggaggctgaggcaggagaatatgttgaacctgggagacggaggttactgtgagctgagatcgtaccactgcactccagcctgggcgacagagtgagactccatctcaaaaaacaaacaaacaaacaaactgctctaggttatataagagtactttttaaaaggtcatttataactctaactcttcttttagaaatataactgacactttttttctgtagttccgttgaacttaaaaataattcacaaatacagaaattaccgtgtgctaatgtgtattacatccaaattacttggaatggtgtgttttgaaaaacgattagcttgtacaattttagagtaggaagaaaaccttactaaatagctttccatttgagtgctaccagtttatgtggaaatcaaggcctacagagattgatttacttaaagttaaataggtcattagtggcaaagctggacttgggtttaggtctctagataaacacaggatacacaacttctctactgtttggtctcagctgcttcaaaatttggtggttattcaaacttaacattggattcaaatggtgtaatctgcttagtctgggcatttttggatatatgcacaattaggtacctattctgagttactgaaaatatgccctgtcccaacagagatagcagataaattatacttacttagtatcagacttccctttgaaaacaactcatgacacttagaatttcccagaatttagaaaataaattgtcaagtaattttggccaaagtgttttttttgtttatttatttatttattttttgagacggaatcttgctctgtcacccaggctggagtgcagtggcacgattttagctcactgcaacctccgcctcccaggttcaagtgattcctgcctcagcctcccaagtagctgggattacttgggattaccagcacttgggattacgggcatgcaccatcacgccggctaatttttgtatttaaattatttatttatttatttagagatggagactcgctttgtcaccagacaggagtgcagtggcgtgatctcagctcactgcagtctccgcctcccgggttcaagccattctcctgcctcagcctcccgagtagctgagattagaggcgcgtaccactagacccagctccttttttttttttttttttttttttttgtatttttagtagagacagggtttcaccatattggtcaggatggtctcgatctcctgacctcgtgatccacccaccttggcctcccaaagtgctggattacaggcgtgagccaccgtgcccagcctttttgtatttttagtagagatggggttttaccgtgttggtcaggctggtctcgagctcctgacctcgtgatccacctgccttggcctcccaaagtgctgggattacaggcgtgagccactgcacccgggcttgaccaaagtcttttagtgtctgaaatatcatttgaagattttcttttggctacagaatatgtagatacccccattgtgaatacattaacctactatgctttaacaaagtaattatagaacccgatcatatcagatgaattttgtagttccctggttgtaaacggttatactatttaataacctattttaatattaccctaagtatttatagtacatttaatattactgtaagtaatatagtatttaatgttactctaggaagtaatgtttattagggttatattcagtgttgatgttggaaaaacttggtgttttttggtcttaaaccatcggtttaaaagtaacaatttctaatgaatgtgttttttctctcttcagacttttgataaaattcttgttgctaatagaggagaaattgcatgtcgggtgagtagaattttcgtcttattttccattttactctgaaattatttattaaacccctttaagtgtgaatcactattaatagacattaatatattttaaaataggttattagaacttgcaagaagatgggcattaagacagttgccatccacagtgatgttgatgctagttctgtaagtatatttttgctttgtttaaatcaggacttaattttgggtcaagcagaaaaagtgagacatacaggctttttttcttggcctgcacaagatacattcaagtttaaaaactgtttacttgttcactgttgtgttaagcaaaacgacagtatcacagtatcttctatatgtgccgtaagtattttcttttcatagctttaaaaacttagacagaaaaattgccaggctgattgctggtcaccaagtagatttaagcaaagcatgagaaaatttgagtcaaagattaatgaaatgtttacacagtgctcccttatgagagcactttcccccagcatagcttcagtatcactaagggaatgctacaattgtttaacctttcctaaatgcttcaacgtgttcagctgaaagtttgacaaaaatgaaaggtaggctaatgctaattggatacaaacaaaagaaggtttagcataaagcagatatacttttatttggtacttttaacacagcaggccttttttttttttttttttgggacagagtcttgctttgttgtccaggctggagtgcagtggtgtgatctcacctcactacaacctctgcctcctgggttcaagcgattctcccgcctcagcctccggagtagctgggattacaagcacctgccatcatgcctggctgatttttgtatttttgtagagacagggtttcaccaagttggccaggctggtgttgaactcctgaccttaggtgatctgcctgccccggcctcccaaagtgctgggattacaggcttgagccaccacacccggcccacagcagggattttttttagtagtaatgttatgaatgagtagaaaaaaatcccatggggaaagaatgtaaattattaaatctttatggcatgaaatataagtagttgaatactaatgcaagcattgtttctcattgtctcatactacttttgataatgggaccctttggtagggtccatcagttaatgacagggatatgttctgagaaatgcatcgttaggtgaattcaatattgtgtgaccatcacagaatgtacttacacaaaccttgatgatacagcctagtacacacctatatagtatagcctattcctcctgtgctacaaacctgtgcagcacgtgactgtactaaatactgtaggcaattgtaacacaatggtaagtatttgtgtatataagtgtatctaaacacagaaaaggtacagtaaaaatatagtataaaagataaaaaatggtacacttgtatagggcacttactgtgaatggagcttgcaggactggaagctggtctggatgagtcagggagtgatcaaaggcctaggacattaccgtcactactatagacttcataaacactgtatacttaggctacacgacatttatagaaaaatagttttctttcttcaataataaattaaccttagcataccataacttttttaaattataaacttttaaattttgtctttactctttgactctttcttttttttttttttttgagacagagtcttgctctgttggccaagctagagtgcagtggtgcagtcttggctcactgcaacctctgtctcccgggttcaagccattctcctgcctcatcctctccagtagctgggattacaggcatgtgtcaccacgctcggctaatttttgtatttttagtagagacggggtttcaccatgttggccaggctggtcttgaactcctgacctcaggtaatccacctgctttggcctcccaacgtgctgggattacaagcgtgagccaccacgcccggtttactctttgactctttcataataaaacagcataaaatgcaaacactgtataactgtacaaaaatgttttctttatatccttattttataagcttttttctgtttttaaagttttttatttttcatttatttttgactttttgaacttttttggtaaaaacgaagactcaaatgcacacattagcctagacctgcagaggatcaggctcatcaagacatcagtaggcatgggatcacatcaagttagaaagcttctacacagccaaggaaacaacaaaatgaagagacaacccacagaatgggagaagatatttgcaaactacccatctgatgagggattagtaactagaatgtataaggagctcaaacaactctataggaaaaaaatctagtaatttgattaaaaaatgggcaaaatggccaggtgtggtggttcacacctgtaatcccagcactttgggaggccaagcgggcagatcacttgaggtcatgagtttgagacctagaataaataaatggatgtttaaccagcctggctaagatggtgaaaccctgtctctactaaaaatacaaaaattagccgcgtgtggtggcacacatctgtagtcccagctacttggagactggggcaagaagcttgaacctgggaggtggaggttgctgtgagccaagatcgtgccactgcgctgtagcgtgggcgaccaggcgagactatgtccaaaggaaaataaaaaggggcaaaagatctgaatagtcatttctcaaaagaagacatacaaatcacaaacaggtatatgtaaaggtgctcgacattactgatcattacggaaatgcaaatcaaaagtacaatgagataaaatcttaccccggttaaaacggcttttatccaaaagacataacgagtactggcgaggatgtagagaaagaaccctcatatgctgttggtgggaatgtaaattaatacaaccactataaagaacagtatggaggtttctcaaaaaactaaaactatcatatgatccggctgctagatgtacatctgcttctaggtgtacacctagcaccagggaaatcagtatatggaggagatatctgcactcccatgtttattgtagcatttttcacaatagccaagatttggaggcaacttaagtatccatcaacagatgaatggataaagaaaatgtacatatgtacggtaccattcagccatagaaaagaatgagatcttgtcatttgcaatagcatggatggaactggtggaggacatgttaagtgaaataagccaggcacagaaagacaagttttgcatgtactcactcatttgtgggagctaaaaatgaaaacaattggactcatagagagagagtagaaggatggttaccagaggcttggcagggtgtatggagcgggaggggtggggatgattaatgagtacaagaatatagttagatggaataaataagatcttgtatttgatagcacaacagggtgactacagtctgcagtaatttgtggtacattttagaataatttagggaatagaattgggatgcttgtaacacaaataaatgaatgatttagatgatggctaccccatttatcctgatgtgattattatacattgtatgcttgtatcaaaatatttcatgtactccataaacatatacacctcctgtatacccacaaaaataaaaaaagacatcactaggcaaataggaatttttcagctccattattggagctgaaatgtagatgcagtacattaccgaccaagctgtcatatggcgcatgattgaattctgatctacaggtagacttttcagactttgcaaaagtggtttcaaaagaattgttgttaggtttttctcatttgtaccttccctgaagcagatgtggtagttttacattttagagacttttcaccacttctggctgaaagcagtagggaatataccagagattatgatacataatttataataaaatttaccagaccccacaatggaagcaattgcacactcagtcaaaactttctcttactatgacctactttaggtcaatttctagaaagatactataagtaaaagcaggataatgatggtgggaatgtcaaaagtttcatttaaacctcaacagtagggtcaaatctgctatgtggtttctgtttcagtctcaaggaggctgaaaaggtgaattcctgtaacagcatcttttgcatcctcagcacgtgatcacagaggttactatcatagctaatcagctttataatatcagtaatatgaaaaagccatgctattcagatgtattaatttttgcatgtttgttttcaagaggtgagcattttaaatgtaacttggagtaaaaaactttataggctttgtatgttaatttcacatgtggaaatgtaaatactattccagtaggaaaatactgcaacaattgattgcaaaagctattcattgtctattataaacaactaatttttaaggtaattatgcaaggaaaaagatgaatggatactgcacatatcaactaataagtcacacaaggaaggaaagccagctaacttgcaaacaattaatgtttgatagaaaaatgttggcttttagagatgattatgcagtttacctctgttggtcccttccctccaacatgttcttcaaaattgtcttcagtattcttggtccttcgctcttccatgtgaattttaggatgagctggccaattaccccccttccccaatttttagataccatgaacaagatttttataagtataacttttgcatgtctttttgtgaacataattttgattttttttgggtaaatatctaggagtggagtagctgggtcttagggtagataaggagttggcaacctttttttgtttgaaagtaaatacatttttgtctggatagcaaatatattttagattttgcaggcccctgtggtcgctgttacatatgcttctttttgttttgttttgttttgttttaacaacactttaaaaatgtgaaaactattgttagcttgagagctgtgcaaaaacagcccttggatcagatttggccagtgggtagacagtattttgctgatgcctagaataaatacatgcatgtttaaatttataagaagctgctaaatagttctccttcatggttgtatcatattttactccctccagaaatgtctaggtcagggtgcttttgtgtccttgccaacacttggtgttttcagtccatttgattttgtgttttatttttaagtggttgtgaagcagtatgtcattgtgtttttaattttagattttcctgatgaatactgatgttgagtacttttttgtgttattggtcattcatttatatttttttctgaagcatttcttcaaacataatgaaaaaaattagaaaagtagtaccagtatattggtatcagtttactgttatataccagtataacggtatctgtatacccttcacctagattcagcaattgttaacattttggcttgtttgctttatatttgtatccatatgtacattgtgtgtgtgcattttttttttttttggctaaacaatttgaaaataagttacaggacatggatgaagctggaaaccatcattctcagcaaactatcacagggacagaaaacaaaacactgcacgttctcactcataggtgggaattgaacaatgaagacacttggacacagggtagggaacatcacacactgtgtcctgttgtggggttgggggatgggggagggatagcattaggggaaatacctaatgtaaatgacgagttgatgggtgcagcaaaacaacatgagacatgtatacctatgtaacaaacctgcacgttgtgcacatgtaccctagaacttaaagtatatatatatatgtaaaaaaagcagcattaaaaagaatcccctggacaggaaaaagaaaaaaaaagaggccgggcgtagtggctcacgcctgtaatcccagcactttgggaggctgaggcgggcagatcatgagggcaggagatcgagaccatcctggctaacacggtgaaaccctgtctctactaaaaatacaaaaaattagccaggcgtggtggcaggctcctgtggtcccagctacttgggaggctgaggcaggagaatggtgtgaacccgggaggcggagcttgcagtgagctgagatcgtgccactgcagtccagcctgggcgacagagcaagactccatctcaaaaaaaaagaaaaaaaaaaaaaaagaaaataagttacagacattgtggcattttacccgtaaatactattcatctcgcagtaataagtatggttttctacatatctataataccttatgaaacctaagaaaataactcattattctataatatcatgtaatatgcctaccacattcaggtttttccagttgaccccagttgtcctttttaatatttttctttgatccacagttcaatcaaggttcatgagttacatttgtttattatacctctttagtctcttaatctaaaatagtgcccctattctccctctttttttgtttgatttttattatgttggcttttagatattttggctttgtatggaatctattttctcatgaatagattcagattaaatatttgacaagactacttcataagtgatgttctttctttttttcttttttttgtgacagagtctctctcagttgcccgggctggagtgcagtggtgagattataactcactgcagcctgacttcctgggcacaagcgatcctcccaccttagtttcccaagtagttgtgactacaggtgcatgccaccacgcctggctgatttttgtattttttgtaaagatggggtttcaccatctttcccaggctggtcttgaactcctgggctcaagagatcctcttgccttggcctcccaaagtgctaggattacaggcgtgagccaccgtaccccagccagtaatgttattttttttaatagtaatatcataacaagaggttcttaatgttgaattgttctgttgttatgctaagtatgatcatttggtttcatcaggtcttcccattataatggtacattttctttttttttattaaataatttttggggtgagtttttgaatccttgtgaatattttgtccctcaaccacctctcatctaatgtttttgcatcgataatgaaaattgcctgagcctgattactttggttacatttgtcttgtttgctgtctgtggagtaagctgttgattttctgctcctttttgaatctgcctgtttttatgtattatcttttttcttatgtatttgaggcctttagtatatttatttttagcatatttaatttaaagaatctatcatattattgtattatttcaagtttgtgggtgtttatttctattcctgactcttcctcataacatattgtttcctcgcatgtttaaattttggtgtgtgattctatgtttggtgcttttgttgttgaatttcaagatggtttgggttatggatttggccaggtaggataggtggtatatttgtttccatcacaccctccagggtatcactcatctgggactaatttttatattaaatttttggcataaagattgtcaaattttgaagataatgggaagaacaaaatgagattgcacacacacagatacacacctgttgaataggctcatggtttctaatatctagagacattttcgtttactttgaaccacagagatacgagcatagggtttatcctctctatttcgtaggttgattcctcccccacaacctttcactgagaatgtaatctttgagcctcctggctttagacagaagggtttccttcaaacctccaactcacacgggatctgtttcctttctctgatcgttaaaacccaatcttctagattattgagattcccaccttcactctccaagactggctcttgtggatgcagactgattttcatttttatattatttatttatttatttatttgagccggagttttgctcttgttgtccaggctggaatgcaatggcgcaatctcagctcactgcaacctccatctcctgggttcaagcgattctcctgcctcagcctcccgagtagctgggcttacaggcatgcatcaccaaactactgaattttcagtagagacagggtttcaccatgttggccaggctggtctcgaactcctgacctcaagtgatccacccgcctcagcctcccaaagtgctgggattacaggtttgagccaccatgcccagccagattttcagattactttttttttttttttttttgagacagagccttactctgttgcccaggctggagtgcagtggtgtgatcatagcaaactacagccatgaactcctgggctcaagtgattgtcctgcttcagcctcctgagtagctgggactacatgcacatgccgttgtgccctgcttcctttttctttttcatcccttgtagtttttttgtgagccaagctcttcatttgaaggatgtttgttatatttaatctaggtctttagatgtttctaaggaggatttgcaggttatttagttggcttattgttggtttgtcttaaaacaatatgacatcctattctttgttgaggaaattcccttaatttctttgagaaataaagactgatctagagcagtcttaaagtcaggctttccctaggaaaacaattcatttataatgatgagattaatgtgcctgaatccaggggatgaggctatagggaagcagtataaaatactccaatgggaattggtcagggcaggagaaagcaaaatgggagttaagcctcttattaagtcatgaatttttttttatgtttcattttccaggccctaggaaagcacgcttattattctctgggaagatttgtggagaatagtttatgaagagaagacaattctagtgcaagaatgtaaccagctgggattttgattgatattgcattgtgtctgtagatcattttggagtgtatagctatctcaacgtttttaagtcttcctatccatgaacatgtgatattcttccatatttaggtcacttggatttctttcagcaatgttttgtagtttcatactactataagtgtaattagttttttaatttcaattttttaaattagttgcaagtctgtagaaatacaaatgattttcatataatgattttgattcctgtaaacttgctgaactcttttattagttctaatagttttttagtggatttcttaggttttttttttttttttttttttttaaagatggagtttctgtcacccaggctggagtgtcgtggcatgatcttggcccactgcaacctccacctcccgggggtcaagtgattctcctgcctcagcctcctgcgtagctggggttacaggcatgcgccaccacgcacagctaatttttttgtacttttagtagagatggggtttcaccatgttggccaggctggtctcgaactcctgacctcaagtgatcctcccgctgtggcctcccaaagtgctgggattacaggtgtgagccactgcgtctgggccttaggattcttttttttttttttttctctcttgagaccgagtctcattctgttgcccaggctggagtgcaatggtgcgatcttggctcactgtaacctccgcctcccaggttcaagcaattctcctgcttcagcctccggaatagctgggactacaggcatctgccaccacacccggctaattttttgtatttttagtagaggtggagtttcaccacgttgaccaggctgggctcaaactcctgaccttgtgatctgcccacctcagcctcccaaagtgctgggattacaggcatgagctactgtgcccggccaggattctttatataagatcatgtcatgtgtgaatagagatagttttacttctttccatctggatgctttttatttcatattcttgcctgatttctctggctttaacttccagaacaatgttgaagaggtgagaggaggcatccttgtcttgttcttcatcttagggggaaagcattcagcatttcacccttaaatttgatttaggctctggtattttcatagactttcattatcaggtggaagaagttaattgctattcctagtttactgagggatttttatcaagaacaggtgttgcattttttcaaatgctttttctgtgtttactgagatgatcatgtggtttttgtcctttatttatatggtgtattgttacattaattgatttttttgggtgttaaaccagccttgaattcctgagattaatcccacttggtcatgctgtgtaatcctttgtatatattgctggattcagtttgttagtattttattaattttgtgttcatatttacaagagatattgtctgcagttttcttatgatgtctttgcttggttttggtgttagtgtgatcctggcctcatgaattggaaacctttctctcatcttctagtttttttggaagaattggtattaacttttctttaaatgtctggtagaaatcaccagtgaagccatctgaatctgggcttctctttggttagtttttgattgttaaatctacctttttacttattgtaggttttttcagatattctgtttctttaatcagtgtctgtagtttatgtctttctacaaatgtgtccatttcatcaaagtttctagcttattggtatagtattttcttatttttattttataaggtcagtagtaatgtctcctctttcattcctaaatttagacatttgagccttcccttttttcttggtcactggcctagtctgttcaggcttgttatggattgtcatagtctgggtggcttataaacaacaggaatttatttctcatagttctggaggctgataagtcaagattgaggcactgttagatgttgtccctggtgagggctcctttcttagtttcttagtggagccttcttgctgtgtcctcacatggtggaaggagcaagggaaggatctcattcatgaggtctctgccacaagtgttctgaaatagcattccagaagtacaaggtgatacagttagtcaagagctataaattggtggataggaaaggcaaaaataagaagattgtattgagtttctagttatacaatgaactgaataactccttttcttttgagacaaattctcactctgtcgtccaggctggagtgcaatggcaccatcttggttcattgcaacctccgcctcacaggttcaagcattctcatgcctcagcctcccgagtagctaggattacaggtgcctgccaccatgcctggctaggatttgtattttagtagagttggggtttcaccatattggccaggctggtctcaaactactgacctcaggtgatccaccctcctcggcttcccaaagtgctgggattacaggcgtgagccactgcacctggccctgaataactctttagaaacagaaaaaatctctggtggttggttaaatagtaaatataaataaatctataaatttcctatatatcaataaggtagaaaatacaacaagaaatgtaacctcgtagaagcaatggaaatgataaaacactgtatgatgtgaatttaaaatgaaatttttaggacttacatgaggacttcttatttttgtatagggaaaccgatttttaaaaatgctcttttctgtacattttctattaaatcctaatataacaacataatggggggggattgacaaagagtaaatatgcaagaatagcctagataattctgaggaaaattgatggggagtagcctaacatattaaaatacattttaatacattgtaagtcagcaagaagacataggtctatggaatacatttgttagattttaggcagtgggatgatgtgggaggatttttgagttgttaaagagggtctcatgaatattatgtggatttagaagacaaggtaattctaggattgcttgcctctaatttactgagatttttaggtatctcagagaagataagaaatataaggaatgagaaatgtttaatggctttagtgactaggagtttctaaatggacacatgggcccatttcattagtttggtgaatagtgagagcaaagaatttgggaatttaagattgttgtacttctccaaatgaatgttttaagtataaagactagtatgtctttccacaaaaatggtaaaatatattgtcacatttatatcaaactgctaaaataagttttgatattttttaaaaaatgagatctcatcaggttaaatgaaaagagttgagaatcttcattcccaaagaggaaaatgattctgtatatcaacagaatcattcaacctttgactgtattctctatctacgttcctaaattgaacctatctatacatattttgttgctttgtctgtgtacagtcatgttggatttaaatgagaaatatctgattttaccacgttgaaacaagaacctaaaattagggaagtattcactgtgactcacatcttacccaggcagcctgctgttgaaaggatgatccctggtgcgcactgtagtctcagcctcaggattctataatgagattgagtggggtttcctgtgagcactctggggtgattgacagtaaggtgagggcagtcatcactttttatgcctacccttgatgatatgtccctgctgtctggggagggaccgaggacgaataggacttggtgatgtctaagtaattagtgtatgttggttccagctgaacaaactggagggtaatgatcaggtaaatggaaatggaacacattaatgcagactaaggtataaaagaccttagggttaaacttttcaacattttatgggattattagaatatctttatttcattttttatatttacatgtctctgtatatacatacacttatttatatttttgtcagtgtatcttcagttttaccttagatgtatatagagatgaaagcaacttaaatgtgaaaacctcaaacgcattttttctcctttacatgatttcagaatattttcaaactttttctgtttggaaaggagttaaggttcttaattaaacattttctttttaatttcacaaaaattgttaatggacttgtttggagctgatgcctatcactgatcctcaaataggagcaaatgactaaagtcaggcttggaaaacttttttggggtgttaactgaaaagtatcaggtgaccttttatttgtgtgtgtgtgtgtgtgtgtgtgtgtacttgagaatgttatatttcagtaacattttcttaaactgccttttcttagtaaaggatattttaagatgatggctgtcctggtccatgtttcacagttggtcttaattagatcagaaatatttccagacatttaggttgcaataggaaatctataggattcttaatttattcttacaaaaggtatttatagttgccattcttcaatattaactttccttatcaacagcaaaaagtcttacggcaaagcctctggagagtgactgcagtactgcatttaatgggaagggaggaattgtttgccttagtatatggttttgaatctgggagtctggtaattaggtaatcaaagggtttaaaaaatggcataatggctttaaaacttgctattgctcacttttcttataaaacttagctttcagaaatctttttagattaagaatacaatgtacctactatgcaaatttaaaacaatagacttttcattaaagaactaaccaggagaagaaagcatttaagatgtgtagacatttcttttccttttctttttttcttttattgtctttggaaaaacttattttgcagaaacagtatactgtatcaattttaagtgttttgattatctttgacttggctaaattattttctctgcatttttgggtaaaatggaataggatgggattcctggtaggtatttgttcacattaatactatatttaattggagatcctgcagaatagtagcaggaggctgaagagaattatttagcattagcaatggctcgtctgggagttgtggactaatcaaggcgctgtagtgttagtggtggggatgatgggaattatgacgattatgacatgtaagcatgtctgtgtacgaattggacaggcaatgagttaatcaagaagtatgttaaatggctcccatgctgattcattattatctaccatagtgcctgtcaggttgtgtatttaaaaaacacaatcattgccaaattcaatatgtatatgagctgaattcagccattgtttgcttttccataaaataacctcagatttccttatatgtataaaaatagaaaattgtgtcaactgtgctgtgatttgtgtttatagtatggtatcttttttttttaacagagtcatttaaacctatgtttgctttgccctttcatatattcgtgtaaatattctctggcttgttttctatgcataaagggtttgggtttgaaagtgaaatttatgtgtctttacttttcaagatgaaaaaataattccagtatttcagagacaaattaatatttaacacatgaactatggacaaatcaaagcatgaatcttttccaccatcaaaatgcttgaatttaaattgggggtgggggtggaaacctcctttgctgtagcggggggtctctttgtgccaggtagacagacccattctgtgcccagcatggttggggttatctgtcaggaaactatctattagaaatgctagaaatgtatgtattttgggggaatggaactaataaattgaattccttttagaaaataaattgaaatgcagcataaatccatgagcaaactggattatatctctaggcaaatttaaagagttattgtacagatgaacaccatttttttttattattgtgagcactgccaaatttaataaaactttctaccaaactgtgactttcatgtattaacttaattaaagcagtgttatgggtaatactcagtgttaacctgtggatggctgttattgaaatccattatcaatggagtcagtattagtggtcagcagcatcagaagtaaaacttgcaaccaagaccctcccatgggtgctgtgagctcagcaggttaaattgtcaaaaaccagtaaagcttcttaaaggactgatagcttaagccacccggagttaaaggtaaactagtcattccagtcaagatggactatgactttatttagcagtcaggcaaaaattatatttgggcaggatttatatcagtatcttcatgtatgacttattcatttgtatgttcatgtaccttgctatttaaattcaataaaaccatccagctttttttaatctgtgggaagtgacttgtggatattttcttttataaaacgttaaggagatgtcttaagactttctgaattttttgttaataacttatactgaagttactttttacttatactaaaattttaaattaagaaaaaagtgaaatattgtattaatatatctttttggttttgtttattttataatttctggtaaacttaaacaacatggttttaaagggaatttatgtatttcagtgtaattagtacctgctgttatgaaaaagcacctaatcatggatttatttttctctaagcagctatttgggaaggatcagaagtcctatcttactgaaaaagcatacatataataaaagatttgagggccgggcgtggtggctcacgcccgtaatcccagcactttgggaggccgaggcaggcggatcatgaggtcaggagatcgagaccatcctggctaacacagtgaaaccccgtctctactaaaaatacaaaaagttagccgggcgtggtggtgggtgcgtgtagtcccagcttctcgggaggctgaggcaggagaatggcgtgaacctgagaagcagagcttgcactgagccgagatcgcgccactgcacttcagcctgggcgacagagctagactccgtctcaaaaaacaaaaaacaaaaaaaaagatttgatatacagtttaccttattctatgttccagtgtttctaaggccatgacttaactcatttttacagcctccctcattcagactccttagtggagggaaaggacatgattattccaaataatgcctctcactcattcagaatctatggtgtactggaaaagcacataattacataaggattgaattactgttactgttttaaattgagaaaattggggcttcaagtataaagccaatcttcgggttgccaaagatcactgggctagtaagtagtggagctgagattcaaattatgtgtaacttctaagttgtactgtttccactgtgcatgttgcttctcatactaagtatgaggaaaagtcccctcccaccacaaaacgaagtgaagtttattactttgaaggcagagtttttattagtgcctgttggaggctgggtactatgataggtactggaactagaagagtgactggaagtgataggattgctgctttagagatgggtatagagaaataaaacataaataattacaaattgtgataagtgttatgagggaaacaagttgttgagagagaatcatggttcccttcagtaatagggtgctcagggaaagtcttgctgaggggtaaaatgtaagctgagaatgatggatgagaaggagtcagccagctaggcagacaagaccgcgtgcgcaaaggctctgagtcaccccagtctgcttctgtcctcagtactctactatagagttcttgctagtgtgaccaccagttttctcatgttaagtccagtggacatttttcagtcctcttctgtttgacttcccagaatcttttaacactattaccctttttcagacactctcatcctctggctttggtgccattttaatctcctagttttctctctacttctgtggccctcctctgtgtcccctctacaggaatcactcaaggtttgattggtgggctcttcttaaaattgttttattttttgtactttctctacccttaccctgaaagatggcattctcttccacttctgtttctgtggttttaatcaaccctagactccaactctgttttctctctctctgtgacgtctctagttgaatgttttaccactacctcaaacccagcattacccaaactgaactttgatccttcgggcttcttgtatctgaatcctcctgcagaagcacaagatgtaggaatttatgttcaccatcattctttctttcatttctcatttccaatttatgagcaagtccttttcataaataattttggaatctagtcacctatcttcacttcgttattgcttctttagcaaggtcttttaaaatcttctagtgaatcttttaatcttttagactgataaaattaatttcatctggggcagtttatctaatgtgaactgtttcagtttctgaagttttgtttgatagcgaatgctttcttactctgttttggaattttagttcataggctcttttttctggtgaaagttaaaaatgtttattgctcttcatgcttcatcttctcccttccctttgcttccttgaccttcctcttcctctctctttcctagtttctctctcaccccggccattgctgcctcccaccttctccctgaccagtagttttgtgggtgcccccccgccggcattttggattcctaatctacatccaggtcttatggtgatagtttggacacatggcagattagtcccagcagcttgttcagattttgaccctgaagctgtggttctgcctccctaggtccacagtctccaggagttgtagtgagctgtagttgcagacaatacttggtggcctcctcttcaggccaagggcagttcctctttggcctggtcttcaccagtggctctggctctcttctcagtcttgtgagaacattctcgccatctgtactttgcatttggcacttcctgcttctgaggaaccagccagtggttagcattgttatgcgtttttctcctgttttgagtttgtgaaatgtttaccatttatttctgcttacctgttttcttagttttcctttctgggttttattgtcattgttgtacatttgaagtagagagagcttttgaaatatgaactcactgtgccatcctttttttgtgctaaatttattgaagtccacaaaaaccagagaaaaatgtcagatctcaaaattgtgtttttgctcaatttcaagcatcaatttatccaagttacccacttgatacctgacttgccctacttagcaagtcgaggcattgttttgctggctctggcactctggctatagccagtcactcaccccacttgggattgcttcctttgctgcttgttcctgctgctgctcagtggcagctgccaagttggagtagcaaagggaaaagtttagtaggcatcttttaggaagacagaatgctgtctggagatggcagtggtggatttatatctgagtcattcatctgaattggaacctgtacaaaggaaaagaggttctagctcagataaatagatataaattcattgttgctatcttcaggcattcatttatttaattagatgcactgaaaagcactctcgaggtgtggggacagggtgtggtgtatccaatggagagtttgtagaaattgttaagttgaggtacaactgcttataaatagtatttgaaaatgtcttattttgtaaacaactgagtatttagttgattgcaaatcttcctgtaaatcaatgatagattagtttagtttccgggtctatagtatattcctcaaatggatagtaggtatttttgtaaaggggactttataattaaatatagcaaagtgtcttccgtggactgtattaattaaatgttacagatccccaggctgcactgatgaaactcagctgggatgctctacatgtgatagggaaatttggtttcaaaattacacaacctatttgtgaaggtttcgtgtaatttttcttttcagtaagaagtgtttccatgtatcagtttttttacatttaaaaaagtaatttattttcaattgtggtaaagtatacataacataaaagtttaccattttaaccatttgttatcaaaagatgatgagatctgtggaggaaaaaatggagagctttattttctatagaaaaaacttgcagactggggaggcatagttttcactagtgaaaatgttgctctaaagagaaaaaaaaaggggcttggcttaagtagggaaagttcttgccctcattctctgtgaggtctgtgcaaacgaaggattcaagcttgttcggttcagattgaaccctaatctggtgccagaagtgtctctgtcagatgttccttcgaaaggctggtgcaggggaggtttctgctgcaattcttcttggccccagtcacaggaactgttctggcttaagaacagttcttaatcaagagccgtgatttccaagaacgaagggtggtgaccactcttctctcactctgctatggccgcttggacccattgtctaaatgtgggtatattagccacagggagtgcatctcatctggagagcttgcagttttatttacaattttatttcacacatttttaagcatacagttcagtaacattaagcacattcacattgttttgcaggatgaaaagttctggaaacgggtggtggcgatggtttcgcattatcaatttttacctagtatgcttttttttatacagtgttttaaagtgttggaaaaaacttatgcctttacagtattttattatattagcttatgttcattgtatggggttgtaggcagtgacagatactcaacctttaacaaataccgttgagcacttgttatgtgaagatgctccacatcttttgaactaggcagttgtggttcctgcactcttgtggcttccagttcagtggaagaagcagacattttataattacatacatttatgacattagtgtaatgaaaaattatagggtgttttgtaagtgtggaacaggaggatctgaaccagcctggggagtcagggaatgcttttttgaggaattcacattttggcagagacctgaagggggtgacaagagttaggtgaagctgggagaggacaatactagggcagaatagagcttggtaatttccagaaagttagatagggctaatgtactcttaaacaggaggcctgcagtgttgttcacaatgttcacctatatgtagttgtgtttgttttttaaatttttaaaaattatcctatagtaataggatacccatctttcatacccttctgtggatatcagcacatgtgtagattatgtcactactagcacaatcagaatgcagagtagttccattacccctcagactcccttgtgagtcattacccctcagactcccttgtgtatcccattagtgtcacatccttttccaccctgacactggcaaccacggatgtgtttcccatcactatagcattgtcatttccacacagcgtgtaaccttttgagactggctactttcactcagaatatgtttttgtgattcatccaaactgttgtgtgtatcaatagaatgttccttttttattaccgagtagtgttgcattgtgtggatgcacaggtttttttaaatccatttacctgttgaaggacatttgggttgtttccagcttttgacaattatgaatagaactgttgtaaacatttgtgtacagattctgtttctctagtataaatatctaggagtgggattgctggtcatatggtaagtataagaaactgctagacttttccagagttgctataccagaatacaatgagagttgtagtggttcttcatccacttcagcagtcttgtcagtatttttttttttgagacagagtctcactctgtcaccggggctagagtgtagtggcaccatcttggctcactgcaacctccacctcccgggttcaagcgattctcctgcctcagcgtcctgagtagctgtagctggcattacaggcacctgtcactatgcccagctaactttttgtatttttactagagacggggtttcaccatgttggccaggctggtcttgaactcctgacctcgtgattcacctgcctcagcctcccaaactgctaggattatagacatgagccaccatgcccggcctcattttaaccactctaatatggtttggaagtagtatctcattgtggttttaatttgcatttgcctaatggttaatgatgatgaccttcttctcatgtgcttatttgccatccatgtatccttttcagtgaataagctttgcctgttttttaattcatttgtttgtttgtttttctgttgttgagtttagagtgttctttatgtattccgaatacaggtcctttgttggatgtatgattggcaaatagtttcttccagttggtaggttgtcttttttgtcctcttgacagtgtctactgcagatcacttgtttttaattttgataaagtcagctgatcacttttttcatctataggttgtgttttactgtcatgtctaagaactctttacctaacttcaggccacgaagattttcttcaagatttttgtagttttgccctttattgttagatatgtgatccatcttgagttaattctctgtaagatttgcagtcggtttttttgttttttgtttttttgcatatagatgttgaattatttcaacaccattcattgaaaatagtatttctctattgtgatggttaatattgagtgtcaacttgattgggttgaaggatgcaaagtattgtgtgtctgcaagggtgttaccaaaggaggttgacatttgagtcagtggactgagagaggcagacccacccccaatctgggtgggcaccctctaatcagctgccagcgtggctagaatgaagcaggcagaagagtgtggaaggacttgacttgctgagtcttccggccttcatctttctcttgtgctgcatgcttcctgacctcgaacatcagactccaagttcttcagcctttggactcttggacttaactggtttgccaggggctctgaggccttcagccacagactgaaggctgtactgtcggctttcctacttttgaggttttgggactcagactggcttccctgctcttagcttgcagatggcctgttgtggtacttcaccttgtgatcatgcgagtcaatactctttaataaactccccttcatatgtacatccatactgttagttctgtccctttagagaaccctgactaatacaattacttttgcacctctgtcaaaaatcaaatggggtgatatttggatgggtttcttgactctgttctttttcattcatctgtgtctattcccttgtcagtactacatagtgttaaaattggattcctctacctttctttttctccccccatttttccaaaactgcttcagctattctggttcatttgccttttcgtatacattttagaatcagcttatgtttatgtacacacacaaaaaaaatcctgctgagattttgattagaattttgttgaatctacatcagtttgggaagaattgacattttccactgtgttgagtcttccaatccatgaacatggcatgtctcttaatttatttaggttttctttgttggtggtggtattcttagacagggtcttgctctgttgcccaggctggagtgcagttgtgtgatcatagctcactgtaggcttgaccacctgggctcaaacctcccacctcagcctcctgagtagctgggattacaggcttgtgccaccatgcccagctaggtttttaatttttttgtagagacagggtctccctatattgtcaaggctggtcctgaactcctgtgctcaagcagttctcttgctttgggattacaggtgtgagccaccatgcctagcctgtttaggtctgctttgatttctttcattagcatttcatagttttcaatatgcagatcctgcacatgctttgttttgtttgttttttgtagacagggtcttactgtgttgcccaggctggcctcaaactcctgggctcaagtgatcctcccaccacagcctcccaaatagctcccaactgtaggtacatgccaccatgcccagcttgtactgttttgttagatttttaacctaagtgtaatttttttttggagactcttaaaattgtattgtttggccaggcgtggtggctcgcatctgtaatcctagcactttgggaggctgaggtgggaggatcattgagccaggagtttgagaccagcctgggcaacatagccagaccctgtctctacaaacaaacaaaaatatagtagggtgtaggggcacatacctgtagtcctagctgctctggaggctgagagggagaattgcttgagcccaggagtttaaggctgcaatgagttatgatcacaacacttacattccagcctgggtgacagagtgagactctgtctctttaaaaaaattattgtttaggccggtgacagagtgagactccgttattgtttaaaaaattttggtttccagttgtacattgctagtagtagaagtatgattaatgtttgaatgttgaccttgcattctgtgatcttgctaaactcattagttctaggagtattttcgtaggttccttggggttgtctatgtagataatcatgttgtctgtgaacagagacagttcgatttttttttctttataatttgtatgtcttttattttatttttttctgttgctctagttaggaattccagtatgaagaggaagaggagtagcagtggtgcacattcttgccttattcccaatcttagtggaaaagtgttcagtcattcagaattaagtatggtattagctgtgggttttttgtggttgctttttatcaggttgaggaagatcctgtctactcctaatctgccaatgaatgttgaatgttgtcttacacttttcctaaatcaattgatatgatcatgtggggtttttttccttttgattgtaatatgctattttacgctgagcgattgatttttttagtatgaagctacttttgcattttggttgtggtgtattgttttttatatattgctggattggacttcttaattttttgttaaggattttttacatcattattatgagggacattggtctgcagttttctttttgtgtactgtctttggtattagcataatgttgtccttataaaattaattgggaaatgtttcttctctgaatgagagtgtataaaattgtttttttttttttttttttgagatggagtttcactcttgttgcccaggctggagtgcaatggtgtgatctcggctcactgcaacctccacctcccgggttcaagtgattctcctgcctcagcatctcaagtagctggggttacaggcgtgcaccaccacgcctggctaatttttgtatttttagtagaggtggggtttctccatgttggtcaggctggtctcaaactcccaacctcaggtgatccacctgtcttggcctcccaaagtgctgggattacaggtgtgagccacgcgcccggcctataaaattgttcagaattctccagtgaaaccatctgggcctggagatttcttcttcagaaggttttaaatgacgtattcaagttctttaatagttattggagtattcaggttatctatcttattttgagtgtgttttgttagctttgtgttttgccatttttgaggaattggttcatttcatctaaattgtccaatttatgcacatagaattattcttagaaaccttttattatccttttaatatctgcatagtttgtagtgataacctctttcctttcttattttggatgtcgtttttttcttcttttcttagtctttttagagatttatcagttttattgatgctttagaataactagcttaggttgcattgatgtcttttttctctattttctcttttaaaaattattgatatctcctctgttgtgttcttccttctactttaggtttattttgcttttctttttctggtttgtaaggtaggagcttagattattgatttgagatatatcttcttatttaatactataattttctctctaagcactctaagtgcatctaatatttttttttatatattgtgttttcatttttgttaagaatgttttctgagacttccttttttgcacataggttatttaaaattgtttaatttccaagcatttggagatttttctactgtctttctgttatttatttctaatactaattctctttgttcagagatcatattttgtattattatagtttttttcagtgtgttaagttcattttctgatccaggtatgacctgttttgttgcatgtttcatgtgcacttgtaaagattgtgtcttctgttgttagacttcagtactgtataaatgtcagtgagatacaactggtttgtggtattgtccagttcctctatatccatgccaattttctactacttgtctttcttttgagagtcttgatgtttccaacgatgactgggttattgtctgtttctcctctcagttctgccagtttttgctttatgaagcactgttgttaggaacatacacattaaggattattgtatctttttggtgaattgaccctgttactattaggtaatgttcttctctatcccttgtaaatttctttgctctgaagcctactttttctgatactaacctaggcattccagcctttatttgcttgatgtttgcatcgtattttttcccatcattttacctttaaactacatatgtcattatatttgatgtgactctcttgtacacagcatatacttgggtcatattttgacaatctcttttaatttgtatgtttaagtcttttttttttttttatttttttcgagacagggtctcactctgtcatccaggctggagtgcagtggcgcgattatggcccactgcagcctcagcctcctgggcccaagtgatcctttcacctcagcctcctgagtaactgggaacacctctagctaattttctttcgtggagtcgtggtctccctatgttgtccaggctggtcttgaactcctggactcaagcattcctctcatttcagcctcccaaagtgttgggattaaggcatgaaccaccacacctggccacttttatgtttaatgtagttattgaaatgtttggcttttgggctactgttttattattttgtttttctatctagtttttttcactgtttcactctttgtgtcttcttttgcattatttgaactttttaaaagtattcctttgaaatttattgtgtttatgactatctcgtgtagtttttcttcaaattaatactttattgattataatatacatacttaacttcctatggtctattgaaaattcatattttaccaccttaattggaatatgtcagtcttaccatcatgcaggtatctacattctcttcttatgttatggttttcttacgtgttatatctgcatgcattgaaaaccccatcagacaatgttaaaatttttgctttcaacagttaaacgtatttcaaaagcaatgttatcatttctgttgctcttccttcattccttatgttccagatttccttctaatgttattttccttctgtctgaagaacttccttaagcagttttagagctgatctgctagcaactaatgctcttagttttcctttatttgaaaatgtcttggctgggtgcaatagctcacgcctgtaatcacagcactttgggaggccgaagcgggtggatcacgaggtcaggagttcaagaccagcctggccaagatggtgaaactctgtctctaccaaaactacaaaaaaattagccaggcgcagtggtaggcgtctgtaatcccagctacttgggaggctgaggcaggagaaaggcttgaaccaggacagtagaggttgcagtgagccaagatcacaccactgcactccagcctgggagacagagcaaaactccatctcaaaaaaaaaaaaaaaaaaaaaaagaaagaaagaaaatgtctttatttcgccttcattcttagaggatatttgcactgaatatagagtactgagttgacagttctttctttccagcacttgaaaaacattatgtcacttccttctggtctttgtggcttctgatgtgaaatccatagtagtttgagtatcattcctttatagttaatgtgttgtttttctttgtttactttcaggaattttgtctttaattttcagtggtttgattatgttttctgatttctttttgttaccctgtttgagattcactgaccttcttgaatatgtaggtttatgtcttttaccaaacttgggaagttttcagtccttattaaaaaaaatattttctcagcatggtgctgagaacattttttttcttcttttctctgatagacatgtatgttagacctttaagtattgttccatagtctcttgttaattttttctactctttttttctctcttgtttcagattgtataatttctgttgatcagtcttcagatttattgactctttcctttgtcatctgtagtctacccttgagcccatccagtatgttttttttaatttgattattgcatattttagtttaaaattttccattggtttctttttacaaattctgtttcttttctgatactttcaaagtttccatttgtttcaagagtgttcataattgcttgttggaaaactttaataataacttccttaaaatctttgtgagataatttcaacatttttgttactttggtcttggtatttgatttttccttccctgtaagagatttacttggttcttgggttaattttagatattttgagtatgatgttatgagacataatcctctgaatttagttcatttctttttaggatgttaatatttttgtttcagtagcaattaacttggttggcttcagagtgcacattccagtttttttttgtttttttttttcctgtgggcggtgggtctttgtactcctatacagatccaccccacatatgtgtcaacaactcatcagtctgggatctgtggttagttcagtgtttaaattctttggtatacttattagaattacatccatacatgcccaacctagggatgagctcagaagttcataaacaactttattgtgtcacttctccatgctagcttctcccattctggttctttaggccttcacttttcagtcttcttacttagaaatctgaggttttattaccttgctctgctgttcaaattttgtgtttgtgtccaggacgtgtaaagagcacagagagagcagaaaaaaccttggggttttacctgccctcttgagactgcagtttcactgattgaagaagaatgtttcttctctcattgttttggctcttgctggcatctatgtctgcctctggtaccacagccacaaaattacttgggggttggggcaaaaaagaatagagcaaaaggaaaaaaaatatgggaattgagatttccataatgttgtaagtatcaggagctccctttcctgccttttgagtgagatgaataggggttctcctggagttctctccatcagtgtccccatgcctactttgcatttcaggcttttccaaggtcggtcagggagatcatgggaggaaaagaaaatgataaaactcaccacttgtttatagtaatttgaattcttttcttccttgatctgcctgctactgtttgcttttccaagtctataaatacttgattcgtgcattcttttgaggtttcatagttgaattcagtgggatagttggggtggagcatgcttagtccatcttacctgcagttagaatggccaggggtgtttcttgaaagctacttagaaaacaaatgtgggaaggaattagcagaatgcatctttgcatcctgtatactatgttgtgtatcctatattatggtaaaagtttggttagataacagaggaaaataaaggaggttttcattgttgatagcactatgtcctaaccttcatctgaggttactgggagagaaaggaaagtgttacagctaattgcttgaatgactcaactgcagtaatatatagtaagctgctattaatgatgcagtatagcttgcctcctgtggatgttattttctttccataggagataaacattgagaatcacagacttcccaaaatccaaacactttaccgtgacattcaagatccattcaagttcctactgatttttcttctaccatcctttcccatcagtcccttttcatacactttattttcaagccatctcacagatttctatactggcacctttcacatttccaccatttcgaatgtactctttctctgttagttctctctcactttttttcatttattagaaatccagttttattgttcaatagccaattctctgtgaaaccatttgtacatgttattttttattacatttatttatttatgtatttatttatttatcagacagagtctcactctgtctcccaggctggagtgcagtggcgtgatctcggctcactgcaacctccacctcccaggttcaagtgattattatgcctcagcctcccgagtagctgggattacaggcatgcaccaccatgtccagctgatttttttgtatttttaatagagacagtgtttcaccatgttggccaggctggtttcaaactactgacctcaagtgatctgcccgccttggcctcccaaagtgctaagtttacaggcgtgaaccaccacacccagcctttattactcttaattgcagttggtgtataagtctttcataccagaccaaactcctggaggggtagaggactgtgatttatcatctttttataccttgctgtaataaagtatacctgtaataaatttttgagtggatcagggaaaagaaaggaagtgttcatgatttagttaatgttaaagggatatgatgggtggaacatcaaatagttgaattacataagagagtggaaaacaaaggcaagtactgtttaaatggaattaggaactaatgttttgggaaatatgtttcgatgactttgagtgttggcaataatacttggaaattcattttttctgatctttttattatatacagtttttcttccagtagggcagattttttttttctctagtcttttctcttctgagggccagctgccacctcctataaggtagagtttttctaccttgtgctgtccagatgtttctttttatttgaatttatttatttactcttttacacaaaagaggcatgccaacagctgcactaagtgttctttcctaagccagccagatgtttggacttggagaaaagttagattttgaaataaaagacaggtggattatagcccttcattcaaccattcagtttttccttgcctattgctgctgccaggtagggtgtctttaacccgtctttatagtacctcttgtcacaaatttagttccagaaattaaaggactaactcctcctgaaatctctatgagatgaaatgagccttctttttttttttttttttgagatggagtcttgctctgtctcccaggctggcgtgcagtggcatgatctcggctcatgcaacctccgcctcctgggttcaagtgattctcctacctcagcctcccgagtagttaggattacaagtgcgtgccacgacatccagctaatttttatatttttagtagagatggggttttgccatgttggccaggctggtctcaaactgctgacctcaggtgatccacccgcctcggcctcccaaagtgctgggattacaggcatgagccaccacacccagctgaaatgaaccttcttacagactagattctatgtggttgtcctagtatgaggctggtaagcttgctgacatcatgcttgggttttcatctgatgaggttcagctggtggcccagcatagcgtatcaggctccctgtgtatgacagtgccgctggagatgggtcattcttcgactagtaggtgatttgatctcccctgatacatttatgttttttcacattttgggctctgattctcccccttacatgggcttcaattccaaggaaggtaggagttgagatacaggtacccttctgtttttcaatcctgctactcttgctgtgtttatctgagtgtggttctcttatactctgtaaactaagtccctaaagaggaacttctgttcctggtagctggacctacttaaggagttgcaggtaaattcagtgaatggcatagtcactttgggtctttaactattgagttaaaatatctttggccaggtgcggtggctcatgcctgtaatcccagcattttgggatgctgaggtgggtggatcatttgagggtcaggagtttgagactagcctgaccaacatggtgaaaccccgtctctactaaaaatacaaaaaaaaattagctagctgtggtggtgcacgcctgtagtcccagctacttgggaggctgaggcatgagaattgtttgcacgtgggaggcagagattgcagtgagctgagattgcgccactgtactccagcctgggtgacagagcgagactctgcatccacaaaaaaaaaaaaataaaaaaaaaaaataaaaatctttattaattattagtcttggatgaataggaagaaataaaaattgtttcttgagctccttcaaagtacttattctgtcttcgggtatagaatgattttcttttttgggaaatggggagaaagaatatttatttttgaagagaaaataaaacacttctagacatttttgttttctttttgttgttgttgtttgtttggttttgagtcagggtcttgctctgtcacccaggctaaagtgtagtggcacgaccatagctcactgcaacttccaactcatgggctcatgcaatcattctgcctcagcctcccaagcagctgggattacaggtgccagccaccatgtctggctaattaagagaaatttttttttttttttgtagagatggggcctctgtgttgcccaagctggtctggaactcctgggctcaaatgatcctcccatcttggcctccgaaagtgttgggtttacaggcatgagccaccatgcccggccccagatatttctgatgtctttaaatttcataccactgcttggtgaaaaatgactgtgctaaggaaaacttcttgagctccgtaactgcttttcatgattaccttcaatgtctgggagctaactataccaggaagcttttgagtggttgattttgctgctatttgtaatactcatctgatagtttttggtaagaaactaaacagccatataccgtaaatcaagagctgtcctgtcttttgggatcccagcaaaaatattggataatgtgggaaatggaatctgagcccagaaagccagcttttagagtttctaggaatgccatgatgtctgcatagatactaggagaaagatactcaccattaagatacataaatagaggaatggctgtagtaatttaggactggtatgatcactttcatgtactcatttttatatcatattagatgctcactagattagttgatgcttttcatgacagtcttaaaaataagttttaactgattaattgtagaaaactatgttcttgtttataatctttgatttttaaattaaaaatacatacactatatatttcctatgttaagaaatgaaaaaatttaaaagtcctgacttataattaaggctgttgggatgagccagacttcatcttcctgtcccaaattcccagggatgagaaaaagttgaagagaaaagacctaaagataaacaacaaaccagaattttgatggaaaatggtaaagagtactcatgggatcctggaaatgctggtcctggaaacagtgaggaattttgcaagagagatggctgatgggatcatgccccaggaaaccccagtctgaaacacagataggagaggatggctgcaaagatgggagcagctccagaggagacagccttgagcacaagaagtgacatccagctaggtgattcttccacactcagtgtccatgagggagcagatgattcgtaaacaggtagagccatatcttggaattctttagtagttaaaaagactgaggtggatctctgtatatcaacagagaacatctctaagacattaaaaatggaaagagaacttgtgtaaggacacatatggtataatgataccattaatggtaaaagaatcccaacctaaaatatctttatagttacctatgtaaaagcatacagcataggttctcaacagtggcattgttcacattatgggttagaggactctgtcatgggcgactgtcctgcacactagagggtttttagcagcatccctggcgtcttaccctctagatactagtcgtgtcccctcaggccccagtagtgacagccaaaactatctacagacattgccaactgtgtcctgggggacaaaattgctccaagttgggatcccttggcatatattgaagtctaataatgcatattcacctgttaagtgattaccggagagagacattgtaatggggacaggtgtggtcagtggagttgttagctttattttgaataagaatgtttaggtataacggtagggcgcagtggctcacgcctgtaatcccagcactttggaaggccaaggcaggcagatcatgaggttaggagatggagaccatcctggctaagatggtgaaacccatctctactaaaaatacaaaaaaatagctgggcatggtgacatacacctgtagtccctgcgactcaggaggctgaggcaggagaatcgcttgaacccaggaggtggaggttgcggtgagccaagattgcaccattgcactccagcctgggcgacagagtgagactccgtctcaaaaaaaaaaaaaaagtttagctattacatatatttacatatattacatgtaattaaaaacaaaacaaaagatagttttgcttttttttttttgagacagagtctcactctatcgcccaggctggagtgcgctggtgcaatctcggcagctcgctgcaatctctgcctcctgggttcaagtgattcttgtgcctcagtctcccaagcagctgggaccatagatatgcgccaccacactcggctaattttttgtatttttagcagagatggggttttgccatgctggccaggctgatctcaaactcctggcctcaagcgatctgcctgcctccacctcccaaagtgctgggattacaggcgtgagccaccgcaccggccagctttgcttttttataagatatctgttgtattaaatttaaaaatggttaatggtggctgggcgcggtggctcatgcctgtaatcccagcactttgggaggccgaggcagacggatcacggggtcaggagtttgagaccagcctgaccaacatggtgaaaccccgtctccactaaaactacaaaaattagccaggtgttgtggcacatgcctgtaatcccagctactcaggaggctgaggcaggagaatcacttgaacccaagaggcggaggttgcagtgagccaagatcgtgccactgcactccagcctaggcaacagagtgagactctgtctcaaaaaaaaaaaaaaatggttaatagttagaagaaatacaggtagcttacaaacgtgcaaatgtgcccaaactcactaataaccaggaaaatgcgaattaaaaaaatgaatcatttttctccattacattaataaaattagaaagataaatcatgttcagtgatggtgtagtgttgggaaattaatctctaatagtagtgtaagttgacctaagattttaaatgtgtagtttgtggtatttgtatttaaattaaatatttttcttatagaaatatacatatgtatgcagattggcatgtttagggaagcttattgcagcgcacaatacctgcaaattggaaccatgtccaatactaggagaatggttaaataagttatggttcatctagattactagaaatactgggtagcagttaaaaattatgaggtagaattctaaaaaaaaaaaaaactgagtgataaaattagttgtagaataaaatgtagtgtgattcagtttataccaagaaaaatcttaaacatgaaataaaactctgcacctttatttctgcatatccatatgaaaatgcttaggtaagtttggaaggacacatgcaaaactgatcatggctggataacaggaaatgggactaggagcctttaaaacggggcagggaataatggttatctggtatctatactgcttaagctttttttctttttaaccaaaggagtaactcatacattacttgggtaattacaataaaattgaaaaatgtaagaacatctaaatgacttgctttatatgcatagtgtcatcatttagtggcctgtgttgagcagtgatagctgctgctggggctctggtagggctttaagatcccatgacttttggtggctctccatattttgtggaattggcattagctgttcatatggtttggaaacacttttttaaaaatattgatttcagtggagattatttcccaaccctattcctagaatttcactctgttattgcttcagaaagatgtattcagaaatatatgcctgtgtatttatgacttcatcactagactttgaatgcatgtgtgatagctttctctttagtaagtggaaattaatcttaaagattgcaagctagagctgagcccacactcttactggtattttcttgtttcctcccctaacctaacttgtcatagtttttcttaggtagtattatttatttctttttttactacgtagtgacattcttcaaatgtatactttcactctggcttgtccgtaattggctggaaattgtgatggatctatatagttttttttgtgtttttaataaaatctgtataacataaagtttactattttgctcattttatttcatttatttaattattattttatatttttacagatggggtcacactgtgttgcccaggttggactcgaactcctgggcttgagtgatcctcctgcctcagcctcctaagccgtggggactacaggaactgggccactgcacacggcagttttagtctttttattttttattttttgagacagggtctcactctgttagccaggatggagtgcagtggtggaatcacagctcactgccaccttagcctccacttgggaagcctcttgggtctgccactgcttgtcagaaactttttactctgaattatgtcatatctcaggtgtttttacctagttattttgcacattacccttctcaaaggcatttgttcaagtttttcctaagctaatgaaggaaaacaaacctgagtcatctcttggctgtcactctgcctctcctactctttacatccagccatatgtacagtcctcaccccacccaccccacccctactctactttttcctctgctttattccgcagtcctttcatttgtggtctggtacccaccagctacactgacatgactcttgctaaggttttgcttgaatacttgatgtctcctttctctctgtcattcctccccttctcccttgatgcttctactaaggggtcagtggtatgagaagatagttctcctcctgctggttttcattattttgttgtttactgtatcgtcaggaatgcatgcttgcaagacaaagactaaaacaaaaaacaaaaaacccaaacagcaaaaaaaccccaaaacacctttgttttggttccgagatcgattcagtattagttcccttttgtgaaatgaaaacaggattgtagaaaatgggctgggaattttgcaactggcaaaaacgtattctctttttttcctgtagtttaaaattttaccactttgaaaatcatgtaagttatcttagaagaaaaatagtagtccactaattctaccatccaaaataaccatgaataaatatgtcttggtgctacacatgtagtttttcaaaatggaatcaaagcgaatctttaaaaaaaatcattttgttttctatgatcaaattgcctttctgggaaaggacatgccagaatgttagttttttaaaacttataaaagtatctttagatactttgaatgaaatagaaagagttctattctttttttttttagaaataggattttatctggttgtttgattttttttttttttttcagttattcaaatgaagattgatgcagttggctttcctttaaccttttagtctttcagggtaattttctttctttttttttttgagactcccaacaagtttattattttttaaattgtggtaaaatgcttataaggaaacttgccatcttaactatttttaagtgtacagttcagtggcattaagtacattcacattgttgtgcagccatcactataatctatctccagaactctcttcatattccaaactgaaactctgtacccatttaacagtaactccccattccaggctcgccacagtctctggcaaccactattctactttcaggataattttcattggttagtaatgtttggataatttgattagatttggtggatactgaagactggccgggttatgtaagctgttgctactttcagccaaggagtgcatctagtccgtattacatcatccttggagtgttctacccagtgtcttgcattgaaggacatcagaaggaaaactcctgtattctcagtcgtggtaaatagtgtccacttcattacagatctccttgagtgataggtttcaaaatatctctaggcatgaagaaacatttccaaacctgcttgtcttctctacctttctcagtatgtactagtttagaaggtattcaaaatgtttcactgagaccattgagttttatgctaaatataacatctggcctagcactttttatcactcatatgcaatctatttgataaggacagggaccaaatagaatgtctttttcaatgtattttaggcatctaattgactaatatgaaattttctattaatccagagtttttaaatgcaggcataattcccccccaccccgcccgcaaagattcagtcttgctctgttgcccaggctggagtgcagtggcctgatcggctcactgcaacctctgcctcccaggttcagcaattctcctgcctcagcctcccgagtagctgggattacaggcatgcaccattacgcccaggtaatttttcttttgtattttttggtagagacagggtttcaccatgttggtcaggctggtcttgaacccctgaccttgtgatccacccgcctcggcctcccaaagtgctgggattgcaggcgtgagctactgcacctggctgcaggcatactttttaacctatttatatccaaacatttaaatttattttttatttttattatttttaatatttttatcattgtatatgtttatttatattattatttcaaattgtttattaggtatgaattttacaaactttacttatattagcggtaacggtggagcgggagagtattgcgccttctccaagctccccggcgagaaccaccaatagtgtggtggaacttacggccgtttccaagggccagggctcttttggcctgcagatgtcagcccacacatctccctgtgctgtggactgatttggtgatccattaggtgtcaggatttcttctgatagctttatggaatggatcagtgaggataacctcaaaaaatttgtatgtggaatcttcaccaacccagtaagaattcaggactctcaaagccccacagtggcgtccagcttgctcctctgcaacggactgaaggcttggagcaaactttagctggttaacaccatgatggacaggcttgccataagttgcacccttaggaactgggcgttttcggccaccacggcaaacacgaatcctatatataacgtaaccttgcttggcctcgcagcccagtcagcgcgctttatcaggctgggtggggcggagagccctgtggagagcagagagctggcggtactgccagcagcggaccctcagaagaaagcgcatgacatcagactgctgctttctccgtagctcctggatgtactcgtatgcacccatcttggcttacctgatggctgctgccagacggaagaaaagaagtttaatttattttttaaaagttaataaagaagatgatttttctcagtcctgtaagatgaaaaacacatctgttgttctagttatttggaaattaggctcatacgggtaatagttgatgctagtaatttttctctgaagaataaaataattcaaaatagaaaactaaatgcttggctgggcgcggtggctcacacctgtaatcccagcactttgggaggctgaggtaggcggatcacctgaggtcgggagttcgagaccagcctgacccacatggagaaaccctatctctactaaaaatacaaagttagccggggttggtggcgcatgcctgtaatcccagctacttgggaaggctgaggcaggagaatcgcttgaacctgggaggtggaggttgcgatgagccgagatcgcgccattgcactccagcctgggcaagagcaaaaactctgtctcaaaaaaaaaaccaaacaaacagaaaacaaaacaaaacaaaaaaaaccctaaatgcttgatgggaaagctaataatctgctttaaaaatctctattggttttctgagaacggagaagtttatgaagacaaactatacttagtgttagtatttaaaatgctttacttttctttttgaaacatatagccagtaaatcctgcttagttgattagtgtacctcagtttaaactttccatggttgttatgtatttcctttgccattaaaatatataaaaaggaatttatatttttcaagatgttgaaatttttgaaacaaatatatctactcagcctatgcaatattaagtcattctgcagaatagcatctgcattgcttgaatattgtttgtttgttttgtattattaagccaaaaaaaacacctcacacatttcatacaacaatgacaacaaaattgaaatagagtttcaaaagtttgttagattgttctttccaggttgactcttaagtgtctctttaactaaggcagtagagaattcaaatgttttcttttgcatggccttttgctactagtgaccctgggctagactgtgggcttgttgagatgtgaatgtaccctgccccctgaagtaagatttgttcctgcaaatggaggaaaagaagccaaccaatcctttataaacaatttgtgtttagtccttctttgtaaagtccatagcagttttgacctgcttttaatgcatgatttattcaattgtttattggagcactcttttttttttttttttaaactggaacaatcttaatcacccagtaaaatatattaggctctgagctagttcttgataggtttattttatttatttatttatttttttgagacagagtctcactctgttgcccaggctggagtgcagtggcgcaatctcggctcactgcaagctccgcctcccgggttcacgccattctcctgcctcagcctcccgagtagctgggactacaggcgtccgccaccacgcctggctaattttttgtgtttttagtagaaacggggtttcaccatgttagccaggatggtctcggtctcctgacctcgtgatccgcccacctcagcctcccaaagtgctgggattacaggcatgagccaccgcgcccggcctagttcttggtatgtttataaaacgtttgtgataacataggaaaaatgtctattatgctagttaaaaaacaaaagggtgaaaattatatatgcggtatcattacgaaagtgtatttagagaaaagactaaaaatgtcaatactattaggattctctctctcctttttacttttgaatgcatgttcattatagaaattttggacacataaacacatgtgcctatgtgtatcttttaatttcttttccttgataaaccaccaattgccatatgtattgccaagattaagaagactttatgtaggtgtagatttttaccttaaacataatgaaaaaaaaataataaaagttgcaactttttgtacctcaaagacaatggcttttaacatttgataatgaaagttattaagcaagctgctatccaagtgtatctatgagtaaatagctttaatcacataacattgggctaggggagattaaaaaaagaatttaaggcgtaaccttatgatctggtggaggagaaattgtaactgtgcaaagcagttaaaatgagattgttgggtagatgagattatatgctaaaatctgcactaactactctcagagtttagattagaggagattcatcctaaattgaagtacttgggaaagatccagtggtagatgtgaaacttggagtccatcttctataataggtggtatctgaggacaataaaacaagtgtggatttaagtttaaacaaagacttaaatgtattctttttaaaggattgtgaagtactcaatttctttcttacagaagaaaactacaatcacaattacaacaacaaaattgacagtaacaggatctgaagtggacagagggcaatagggcaatagaggagggggcatcctggtctgagggcagaagagcaacttgaggttgggggcataccaggcaacgataaccacgaggaaggccttgctttgaacacagggatatttagaagccctttgcaagcagggctgcttttccctacaattggtattattaaataattaccgaatgtatatatttggatattttatagtaagatattgacctgaaaatcccttgggcatttacctgatcttttacctttcaatactcaatataattttttactaaagtggaaaatatttattgaattgacaaagagaattcttagctttctaaaagactacttttttagttttttaagatctcatttaaaacaaagtatttaaaaattatttcataactgaagactctaacagaaatactcaggtatttgccacctttgacttttttttttggtagaaggtgggtcataaatgtttaggtatatgtttgtgttccagtttttatatctgccttgcaaaataattgtaatctggaagtttctgaaactggaaagccattaggaaattaggaaaagtcatttaaaaagatagtaatcctttcatcagttaaaaagaatagactccttttagaactaagcagtttactctttttcatattgaatgcttagcttctattatgcaaaataaatagatttaaacattatagagtgagtagtcttaaaaatggagcatacattcctgaattttgagtagctttagaacttaatacacatatcatttcttttaggaataaatgtaaaatggatgaagattgaatgtgagagtatttaaatgattctcaagattttctggttcatgtgttgtgatattgaactctttctttcgtcttaggctttaatttgtgcctggtgctgacctgatgctgtgcagggacactcactgcatccctccattcagtccctctaattatcccaacttcctggggagcttgcttagaactgggcatgagtgctctttattaaaatattgggctaccctggctacatgtaacaaggtagtttttgatatcaaatttatgtattgatgaacggaataggaagctaaaattgtttgctgtgattttacataaagagataggggatattatggaaattatttggttagacaatgaattaggctgtaataaatgaaatcatggttaatagagttcctgagtttatttgttgcattgttgctttttagtgcatactcaaaaagaaatacgactctataaatgataggcagaacaatcagatttgcaattttgtgtgtatttgcagatgatggtaattctttttgctgggcgcatctgttaatgcagaaatttgtctcctcaggttcatgtgaaaatggcggatgaggctgtctgtgttggcccagctcccaccagtaaaagctacctcaacatggatgccatcatggaagccattaagaaaaccagggcccaagctgtgagtctgaatgaatctatctactgcagctgtttcatatgtagtgagcagaaagctagagtttgtatttaaaaaaaaaaataggaaagaatgattgaaaatgctgttgcagttagttcatgtcacatgagttaaatgtggtcgaattcgctactggaaatcaaaggctttgtagcatctggcagtgttggttgctgatcctgcaggtggctgctggattcagctttcacaccagggagcagtttcagttcatttccaaatttgctaggaaaaaagaaatcccaattagttttgagtattaaccctttccgtgtaataagagcattttaaaaaattctgtgttataaacaggatccaaagactgtgttcaaattccattttaataatttaaaaattacttatacctagtacacttccagaaataaaaacagcacatttggtaattattttagtttgttaatgtcagtagaatgctcataatttacaaggataaatcattctctccacccccagttctgtttgaatagagtggaatccaaggaaaaaaatgatttctgatatcagaaacagtgttttttcttctattttcttttttctttttttaattatcagaactaattatatatagtgttaaaaactatgcaaagttatctctaaaactggatggaaacatccaacaccagcaattaagcctggagcgcttcaattagcgctcacatttcttttgaaagaaatgttttagtaagatgaatgtttaaataaaaagcctaattcgtgaacccatattatagatgtttacagtttattagcacagttagtgaaggtaaaacactttaaccttttaactatagcttgccaaaataaatatgtagttgagtgttgataaaatgaagttggtggaatgaaaactcttcttctctgatacagtagtttaaattcttctgtaccatgctcataaagcttagttcagctttttttttgttttgttttttgagatggagtttcgctcttgttgcccaggccagagtgcgatggcgtgatcttggctcactgcaacctctgtcccgccaggttcaagcgattctcttgcctcagcctcccaagtagctgggattacaggtgcctgccaccatgcccagctaattttgtatttttagtagagaaggggtttcaccatgttggtcaggctggtcttgaactcctgacctcaggtgatctgcctgcctcagccttctaaactgctgggattacaggcaggagccactgtgcccagcccgagttcagcatttaaaagtcgctgatacgtagctatttctggattatgatactggttcctttagaaatttgactctctttttagcagaattattttactagaagtatgttcaacactggctgatactgaagtggcgaaatttatgtttggccagtctgggagagccaaaaattacttgattggatcaggctggtagattgtagcaatgtggcttgtgggtgaggatagtataaagtagttgtggatggcaaagtttggggtgaggaaggaaagaagagtagacattagaagaaaaaaaattcagagcacaaaataaaagtaaaaccacacctccattttagttcagtttgatagaaacggcttgttggtagttgccgagtattattaatgccatcaggaataaaatgtgttagctgtcctagtagtctgggttttggaaattaccagttcgtgagtactgtaaagaaaggagaatttagagtttttcatccatctttgccaaggttccttttacataattctttgatgcaccagccattgtgaaattctccagaattgtgggcaaagttagcctcaggaaaaggagagagagttttgttgaatagtgtagacaaatgccagtgggcaggaagctatgtgggcatatactccccattgtggttaggacaaaggtagtgtgtggaaaatgaatcagttaggacaaagggagtgtggagaaagtaaatataagaggcagtttcttggaatttgattctgatcctagaaatgtgagttagaactgatcagtgtataagagaagtgtacttattcaagggctcttgaacagtaaatattaatacataaatgcactgtacattttgcttataaagcttttgcaatatgataaaattgaaagtgctttttgctttcatttctaaggtacatccaggttatggattcctttcagaaaacaaagaatttgccagatgtttggtaagttggtaatgaaccagaaactgttcatttctttttcagaaagcagtgtggtagcatggctttgtaaatgtgggtagtgatggattatagaattttaattaacccagcagttctttgaaaattgtgacaagtgaagtggttttagtctgaaactcaactgtttatttgaagagtaattataaaaacagaaaagtttacaaaatcaccattacactgaatgaatgatacctggtttattatatactgcatgatatttgaattaaagttaaaaacttcagatttttaactgtaaatatgttagggagtttagtgagttattgtagtgatttaattattttgtggcatttaatatcaaatcttaccaatgcctctattttgggtgaagttgtttttaatgatctaaatgtccccttccagctaggtgaattaacgtatgtttgttattaaattgatttttccaggtatatttataacttcattcaagatggtactgaaaccttattttttaggtactagaatatgattttgattaatgtttgtacatatgtttgttattagatcaattatgccaggtactatcttaatttattctaatatgttatacttgtttctgtggcatacagtcatgtgttgcttaacagcgtgaatacattctgagaaatgcatcattaggcgagttcatccttgtgtgaacatcacagagtctacttacagaaatctacatggtagagtctcccacacacttaggctaagtgtgttatagcctattgctcctaggctacaaacctatacgtgttgctgtactggatcctgtaggctgttgtaatacagtggtagatatttgtgtatctaaacatgtaaacagggaagatacagttaaaaatacagtattagaatctatggaaccactgtcatacgtgtggtgcctcattgaaatattctgtggagcataactgtactcgtattctgttcttccacggattggaaattatttgtgaatgttgttattttctagatggaatttccacttaaaatctataactttaacttgaaacaattattaagatcacagaattgtctatttgaaccaccttgctttgtgggtccaaaactaaggcctaaagagatatcctgagggggcaaattacatggacacatccagaggttccagtttcccaggttttatgcagcatatctacatttttttgtttatatccctttttattttttatcttccttggaattttgaccaagattctgttattataaaaactatttgaatataatacttaaatttagatgtgtatgtgtgtatatatataatgtaatgtattacatttaagtccgtatagatgagaggtcggcacactacagtccacaggacaaatgcagcctgctgcctgtttttgtcaataaaattttattgaaacacagccatgctctttcatttatgcattgtctatgctgcttttgtcctgtgacagcagagttgagtagttgtgacagagaccatttggcctatcaagcctaaaatactttttctatggtcctttatacaaaaagtttgggaactcctgctataaatgaatatccaaatccaaattatatgagtaggataagtgatgtggtgccagtattatacatttattcctatacagttaatacatttatttattttatatattatatataatattatatacagtttatgcattttttcagttattaaaaaaatgctgcctttttttttttttttttttttttttttgagacatagccttgctctgtcacccaggctggaatgtagtggcatgatctcggctcactgcaacctctgtctcctgggttcaagctattctgcctcagcctcctgagtagctgggattacaggcacacaccaccacgcctggctaatttttgtatttttagtagagacggggtttcaccattttagtcaggctggtcttgaactcctgatgtcgtgatccgcccacctcagcttcccaaagtgctgggattacaggcgtgagccactgtgtctggccaaaaaatgcttctttaaagtctgtttaaggcctttgagaaggatatattaataaaaatgaatccaatctggttcccgcgcagaatgctgcagtccatgggtgctatgagtcctgggtgctcatagtcatgttacggaaaataagttgatacacaaataacttcacttcagggaagaaaatactgtgagataagatcaatatctttgtaaatgaaagtaagaaggatgatttccatctggggttctacattagagaaaaacctgtagaatatacaacctcctcctttctttcacacgagttttctttccaaacctatttccccatttcccttttatcagtgctgtgcctccacccagcctgactgtgcgctgctcccatgcgtggctggctctgccctcagtgctttcctcactctctctgggtgggtgtgcctggcctcccacccaccgtgtctaactgctgcctgcccttgaaggcacagttcatatgcagcctctgcggggaaagggttctagatccttctgttgagaagtaatttctttccttggactttttgtttcagtttgattggaatgtttttgtttttggaaaaatgatttgtgctttatctgatacattgtttttacttaatatccaggactaaaatgattttttgattttttttgcataactgctgtgtatttgctttagaaagtgtacaataggccaaattcccccaatgtaaaaacacaccaaactttacaagactgataattttttatgctgagtttacgcgaagtgggattggattttatacagtccctgctgtccatgacttgaaaaagatcatgtgggccgggcgcggtggctcatgcctgtaatccctgcactttgggaggctgaggtgggcagatcacttgaggtcaggaattcgagaccagcttggacaacatggcgaaaccccatctctactaaaaacataaaaattggccaggtatggtggcacgagcctttgatcccagctacgtgggtggctgaggcaggagaatcgtttgagcccgggaggtggaggttgcagtgagctgagatcacgctactgcactccagcctaggcaacagagcgagactctgtctaaaaaagaaaaaaaaaaaaagatcatgtctttttgttattgcttagatagttcatagaaaaaacaaagctacacataatcctcataaaaatagcaattttcaataattttaatgtgctgagctaacagattttatttccaagctgttttctattctgtattttccctgcaggcttcttttattatgagcattaaaggaccatccatgggagactatgaggattgttaggatgaggcaaagacatcttaacagagtttacaaagagctttgaaacgtgaaactaccttctctggaaaaatgggatgttggcttgaagatatttcttagtattctgtgttttctttctggtttttctatgttgttttaatcatattatcataccttgtcatttcaggtaacatagcataagttatagtaattagtttcaagagaaacatatgttagaatttgtgttttgtgtttggatcctatctgtgtacttgaaagatacacgtatatgtagatggatagtgagttccatcaggatgctcagcgttgaaagcataggagggaactgtgctgagcgtgtgaggtttggcgattgtgctcttttatcttctttctttcttgagtttttagcaagataagacatgtaactactgtaaaatgagaggtaatttttaaaatagccactgggttaaccaaaaaccttttaaatagctgtggcatccagtgtgggcaagggtcacatagttttgttcctggaagtgtaaattgtttcagacctcccccggcccccagaaatttgctagtatttatcaaaatttaaaacatctatatgttctttaatttaacagttccacccttaagaatctcacttacaaagatatacttgagaaaatgttcatggtaaggtgtttcataatagcaaaatttagaaagtgttcaaaagtaaaatgtggagaatggtggcttccctgcagggtcattggtcctcagttacaaggctgcagtccatgatgtgttatagtttaaagtgtgttgtaagcactttgtaactaatactaaaattctgaagttagcaagtttgccagtgactttgtttaacaatttttttgtttataaaataaagtggattaaaaatgatccatatgatactctactcattcatatttggactttttttttatttgagtaggaaaaaataggagagacttagaccttgcaagcccagggttgtttataactcttattttcactatatgggctataatctgcatagctcatggaaatacattatttttatatatcgcagcttaagaagggttgagaattgttactgtagtgtattttgtgtagacatcattttaatgacataaattttcttattaacattattatattttccattttggacacagacctttgattttagtatcttaaaatttttaatttttgagaatgtaaaatgctaagaaatttaagcacatgaaaacattgaaaattaggatttctttccatctttgaaccttcgaaacaagaccccaatttaagtctttagaggtcaccactgttaccttctggagcatgtgtgtctgtatgtgtgtgtgtgtgtgtgtgtgtgtgtgtgtctgtctgtctgcgtgtgctagaattttgctatcatttgttttgtaagatactcttagttgcttaagtaggacttactttttttatatgaaaagaagtggcatagaacttttcttatataagaaaacagtggtccctaggcttttaaaaataagtatggaatacctacctgcaggtaagttatttaatctttatgacaacttatgatgtattcttatttttattcttggttttatggaagagagaacaatctctgaaagtttaaataaatgccttgtccagtgtcacatagctggtaaatgagagagtatggatccgttgtttagtatatgttccagactgactctcagatgcattggaactgggctgggccgttagtggtatttgtttttgatcgatagctttagctggcatctgttcttgctgttggtggaggcttctctctttctgcttccttcccctcttccccattggtgtatcatcatagagatctaaaaagtagagttgtttcttttgtttttctcatcttgtaacttggatgccagtgaaggcaaatcctcacttggatttgctaacttactaagtaaggtaactgagtgagctttgctcagttaactgagtgccagagctacagcatagagatattgatgcctttaaccactcgttgatattcttaagtggaactaataaagtctccctggatttggaggagaaagttctgtgactcctttttccttttcataataattttataatatttttctagttgtgacttgtacatatgtgatgttcaaaagaattgataagaactaatgaatgcaacttcataaaacccttattatgacagaatatcttttgaaatgtttgagaacgtttcctttcctatatgttggcttaaggtcagcttttagaatatttgaagattttgaatgcgatgtggaatactaaatgctctaaagtgaatgcctgaaaaaggaaaactctccctttacagttagggagtcttttaaggatgtagataggtcagatacttttagggcttgtgggattttggggagtggtttcaataggaaaagtctgggatttgatgaggctgggatttttttccctttgcttgaggttaaaacagattgaagtgttacgttctagttttcctattacgctctctccttactgccctatgtatctattagctcattctggagtcagaatgacagctaaattctttctctgccacttagtagctgtgtgatcttggacaggttgtttaatgtcggcctctgaagattgtgttttattcttactatttgcatgatatgtatttctccatctgtgattttatgttgaaaatactgtgtgtttcttgtagccaggatgtagttgtgtcatgcttttgaaataattctgatggtctctatttttaaattgtagtgtttagactatgaagttttttcttctttagtttgccttagtgtattttcttaaatagcagctttattgagatttaattcatgtgtcatcaggctcaccctttaaaagtatacaattgagtgatttgtagtatagtcacagagttatgtaaccatcactgctatgcaatgtcagtaaaatccattaacatttaataaatgatcaaggtggttggatttatgtctagcattttattatttgttttctctcagtctcccctttttttccttctgttttccttttctgacttggattattttagtaatttttgaaattccattaaaatttatctattggatctatctatttttcagtgttttttctaggattgcaatatccatcctaacatttcatattctagttagagctaatatgataccatttcaagtaaaatgtagaaattttgcgatcatatagtccatcctccttctcttcccatcactatcctctatgttatagttgtcatatgtatttcatctgcatgtattataaattctatgtgaaaatgttataattttgttataaacatgttgaggtgagttaggacatttctttaaattgatctgtcaaatttaaaatatagagacaaatctctagattaaatattttatttgagaatcacagaattggaatttgagacatacacatggggtcttcagtatatccaaggaacaaagagaaggttgaaggttttattagatagaaaaaaaatgttactgattattttgaaagaaagttcattggtacttgaaaagctttgggagctggcaggctcggataggagagtggcagtggtagtttaaaaactagtcttagagtgatagcaggttgtttcagcagttactaggtaaagctggtcttagggttacagcaggctgtttcagcaactgggcctctggatagttcagttcttggagcctgtgctatgtgccctgagtgcttttttcccctgactccttgactcttatgtagttgggtatacaagaatgacccaattcatgtaatcaactttcacagatccaaatatcattcagttgaaattaagactcattttattttggtccatttaaaaaatgttgtcttttaaaattacatatgtatttttattgtggtaaagcagacataacataaaatttaccctttcaccaattttaagagtgtggctcagtggctttaattttattcacaatgttttgcaatcatcagctccagaactttataatcaccccaaactgaaactgtacatattaaacactaattccccatttcccacctactcctagcccctggtaaccttccttttactttctgtctctgtgagtttacctattctaggtacctcacataagtggaatcatataagatttgttcttttatgtctggcttatttcactcagcataatattttcaaggttcatccaagttccttcctctttaagactgaataatagtctactctgtggatataccatattttgtttcttcatcacctgttgatggacatttgggctgtttgtaccttttggctgttgtgaataatgctgctatgaacactggtgtataagtatctgtttgggtccctgcttttgcttctttttagtatatagctaggagaggaattgctgggtcctatggtaattctatgtttaactttttgaggttctgccctactgttttccatagtggctgtaccatttctcattcccattgttttattgtttttaataaccaccaaatcatgcctttccttaatgcaagctctgggtaattagttgactcattggatatttgtaatgtccgctttacataagtttaagaggtttaatttgacagtatcttcctaaccaatatgtttatgcttgttagtctagtgttactgccagagacctattgcacagacttgtgggagtattaatattttttcccctcacattttctttaatgaaaaatttaagaaatacagaaaagtttgaagaattgtactactacaaatgccagtagattctataattaacattttcttatttgtttttaacatatttattcatttgtgttttcctctactcatctatcaatctcattttcattttgcacgtcaacttaagttgtagataatagtacaattcactctcctgtacacttcagcatgcagtttttaaagcagagttcaggccaggtgtggtatcttacacctataatcccatcactttgggaggccgagataggaggatcacttgaggccagaagtttgagggtgtagcgagctatgaatccagcctgggtgacagagcaagaccctgtctcaaaaaaataaataagtaaataagtacaataaaaaaataaaccagagttcattattcatttacagcttttccaagaaagccttattgaaatataattgctattcaataaagtgcacatatataagaaattaattgtacacttatatgtgtacacttatgaaatcataatcacaatcagaataaagaatgtatccttcaactccaaagacttcctggtgctccttcgctggctctttcggccacttcctagccttcctcttcccctttaggcaactactgatctgttttcttatcatagattattttgcatttactagaattttatataggtggaataacacaagttatgctgttttttggatttttttttcacccagcaaaattattttgaaattgatgcatgtaattgtgtcagtacttcattccctgttttgttttgttttgttttggagacagagtttcccctcttttgcccaggctagagtgcagtggcacaacttccgcctcctgggctcaagtaattcttgtgcctcagcttcccaagtagctgggattacaggtgtgcaccaccatgcccagctaatttttgtatttttagtagagacgggattttgtcatgttggccaggctggtttcgaactcctggcctcaagtgagctgcctgcctcagcctcccaaagtgctgggattacaggtgtgagccaccgtgcctagcctgcattcctttttattgctgcattcatttctttttattccattgtatgggtttaccaccatatttttagtagccattcatctgttggtggacatgtgagttgtttccagcttttaactacaactagaggtgctatgaacaagtagttatgtgggcatatgctttcatttttttttggtaaatgcctaggagtggaatggctagatcatttgtatgttttatcttcttagaatctgcaaactcgttggtacaattttacatttccgccaacaatgtatgagtgtactagttgctccacattcttaccaccctttaaatttaactgttatactatgtagtgatgtcttattgtggttttgatttgcatttgtctgatgattaataatgttgagctcatttgctttatatctttgtcgatgtgtttgtgaagtcttttgtccatttttaaattgagttgcttgtcttatttagacatattagggttctttattctaggaaaaatcttttgtctggtacatgtcattgcaaatattttctcccatgatgtggttctgttttcatttactcagcagtatcttttgaagagcaacagcttttagtcttgttgaagtccaggttattaatttttttttcttttatagtttgaaccttttgagtcttaaaaatatgggccaggtgcagtggctcacacctgtaattctagcactttgggagactgaggtaggtggatctcttgagtccaagagttccagactagcctgggcaacatggtgaaaccccatctctacaaaaagtaacaaaaattagatgggcttggtggcatgcagctgtagtcctagctgcttgggaggctgaggtgggaggatcacttgagccttggagtttgaggctgcagtgagctgtggagtgttactgcagtccagcctgggtgacaaaagaagaatgtgtctcaaaataatgaattatttaaaaaaatagatatatgtaatttcttgccaaactcaaggtcactgagactttcttgttttttgttttgtatttttaatgttttatagttttagatctctgatcaattttgagttaatttttatatgtggtgtgaagtagggtctaaattaatcttttttgcatgtggctattcagtttgctatacaatctcttgaagaggttatcccttcctctttgaattgccttggcacccttgcagaaaaagtaatgggacatacatgtgcgatctcggctctctgcaagctctgcctcccgggttcatgccattctcctgcctcagcctcctgagtagctgggattataggcgcccaccaccacaactggctagataatgaactcttaaaaatactttgtccacaccccctttcatttactcccatgtattactaatcctgctgaggccgtcttggtgtgacctccttcctcaccactgaccccctcttttctctctcagaacttccttactttaacaatccagttgaacacatatgccaccttattcagcagttgaatctcaacctgagagattctagtgttcattcttcagttccacacataaccatcgtgagtaagagaggctcattcccatagaaggatgaggtttaagattgctccagtcattaacagtatacaagatgtcagatagcgttttactgggtctaagataaattaggctgtaaccaagaatatttatatatcaaaccagcctctccacacatcccaattataaattctggacaaaatagaaaaagctacataatacctatgggtaccagagagcagccacaattagacagaaataggaaggcgactacccttggaaggaggaaatggcatgggggcagtttccttttttggccttttttgaacagttcctggaatgaattctggagtgttccatgtatgcatgggtcagattccaagcactccagctgaggctaaaagaaccaaagagaattattagctgttacttatgctagtattgggggaaaatattcaagttctacctaggtgactcttgaaccccttttgaaatgtgacaacgtagcagatgctgttgatgctgctgtccaccctttctgcccggttgttagcgtcaccttaggtgaccatcccttccctgtgagtctcagtggtaaattctgactagtgaaatcctgaccaggattcattctcttccttaccaatgaccagtttatgggaggctcatggtccagtttgattcctggcaagtgaggggacctttcaagaaaaggtttcttttcattgtgtgaaataagcctttttaaaattattttaagccattgtaaactgagggtttttattgttgttgggatttttgttttgttattttaattttggccaaaactaccgggttgaaagaccagtgttttacagactgacattctattgaatcttaaaatagaatatagcttctgattcttgtgttaagctttctgaagtaatttagaaacaaaaccctctatggattacatggcaaaaaaggcatgtttcaaccataaagtaaattgttttaaaaatttcccttaatttggccaggcgcagtggctcacgcttgtaatcccagcactttcggaggccgaggtgggcggatcacctgaggtcagcagtttgagaccaacctggccaacatggtgaaaccccgtctctactaataatacaaaaattagccaggttggtggcgggtgcctgtaatcccagctactcaggaagctgaggtaggagaatcgctggaacccaggaggcagaggttgcagtgagctgagatcgtgccactacactccagcctgggcgacagagcgagactgtctcaaaaaaaaaaaaaaaaatcccttgatttatgtaaggattagtcacttttgtatgcaagtagaaggctgaactcatgctttttattttttattttattattattttttgagacggagtcttgctctgttgcccaggctagggtgcagtggcacgatcttggctcactgcaatctccgtctcccaggttcaagtgattctcctgcctcaggctcctgagtagctggaactacaggtgagcgccaccatgcctggctaatttctgtatttttttttttttttgagatggagtttcgctcttgttgcccagctggagtgcaatggtgcgatctcagttcgctacagactccgcctcccaggttcaagcaattctcctgcctcagcctcctgagtagctgggattacagatgcctaccaccttgcctggctaatttttgtatttttagtagagacggagtttcaccttgttgaccaggctggtctcaaactgctgacctcaggtgatcctcccacctcagcctccggaagtgctgggattataggcatgagccaccacacccagcctgaactcatgctttttgattcttctgtatcactcaggctttctggaggtgcttattaactctttgctagattagataagttgctgaattcaaatttagaattctggaaataaatgtagaagggatgctttgagaagcatccttgtgctttcattgtgttatgctattttaaacttacggtaacttcgtgatgtcttaaaatttattttcattgatttatttgtatgtgactcctaagcttagaattcagttggaaagatttttgtttttgttctagtgaaggaagtacattgctcgaggatttttttgggttaactgaagtaatgctagttatctctgttacatgtagttaatgattcttgttgcccccagatttgttctaaacttaaacttttaaatgcatgctttctaaaacaggcaaagaagcagaaataatgaaatgatcactggggctttgtttctgtactggtccttatttaaggatattacaatgttcctaagttaccattttgactcataatatgtgatatgctaatgttccaagcacagagtattcttttctgtatgtttccacttcccaacctacctatggtgtagcgcctgtctgtaccactacgtgtgtgcatgtgtacatgttcctagctttttattcagtcctttatgtgctagttgattgttgagtgcagataaaaataatgtgttgtatttcttaaccacaatatttgatttataaggaaatattttgataacagcatttatagtaatatatgctcttactgattagaatgccacaattgatagaaaatatattggatgtaaattagttacatatttacataatctatacacaagtaacagcatattttgtcagcatagcgtacagtagccataaaataagagtgggtgatacaatagagcattggttcccagtatgttctgtggtacctggggactcttgagaccctttcagacactctgaagtaaacaattttccataatagtttttcctgctctcattctctgaggattgtgcagtagagttttccatgtaacagtagagttatatgatatatgttatcacagcagattgaatgcaggaaccagatttgagaatccagctgtcttaagccacatgttaaagagatttgtgaaaatgtaaaacatttctactctaatgaatttgtcataaaaatgttacttctaattgttaacattaaatgggctattcttttgaaatacatttttaaaaatttcttaattttaacatggtaaatattgatatatacaacatgtataagccaaagctccttgagattgtcaatatttaaaactgtaaagcccagaaaatttgataggcactgtcctgaaaggtgactgggtagcctcttgagatagggtgatgacagtcttctctgagagtgtggcctttaagctgagattctagacagaatgagcatgcctcctctgactactatgccccactccacttccacattcttttttagccttagtataattacttccatgtcaagtcaaggacttttactcattcatttctgaattcctgttgcttaccactttacttactagtcattaataattctttacggccagacgcagtggcctacgcctgtaatcctagcagttcgggaggctgaagccagaggatcacttgagtccaggagttcaagaccagcctgggcacataggaaaaccccatctctacaaataatttaaaaattagctgggtgtggctgggcgcggtggctcacgcctgtaatctcagcactttgggaagccaaggtggacagatcacgaggtcaggagatggagaccatcctggctaacacggtgaaaccctgtctctactacaagtacaaaaaattagccgggcgtggtggcaggcacctgtagtcccagctactcgggaggctgaggcaggagaatggcgtgaacacaggaggcagagcttgcagtgagcggagttctcgccactgcattccagcttgggtgacagagtgagactctgtctcaaaaaaaaaaaaaaaaaatattagctgggtgtgttggcatgcgcctctggtcccagctgcttgggaagctgaggtgggaggattgcttgagcccaggagatggaggctgcagtgagctgagattgcaccactacactccagcctgggtgacagagcaaaaccctgtctcaaaaaaaaaaaaaaaatttacctttcagtggaattatttatatacatttctacacatgagacaaacttttgaaggaagtttaatgtctttggtattcacatcaaactaatttgacatatatttttatttagttttttttaaaaacaaatattttttaggatctgttatttcctattaaattccttttacatgaaagatcataaattgatttttaaaaatgacttctaatgttaatagggctttgtcttttagacatatttgttaatgataaatttgtttctgtaatttttatgctttgtagctttaatttgggcccatacgtaaagactatgtagttttattatcattcctgccgtcatcatccttgatcataccatttaaaagcaatagaagttttaaatggagtagtagagaaagacaatcaggaattaatgagtttagataaaataagagtacaagcaaacaaagttgattgtggccatgttatgaatgcgtgagatttcaacttttaacaaattaataactttttttgaacacttagtgtgtgccaggcactattcccacccctctgcatgtactaactcatttgctcttcctagcagccctatagacaggtactattatttctgcttttcaggcgaagaagcagaagttgctcaggatcacacagctgttagtgccagggcaaggatttgaaccccgtcattaccatgctcataactaccggactatgctacctctgaagaagagattatacagcttgttgtggcacaacacaaaaccttaaaatgttttcagctcttttttttttacccatccttattttttccccatatgactattatttattcagccttttggtatctagcttgcagaatatttcagggtcccaaagggactatataaagagctgtctgtaaaagttctgctttcctcccaaaagctagcagtgggaaaaacaggcaggagagataaggtgcaaagcacagggaggaagaaagagaatagtggaagcagcagtggtgatctgtagtggtgtctacagtgtgctggttctggttgagttggtacgggcagccatgtcagcaaccaagtcttcacttgttggaggactcgctttttacatgctctggctgggatggttttagttactaggatgtaggggacaggaataacggcatttggtagagattcaaaacagcaaccagggatgacgagctgcagacattgatcgatatcaagtaaataataagagatagaagataaaacagctctcaggtgccagaaagcaacttggtaatggagaaatacatatcctagagaaaggtagacaagtgtatttatcctctcaggaaattacctggataagtgtacatttctgcaaagcaaaatagagtcaagctcctgaactcctgctgcataggctggtaggtgttaatgggtgtctgaatggagaaggatgaggacttcaggtttctagtaaacttaaatgtgatatggtttggctgtgtccccacccaaatctcatcttgaattgtagctcctctaatccccacgtgttgtgggaggaacctggtggaaggtaattgaatcatggggggcaggtttctcctgtgttgttcttgtgatagtgaatcagtttcatgaaatctgatggttttataaatggcagttcccctgcacaagctctcttgcctgctgccatgtaagacatgcctttactccgccttcacttgccaccatgattgtggggcctccccagccatgtggagctgtaagtcaattaaacctttttctttataaattacccagttgtgggtatttcttcatagcagtatgaaaatggactaatacataatgattcccttgtttggaggattgtcagatactatatgaaaagcggtttcacatgtgcttaaaaaaacctgtatatgtgccttatggtgtcattatttctaatttatagatgtagaaataataatatttagagaaataaaatgctttttctaatcacatgccagtaggagatcagcaagctgggactagaactcaggttattttgattgaaattcttttttacgaagccctgagggttctaaaaagctcgagtttcactgtgaaccattgtatggaaaacttaaatgtagccagaaaccacatagagaaaataaccaggttttaaatgttttatagtataatatttgttgtggtactcttttatgggctttaagaatctagtatgctggagggctggggtggctcacgcctgtaatcccagcactttggggaggccaaatcaggcagatcacttgaggtcaggagttcaagatcagcctggccaacatggcgaaaccccgtccctactaaaaacacaaaaattagccaggcatggtggcgcatgcctgtagtcttagctactcaggaggctgaggcaggagaattgcttggacctggaaggtggaggttgcagtgagccaagattgcaccattgcactccagcctgggcaacaaagcaagaccccatctcaaaaaaaaaaaaaagaaaaaaaaagaaagagaatttagcatgcatttaggtaaccacagagataaaatcatattcaaatgtgcttgtattatgagtattactcttctttatgagtattctttggaaaaactattgtcacacaataacatattaattatatctttattcatttaccatatttgaaattctcattaaagttttaaaatgtattttaattataaaaataatttacttaaaaagttaataaatactagatgtctgttcacacttcatttttccactgtaagttgcagattagattatgatgaacagactataatcttctaatattctgtgccctagtaaatgagtccttgcttatgtaagtcagatattttgttattttgatatctaagtaattggttattatgatttatttttttcttgacaagcttctgagctttgttcagtcttgtcaagtccctggtgagttttagatctctgagtctagagtttgttgatcgaattaatgaataaaccaatagattagtacattgttgatttttttttcccccaaaccttagatcctatttgctctcttaggaaactgtttgaaagtattgcaacttttagagaagttttgcaaatcttagccacatgtctactaatgttttgcacactatttttagttgatgaaatgtaagcaatttatatttgtcttaactttccatctataaggtagtgagagtggtgacaggctgctctgttttgcagctagcatctttaattgatgttgaattgtggctttccgtgcacacagggttaagtgaaaaggttgcagtcatctagtgagcattttcctttaatgtgctcattagtggtggcaagtccaggtttcagcacatgtcagtaatttacatttcattgtggagaggctgcccttgttcaagagttgtttctaagcctgatgaatatatattgggaataaacagagtagaagaattgaaagccaaataccctgccaggcctttcagttggttctgaagcttccagtggatctctgattagcaatgcataaagcaggatgaaaatgcaaagatgaggcctacaaaagttgtcgcaggtagcttctccccttaaatcctctttttgtgactgcttttccatttcatcttctccaaattcttttttcatggcagacttcgttaaagtgaaaatactctgtgttagacgtaagatgtgaatactacaggatctacctggttcctgtaccccttctaactatgaagccaagtctgatcgttatgcaatgagttttcagaagcaaagggcttgataggcctcggttcttagggatcagatgattgtgattggaatctttgtgatgattccttctgggactcattttttccatctttgcctgattggtaggtaccagcttgttctggcttttgaaagcttgcatagatcagtaaagaataactgtggaggctgtggtcagtgttgttggggatagagacaggactctgaaattgtggtgtttgggaaaatccagaaattttctttttgtagaaaaacttcatatattaaaatgaagcatttttggaacttgggatttgattacaagttacttcatgcatagatggtgtagctttagaaaactcaggcctagctgtttttagaagaaaatgttataattctttatacattttaagtttaattatttacatgtgtataaaaatttgggtttattgcaagaaggtacgttttgatattgctgtttctgtgtgtttgtatgatacatctacccatgtatctgtctacttatttatctttgtggtgctagtcaaaacttgcagcttaagagaatttgttcagaattggtggttagaatcaaaagtgagtgaatttatgacttacattattgaaaaacattgacaaatgtcaggactcaagtccgatttttattattttactgtaaatccagttagatgtgatttagcacttggatcatttaaatataaaggcatgttagtcacagtttaagtctttatattagtttttttaattaggtagagttttaacagaggagcaacatggaaaatgtttatgtgtatgaggataaaaatgcaagtcttgagaatattagtttagtaatgttctgattagtgtttgtagcctttgtaaaaaatgtaaatttaccttctagatgactacttgaaactgttgtttttggatgcttgccagataaaagccctgtgggattaagttctggtaaatcgcttgcaaatttgtgagggatatcagtgactttgagtgtttaactgtccaagctgtcatctacatgcgtcctatcactgcattgggtgaaaaaattaagtttctcagccagttagaattaaaggtgacatctgcttttaattggtgttttattttcttccaagtcagtaaaaattcagtaagacatgaattatcaaattttgcaatgctaagcaacttgtcaagtgacagtaagcactaccttgagcagttgtacagatgggaagtgttaaaatgttgattaatcttccagagttctgattatgagaagactaaagcttatatcatcattgccagctttctagtgtcagagtagtatttatttgttaattttgtagacctttttcaattactgacaaattgtgtcttgcataatgaaaattttactagttttaataagacttggtctattagactaagggtcatagatggcaatgtagaattcatgtttctgttgtctattatttagtaaacatattagattctttttagtaaaaaactgaaaaaaatctaaacgtgagctttaagttttattctgttatacacattcatcctgtgttgagaagggagtatctgtttgaatcttggcaaaggaagtcttgcctgggccccctgttgaaaaagaaaatggattatttctgtttttaccatttataaaacattttaagatgtaaaacataaggacgaaaaaaatcatcaccttcaagtagtccatgtaaaaataactcaagtcttcaaacattctcagaactaaaaaagaccaaagaaaatattcccatcatactgattatgtttcaattttctagttactaaaaattagaacatggcactaagtagactatataaagtatgtctttaaaaattcaactgtgaaggagatcttttttttttgataatcattaatatgaaagtgaagtttctcttttccctgttataacagttctatgtagtagtagaggtagaattctgaattgaaggtggttaggacttatagcaacatttctgggatgagtttttcagtattcccagacttcaatttaattcagggtttcttttttgctctccacttatgaatatgtgataaatattttatgtagtcgtgtacttttgctatagaaaatcagtggattatttaatttgattcaggaaatctaccctgtatggttatttcgatgttgggtagattttatttcaacttaaaacgtagaaaagatgcttaggcaaatgatctaatagttttagatacatttggtaacttgtatcttaaaccccagggccaagtttagcagtcttacacatgtttagaaaatagttgaaaaatagaaaatttaggtctttttaggtaaactatacaaaacacttttatagtcattttgatgcctgataacttcagggttcattgcccctgtacatttttcaaattatttgcttctcaatccataaggctttaatttaccccctactgacaaatcccaaatgggtttttaagaattttgagagtggtctgctgtagttgtgcttcagcactggcttcaattgctgacacagaatctcttaagatgcaccaaatttagaaggataggaggttcaggcagcatttcctctggcaaatactaagattttatttgcggagggtggggacggagatacagaattactgttttctgtaatatttttctttctttgatcctgttttaatgcctgtttattaaaaaaaaataatttagacacaagatttagccacatttttttaattaattaaaatgtgtgggccgggcgcggtggctcatgcctgtaatcccagcactttgggaggctgaggcgggcggatcacaaggtcaggagatcgagaccatcttggctaacactgtgaaaccccatctctactaaaaatacaaaatattagctgggcgtggtggcaggcgcctgtaatcccagctactcgggaggctgaggcaggagaatggcatgaacccgggaggtggagcttgcagtgagccgagatcgtgccactgcactccagcctgggtgacagagcgagactccttctcaaaaaaaaaaaaaaaatatatatatatatatatttgtgcttgtttggatgggcttttttaatcttgaattttatagaataataaagttaagtatttgtaccttgacataccctaacacaattaagtattgcttccataaataattttgatcttataataaacataccttacatactgacgaataatattaacacaaatgtatactcccttagaggtgctcaaaatgactttcatgccacccttcatgcctgctgggttttaaggcataagagaaacagatgatttctgcattttactggaaaaaaaagactaaaatgtacagctagtattgaattggggtaataatctgccacttttttgcccttcaatgctgtcgtgatcttttagggaagtgaggtcatggtagacccgcttgttaatcatttctgcgttttcagctcagtttggtcatgaatacttgacttgctacctatagtcttgcttctgtttgcctctttgcatgcagctccttaaattgtttaaattaccatgctttctttatcatgtgatcctgtcatctattgacaattgattggatcaaggattagtgcctgacccaaggcagacatctacagaagggtcatcctcttcccacaatggtttattttcctgtctgtgtgtgtgtgtgtttgtgtgtgtgtgtacgtgtgtgtgtggtggtcatgaatggtggtggtgccaagaaggttgtgacatttgactaataactgatgatgagagaagcagccagcacttggagatctagagtaagagctctccaggcagagggaatagcaggtttaaatgttctgaggctggaatgagatttgagacatagaatatagagattggatatagagaaaggaactggtgtggcaggagaatcatgaatgagaaaacacgtggtacaagatgaggttgaaagggtaggtggctcagggcagatcagttagggtcattctaagaagctgggatttaggtctgagtgcattggggagctgctggaggagttttaagcatgtggtgcacttctgtatcacttctgacctaatgtgatgcacttctgtatcactgtaacaacagtgcatatcagactgaagaactatgtgattaagaacactttgctacataggagcagaaaaatttaaagaagaaacagtgccctagaagaagttaaattctcttgggcatccacctgtagacgtcctcactccttaatttgtcctgctgttcttagcatcatagctctctgtgaaaacaaagctatcttctaatttatactttgcaaatcatttgcttttccgtaaaccccattcttgcctattggggttaatctaataccaagatccaagattcctcttcccacaatggtttattttcctcaggctggattattcagtattgaaaaacagccccataagacaacccatgggaaccattgaccattcaggtcctaagaacagttagagttagggggtaggtgtggatacagaggttgtatgtatgtggtattccagtttaaggtggccactctcttctgatttctttctcctctgattttgtctcctccgatttctttcccctggtattaattactaatacgcttctttgactttctgtctggctagtaggtgaggttacgttgcacaaatgcttaaatgaatgcatgtatattggcatccttgtatatgggcttatgtttgcacacaaatactcaaattccagtgaagtttgctttgccaacatcctttccaccacaggtgatttgtggaagccagtcaggatcattttatcttccctgacaattattgattcagggattaatcaaggcttaagccattgtgggccactgaaacatgatgaaaggctttcctgggattcctggaaaaggaacctccttattcttaagagaaagacattggaagccaggttctcttgcattctcccccacccaccaccttgtgaatgagagagcttagttgctgctggcagccatattgtgaccatgagggtagctagcctgagggtaaagctgacttacagaataaggcagatctgagagaatggcagagaaatccagaattgggagatatatttttggaagaatttctgtctaaaagtgttggtggggtatgtgttatggcaagaagagagctgggatgtttaatgggttaacagcattttgttctttatcatatatttattgaaaaattttcctatcccattgtgctaggcactgaggaaattatttaaaaaataaagtagggcacagaacttgcctttccaggaaactcatttacaggtattgggttttgattctttctttctttcttctttggaaacagggtgttgctctgccgcctagccggccaggctagagtgtggtagggtgctcatggctcactgcaccttctgcctcctgggctcaagcaatcctcccaccgtagcctcctgagtaactgggactacaggcgtgcaccaccatgcctggctaatttttgtattttttgtagagatgtggtctcgccatgttactcaggctggtctcgaactcctgggctcaagtgatccgcttgtcttgattccttgtataactgccccttgtattggatttggggactgaaagaacacttagttactaatattcttttttttgtttttctttttctttttttctttttttttttttgagatggaatctcgctctgtcgcccaggctggagtgcagtggcgtgatcttggcttactgcaacctctgcctctgtgttcaagcgattctcctgcctcagcctcctgagtagctgggattacaggcacgcgccaccacacctggctaatttttgtatttttttgtagagatggggtctcgccatgtttctcaggctggtcttgaactccagggctcaagtgatctgcttgtcttgattccttctataactgccccttgtattagatttggggactgaaagaacacttagttactaatattgtttttttctttttctttttttttttttttttgagatggagtcttgctctgttgcccaggctggagtgcagtggcttgatcttggcttactgcaacctccacctccccgttcaagcgattctcctgcctcagcctcctgagtagctggaattacaggtgtgcgccaccacacctggctcatttttgtatttttagtagagacggggtttcaccatgttggccaggctgatctcaaactcctgacctcaggtgatcctcctgcctcggcctcccaaagtgctaggattacagcactgtgcctggccagttactaatattcagttttaaattttagaaacctagtacttaaagcacattaaactttgcttactgtggaaccagtgtcagggctgtgagttgccttcagtgatgttgctgggtagccaggcttatctgtgcgttatacgtgggtgctttgaggaatccaacaatgagaagatagctagccttgaagacagcactggaagcagagagtagccagcagtcagtcagtcttctctctgagtttatgctccattctttgaggtgtttctgcaagcctctctgctttccacctctgcttgtctggcttgcggccctgttggaacatgctgacttcattgctcctaagcctacatgatatagaccagggatcctgaaaagaggaaagcctctttttctctctgtccccatgccccattcctaggaaagggaccctgataggtctagtttgggccagctgccttttgccactcccgtctgttcagagagcaagattatgccattcacaaggtctacaactgaagaggtcttttgctgagtttgggaaaagggcagttcaggaaaatcagactaactctgccaccaaatgtctcttaaaccacataattatgggacagtatgataattgcagcaatcaaaggctgttgagtgttgtgtacaggaaggtagtggttaactctggtaggttgggggttgggtacagctgaagagaagattgtcaaacttcacataaagggtctgtgtgtgtgcgtgtgggtgcatgcatgcgtgtgtacgaaggattcatgagggggagtattttatattggtgtaggtgttggtttcctccccaagaatttattcctatcataaatactctctgtgcccctgtgacagtttcataactgtggtatcattagcgttacaaagtacagaagacagaataaaatcatggactttttgagctggaaagaccttgaaacttatctaatttgtttgacatacatcttttgatgtggcagattctggtaaatataaagacaaagcaggttccctaccctgaagaagtttatagggggactacagcagggaagaaatactgggaggagtttctctgattcccaggagaggatagctggccatcgggggaagtcagatgacgaagtcatccattttgatggaggagatgtgcccagaaaggcttcatgacgaaggtggcatttgaagtaggtcttgaagataggtagtgtttaggcaggggagatgatagaggagaagaatgggacacacaggtggaggggacattccaggaaggggctgtagtgtcgggatggcagaaaaaggggtgctgcattgagccatgagctgtgacagacctttgagtgtaagagtgtaagagtaagcccggaaggcgaggggccctgggtactgggcttgaatttgtttataccattcaagctttccagaaaacccctgtgagctttgaaatgcttcaggggagcattctgtgtgaggctggctttttctgcccttttcctcaattcagcaaatggcaagaaacttggtatcatctttgcccacctttgctgttaggccgtgtgctagtctgttcttgccttgctataaagaaatgcctgagactgggtaatttataagaaaagaggtttaattggctcacgattctacaggctgtacaagaagcgtggtgtcatctgcttctgaggaggcctcaggaaacttacagtcatggtggagggcaaagaggaagcaggcacgtcttacatgaacagagcaggactaagagagagagggggaaggttataactatagtagttattgcttcctgatagataatttgtttgtttctctttctcctctgctgaaatacagcctacacaaccataggagttcctgtctcttgattgttgctgtttcctcagtacctaggacagtgtctggctcatatatatttgtttaatgaacaaatgaataagagatgggttatttagctttaggccattcatggaaagtttaataccataaattctctgttaagtaggcagatatttataaatacagaaatggcttctaaggtgtctccgtaagatagctattcaactgttgcacgagcttatgatgactggaatcgtacgccctttcatcatatagaccagcatttggcaggctttttttctgtaaagggccagataataagtgttttaggctttgtgggccatactgtcacaaccattcaactccattctaaatactcagctcttctgttgtagtgtgaaagcagccctagactataggtaaatgaatgggtatggctgtgtttcaatacaactttcattatgaatacttaaatgggaatttcatgtaattttaacatgtcacgaagtattactctgcttttgatttttttcaactatttaaaaacataaaaaacctttcttagctcatagactacaaacgtggtgggctggatttggcctgtaggctgtaattggccagtacttgttatagagctttctgtcttcctcatctttaatggttagaaaattcttcattgtattaactgaaatctatctgtttagaatatttacctattttttcagtagtgaaataggacatatataccgaaaaatgcacataatgtaaatgtacagctttacaaattattgtgggcacccacataatattacctaggtcaaaaagtaagacaaatgtctgcaccctagaagccctttgcatgttcccttcaaatgatgctccttcctcccatcccaggaacactgtcctaactattatgggaatcattttcttgcttctctttatactttcacctccttaatatgcatcctatgaccctggagtttagttttgcctatttttttgaactttctatagatagaatcatatagttaaaaaaatttgctttctgtctttgtttctttctctctttttatcttttctttctttctaatattttctttttttctttcttttgacagttttgctctgtctcccaggctggagtgcagtggtatgatcatggctcactgcagcctcaccctcttgggctcaggtgattctcccacctcagcctcccgggtagctgggaccacaggcacaagccaccgtgcctggctaattttatgttttgcagagacaaggtctcaccatgttgcccaggctggtcttgaactcctgggctcaagtaatatgcctgccttggcgcctcccaaagtgttgggattacaagttttcttaaatttctttttctttttttttttttttgtgagacggagttttgctcttgttgcccacgctggagtgcaatggtgcgatctcggctcaccgcagcctccacctccgaggttcaagtggttctcctgcctcagccgctcaagtagctgggattacaggcatgtgccaccccgcctgactaattttgtatttttagtagagatggggtttctccatgttggtgaggctcgtctcgaactcccgacctcaggcgatccacccgccttggcctcccaaagtgctgggattacaggcgtaagccactgtgcccggctaaatttctttcagtaacatttattagtttcctgcttagaagtattgtgcattttcactgtatttattattagaagtttgagtcttaaaaattattcagttttctctttgatttcagtcttaccattccatctagttaaaatagctttgaatcaatattttatcattctttttcagcattggttcatcattgaattaggcaatcagtgtctttgtgtggcgttatacaagtatttagtaaaaatatccattagggaagggccaaaagtagagtagggctttttagttagacaaaaatggactattcaatgatctggatatggcgtttgaaacaattgtgtatctgtacaaatatatttagtttaatacacacttgtctgtgttgtccataagcacacatttgaatatggccacgagaaagattttgggtgaccatgtggataaaaaaattatttggtacagttatttctgctaatggatggggaatgtatagtaatatggaaagtacaaaataggggccgggcgtggtggctcatgcctgtaatccagcactctgggaggttgaggtgggtggatcacttgaggccaggagtttgagacctccctgggcaaaatgacgaaaccctgtctctactaaaaatacaaaaatggttcaggtgtggtggcacgtgcctgtagtcccagctactcaggaggctgaggcaggagaatcacttgaacagggaggtggaggttgcagtgagccaagatcgcatcactgcactccagcctgggtgagagtgagattccatctcaaaaaaaaaacaaaaaaaaaaagaaaatacaaaatagggatagtgtagaagaaatctgagaatgttttctacaatttaatgtgtatcacctagtaactatatttaataatactagatttatattctcttaagtatatgccaattgagaattgtgcagtgagttcagggatgctgtgaaggaattattttcagaattcaaaattttcaatggataattgagaattaattgcaatgatgaaacatatgtaacatgtagtagcttatgtaaacattagtgttagattagatttgtaaaattcctagttttcccaaaatatttgaattatgctgtagaaaagtccagggactcactcctgcaaccctaaatgtagctatactgatacaggatttggcagcctaatagatgtagggttggagcacaaagaagtttaaaaatactccattccatggatgtttaatagatttatacctgttgattattaatttttgagtttgtggattaggtattatcctccatgattaaaaaaattggagaaagaggataatcactgtaagaacgaatcaagattatgactttgtatgttcagaccaacatgggaagaagaaattcttggtaatacgtcaattgggatctgcgataggctggagaggtttttgggcagatatgggaaataatgctatttttagtctgttcactttcatcaagctgaccacaaggtggggaataatacattatatgaggtctggatgacctgcgatatcatccagagttataatagagaattatattactttaaagaatgtattttttaaatttggatatttacacatgagttagagtcaaacagtgtttttatagctatatcttgactagttatgccaacaataattattttttaaaattgtttctcagtactgtaaggttcttattttattgttgaaaaaaacttattttaagttcaggggtacatgtgcaagttcgttacataggtaaatgtgtgtcatgggggtggcactctttttatttcagtaaatttttgggaaacaggtggtatttgattacatgaataagttctttagtggcgatttctgagattttggtgcaccagccacccaagcagtgtacactgtacccaaggtgtagtcttttatcccccgcccccttcccaccctttcccccaagtccccaaagtccattgtatcattcctatacctttgcctcctcgtagcttagctcctacttatgggtgagaacatacgatgtttggttttccattcctgagttacttcacttagaataatggtctccactttgggaggccgaggtgggcggatcacgaggtcaagagatcgagaccaccctggccaacatggtgaaaccccgtctctactaaaaatacaaaaaatagctggatgtggtggcacatgcctgtaatcccagctacttgggaggctgaggcaggagaatcgcttgaagccgggaggtggaggttgcagtgagccgagatcgtgccactgcactccagcctggcgacagagcaagactctgtctcaaaaaaacaaaacaaaacaaaacaaaacaaaacaaaaacacaaagaaagaaagaaagaataatgaattccatctggattgctgcaaatgccattttttcattcctttttatggctgagtggtcgtattccatggtgtagatataccagtatttatctactcgtcaattgatgggtatttgggctggctccatatttttgcaattgcaaattgtgctgctataaacatgcatatgcaagtatcttttttgtataatgatttattttcctctgggtagacacccaataatgggattgctggatcacatggtagttctacttttagttctttaaggaatctccacactgttttccatagtggttgtactagcttacattcccaatagcagtgtaaaagtgttcccttttcaccacatccacgccaacatctaatattttttgattttttgattatggccattcttgcaggagtaaggtggtatctattgtattgtggttttgaattgcatttccctgatctttagtgagcatatattgaagtttgttggccatctgtatatcttcttttgagaattgtctgtacatgtccttagcccactttttttttttaaattatactttaagttctggggtacatgtgcagaatgtgcagttttgttatataggtatacatgtgccatggtggtttgctgcacccatcaacccgtcagctacattaggtatttctcgtaatcctatccatctcctagccccccaccccctgacaggccccggtgtgtgatgttcccctccctgtgtccatgtcttctcattgttcaactcccacttatgagtgaaaacatgcggtgtttggttttctgatcttgtgatagtttgctgagaatgatggtttccagcttcatccatgtccctgcaaaggacatgaactcgtctttcttatggttgcatagtattccatggtatatgtatgtgccacattttcttaatccattctatcattgatggacatttcggttggttccatgtctttgctactgtgaatagtgccgtagtaaacatacgtgtgcatgtgtgtttatcgtagaacgatttataatcctttgagtatatgcccagtaatggaattgctgcttagcctactttttgatgggattgttcatttttttattgctgatttgtttgagttcgttgtacattctggatattagtcgtttgttggatgtttagattgcgaaggttttctcccactctgtgggttttctgtttgctgattgtttattttgctgtacagaagctttttagtttaattaagtcgcatcttttatctttgtttttgttgcattttcttttgggttcttggtcttgaagtctttgcttaagctctttgcctaagactttgtctctatatttaaaaaaatatatgttgcccaggctgctcttgaactcctgaactcaagcaatccccttgctttggcctcccaaagtgctgggattacaggcatgaggcactgtgcctggctgcattattattttaaatccataaaatcacacctttttcagcttaagatcatttctagactgtcctctcactaaaaataccctggaatcaatatacatgttgttagtttgaaaattctttgctaggttgaacagccatattggaaaagtaccaaatccctttagggttttgttattggtaatataaagaggacagagaatgtatttcaaattagttgtcatttcatgaggtgttgcccttcatttcttggcaggtcttaactagaatctagcctcctcttataatagttgaaaatgtgtcatgactaattaatatgatacaatgagagcactgttttctgattaataaggtgggtggaccttatgaaatgttatctgaagatcacgcacgtaatctttgatggctgttattgcgttatattgacttgtgattcctgtgtgttcaacttctagtgtgaatagtaaggccaaaaattcaaaagggcttttgaagttgatttgtaattaaatagcattattaaaataaagagtcaaagcattgtcaagtgtgataaattcagtgtcaaaactgagcctttaaaaccaaaaagcgtggctgggcgtggtggctcacgcatgtaatcccagcattttgggaggcctgggcaggtggatcacttgaggtcaggagttcgagaccagcctggccaacatggtgaaaccctgtctctactaaaaattagccagatgtgatggcatatacctgtagtcccagctacttgggaggctgaggcgggagaactgcttgaacctgggaggtggaggctgcagtgagccgagattgtgctattgcactccagcctgggcgacagagcgagaccctgtctccaaaacaaaacaccaaaaagctcatgcctgttatgctagcactttgggaggccaaggcatgaggattgcttgagcctaggagtttgggaccagcctggacaaaataaggagaccccatcactacaaaaagtaagaaaaaggggctggtcgtggtggttcacacctgtaatcccagcactttgggaagctgagataggtggatcatgaggtcaggaattcgagaacagcctggtcccatggtgaaaccccatctctactaaaaatacaaaaaaattagccaggcatggtggtgtgcgcctgtagtcccagctactttggaggctgatgtgggaggatggcttgagccctaggtgtcaaagctgcagtgatcacactactgcactctagcctgggcaacagagagagagatcctgcttccaataaaacaaaacaaaacgccctcctcaaatcagaaagcattctcaaccatagtacttccaagcaccctatttgtgttagaagtgtttaaggcaatgataaagtcagtaaactatttcaagctgttggaagtgcatctcagcacacgacagttgtgatttcataagcttcttaaggtttcaagtgcacagcattttaccgcagaactattactgtctcaggaatgaggcccatggaacacaggaaaattctccacccagggaggaaggctgggaggcctcagcagccaatagtggtgtgactgagactctggagtcccttcacacttgtgtcgcagcttactacgggtcacctccgtcctaagtgtcttacatttattaatcatatatcctcacagatagggaaactgaggcacacagcagccaaggaactcgtccaaggccaaccaggtagtatatggtggaactggagtgaaggcaggctccacagtccctgttcttaacctttatactccactgcttctaattccttactttcttttatacaagaatataatttaaaatcctgcccaacacttgttttgtaagattctagtggcatgggaagtgaggggttacagttggtgtcagtcatatttcaaatggctgggaataggggtgataacatacacccaaggaagtcacgctggctgctacaacattgtgagaatatcattctgctgagattttacgcttgctggtagttgacataaaatgaagcttagtctattatatacaatgccagctttttccttcatcagttacaaggcttgactttaatgaaaggagaagactgcattttcaagtttgatctagaaggctatgaaggctctggttggaattattgagaaagacaaatctcaggtgatctgaacgtgttaaattgtaagagtacttaatgtgaattggaggaagcaattctctgaagcaaagggggaggaatttgtatcttggaaagaattgcctttgtcttttattatttatgcagttgataattgcaatattgccacttcacatatgaaaatatcattgtagtaaatttatgtagagttggctaacaaagttcccatccatctttgctttagttcaattgccattagtttcccagagtactttctaattcctctaccacagtactcatgctttattttgattttaattgtgttatattttctcttctagttagtcaaataagcgaggtcctggtgcacctctgtcttgtccatcattgaattcctaggcttaccacagtgcctgacgtagagttggtgttggcagctatttgtaggatgaatgaatacatgactgtgttaagcagacatcaaaggcgtataaaattgaaatctagttgttgtaagacttaaaaagagaggagatccttatagatgagtgctggttgtttgcaggatcattattattctctgatgatcaaaaaactgtttacgcatgcaccagtagtcccagctactcaggaggctgaggcgggaggatcccttgagcttgggaggcagaggttgcagtgagctgagatcacgccactgcactccatagagccagaccctgtcttaaaaagaaaagaacggtttacagatcagtgagagaggtgttttcctaaatatttaaatgtttgcttgcccatgctacttttccaaatcctaattgtccttttccccctcaaatgctccttcctttgtgaagccgtccttgattcccttgttggactctgttcaccgtgtctgatttttacctcttctagtgcactgactattcttaccgtgtattgtttttattttttggtacatgtgttgttgtttgttctactagactataaactcttgagtgtgaaaaccatgtctacttaaccagcctgcttccgagagtgaaaagggacgctaatcagataggacaccgagtaatagatgtgttcaaggctgtgcgaggcaaacctgatggctggttactctccagtaatctttagcttattgaaaaagcagaggccacttgcacctgtttacaagcaggtgagatgggcctgagaaggtgattgaattgcagattcaaaacgctggtttgtgtcttagtcttatctctgtcacttcactagtctaatgactgtgggtaatttatttcatcttgaagaccctcattttactgacatgttaagtagtgatgaccatttatttcctgctgtttcttaggccccctcctttttgtgttttgaggaagagaagatataaaaaaacgcccttgagagctgtgaagtgtcatagatactacaatatcgttttagaatcaattgaagactttctaactttgtaaacaaatttgaatctgatgactgaaatgctaatctataaaatggttttttagtaataaagtgagacttaatacagtgcttttaaatagtatgaaataagtaaataaatattgtagtttttgttagtatcattatattccttgttcttttaattcatttttaaacttagaattgtttcctacagataaacaaatgtcagcttgggtccatctactacatcttattgtcactttcacttcattgcatcattgctcttaatcagaataaagggtgaatttagcaggttgtagggtttgagtagtgctaagtattgtgaggaattgtgctcaaggtaattaattataaatcatagtccgggtgcggtggctcatgcctgtaatcccagcactttgggaggccaaggcaggcagatcatgaggtcaggagatagagaccatcctggctaatatggtgaaaccccgtctctacaaaaaaattatcctggcgtggtagcgggctcatgtagtcccagctactcgggaggctgaggcaggaaaacggcacaaacctgggaagcggagcatgcagtgagccgagattgtgccactgcactccagcctgggtgacagagcaagcctccgtctcaaaaaaaaaaaaagaaatcatgatctctgctattttaatattttgctcagtatttgaaataagctttataatgtaggctatagtaaaacacagcaattaagtgcttaaaacaagaatatcccaactgtaggtacagcatactttacctaaactatatgactcttatttctatccagcaatgggatcaaaaacttgatgcatttcagaaaacacgaggttaagcaagacgtgggaggattttgacttgtggtaaattttgaaagaaattgtaaatattttcaaagaaaatagaaaaagcacacaattcagagaatatacaaagccaattaaaaagttgtaaaattattattattattattatttttgagacggagtctccctctgtcgcccaggctggagtgcagtggtgcaacttcagctcactgcaacctccgcctcccgggttcaagcaattctcctgcctcagcctcccgagtagctgggattacaggcgtgtgccaccacacccagctaattttttttgtatttttattagagacggggtttcaccatattggccaggctggtctcgaactcctgaccttgtgatctgcccaccttggcctcccaaagtgctgggattacaggcgtgagccactgcgcccggccgtaaaattaaatttaatatctgatctgacggactaaacaaaagatctcttgcctttcaccagtttaccagctttctgttctttttcactcttagttcactaagtgtgagtggactgtgaggcatgagcaggaaggggtggcattgggcatttacagcaagagaccctcatgctaagtgaagtgttatcaaatcttcatttttttgcttatactgtaaaattgccaattatattcatagttattgtaagttatattccaaagtttaactggaaaaatattattttgcaaccaaaaaggtaccaattaatattcctgttcatgaaacaataaaaagaattgaatcagggagaaatgaaaacagctcattttaaatattcaaatttaaaatgatataaaatagggatataaaataaaagcattttatatgaggtatagaggaaagaaattacaacttcaaaacaaatccttgtgatcagcttccatgaggaggaccttagcaatgtataccaaatttaaatgtgaagcttcttaccttcttcttacctcatcttcttaaaagatacatctaaaagaaaaactaaaatttgtatcgatatgtttaattaaagcattattgttattattatgtaaagcagaaagaaacttctgaaaaatagttgagtgatacatttaagcatttcacctaaggaaatttagtgttatttaaactgattaacagtatttggcaaagtattttcattagcgttctaatattaaagctagcatttccttaaaggagggaggctaaaattcatcccaaagcttgtttttgttaactcaaattttctcagtgttattgctgaacaagttactgaattttctctgggtatcttctatattgcctttctttgattcttgtcagtgcaaccagtctaaggttttacatgataaaggaaatctgtggagctaatcctagaaacctctttctattttcttacctaacacctccaggcacagagaagacaaaatacttcatttgcattcttaaacattaggaactcagaataagtctttcaactggaaatgttattgcatctacatttcccgaagagaaaaaggttaacagcctactcaggtttatgttaactcatctctttttagtatcctgatgtgcacaaagagtgaagaatgtgaggcttacccacccaggctctttcttctttacaatcaatgagactctggaagtggtatcagtgctgattacagggaaataaaaagaaaaaatcaaatatgcacaaaagaaatggaaaacactaacatactttaatcttagtcttctaggaatagaaagaacatttccaaaattaataacgaacatagtaattcaaattttttaaaataaaaagtttcctccataaatttgaaaagcttaccaggaaagtacaaagatattgagatttatagtttgtttgttgaaatggtttttattaaagtaatcaataccaaaaaactcttgtttgttctaagtaccttggtcagaaacccgaaacatttaataaaagaaattgaacaattttttgacttaatgtttgctaaaaagtagaaatggaaatcatttaattgccagatattaaaaacagaaagttttctattgctgtaatactcactccccatcagtgtaggagaaacaaggttttatatttaactataatatattccttaaaatatacttaagtgggaaacttaacttctgccgacagttacagtggggaaagttaccactgttctctttccctaactaaataccgtacatagctatcatctggaagtaatagtattacttcagtgcattgtgccagtagacacttaatacagaatatactttagactaaatgaaatccagatcccagtaatactgaaacagaaagacacaggttcctttggttaaactaagtcatagtgtacagtgtactataaattaaatacagtttgtgagtatgtcattagattttaattgaatttgcaattagcatcccaaacatttaaaaatcgtgtgggtttataagtttttacttttgaattttaaaataatagaacctttacccccttccactacccatctcccatagcaatcacatccatttatgttcttatcctaatgaatcagctaaattgggttttaatttacaatgagctggtaagagttaaagaaaatgactcctataaatgtagtaggtgagaggctgagggcatcctcttctaggttattctgctccttcctacctttgttgatgccccacagtcaatgttggggaaaattaattaggatttatattccagtcttctctaatgtgttgtcaccattgcacagactcaggacttccagtgcagtgttgactagtaccagtgcacatccttacccaggggactggaacttacccaggatcacaaaaatgacactaggaatgtttctcccctctcagcattcaaatgttctccttatcttttatttttatatatttatttttgagacaagattttgctctgttgcccaggctggagtgcagtggtgtgaacatggctcactgcagccttgacctcctgggctcaagcagtcctcctgccctggcctcctgtgtagctgggaccatgcctggttaatttttaaatttttttttgtagaaacagggccccactgtgttgtccaggctgatcttgaactcctgggctttaccttttattattttaatttaattttattttttgagacagagtgtcgctttgtcacccaggctggagcacagtggtgtgatcttggctcactgcaacctctgtctcccaggttcaatagattctcctgcctcagctcctgagttgctaggattacaggagcatgccaccatgcccagctaatttttgtagttttagtagagatggtttcaccctgttggtcaggctgtgatccaggcaccttggcctcccaaagtgctgagattacaggcatgagccactgtgcccagccttatcttttatttttaatgattattgtttaaagtacactgagttcaggttaaaaaccaactgccaaagtaaattttaacacctaaaagctgggagaaggggccattcttcttttatgcagtaactctttggagtccagatactaacatgccccagatttcatcctggtgctaaactgacttgttttccaattaaaaaaaataaaagtctgagtaatattgcgtaggagtaccagaaatggccttgttggaaaccaaaactatttacattcgttaagaaatctgtttgcaggtgtgtctgccacatttacagcacagtgtacagctcctggcactcaatacacagtgttgcacagcttgccgcaggagcataaagtggaggtagtaaaaaggtaaggaagaaagagggaggaggatgagttgttctctattcatttgcttctcatttcatcactgatttggtggtacccagacctttacagagccggtctccataatactggtgcaggtggcctgatgcccagtttctgttgctcagataatgcagtctcatctcgtctgtgatttcagcagcactcatggcaatgggaacattcttcttctttgcaacccaggagtgagattgaatctctgattaaagagcaaagcttgagtgttttggacatggtaatgctgcagaggtgagttcctgttctggctgtccatgtccaaacaagtgaaacaaatgttttcatactttgcagttgccacgttcattcattcattcattcattcattcattcattcattcattcatttttgagacgagtttcgctcttgttgcccaggctggaatgcaatggcatgatcttggctcactgcaacctctgcctgctggctcaagtgattctcctgcctcagccttccgagtagctgggataacaggtgcacaccaccatgcctggctattttttatatttttagtagagacggggtttcaccatgttgaccaggctggtctcaaactcctgacctcaggtaatctgcccgcctcggcctcccaaagtgctgggattacaggagtgagccaccacacccggtctgcagttgccacatttaacctttagtgctaagtaaacatttcaccatggttcactttgtacaaaatgagaatctttactgaagcatcccagccaaacataagaatgtactttacaattttttttttttttttttttaagcctaaagtccctggaagaggctggcaaactggcttgagaaacacttcactgggcatagagctgctgaagctgctcctagtccgtgtgttgatttcactcctataagttggtggctactctgaaatagttttcaaaatttttattgtaaaataaaaggcagttacaggagaactatacaaaagaaacctatggcttaatgaactattatagggcgaactattttgaaatcatgaaataggtccagacgcagatgtttaccctgaatcctggaaagctgtgtgacccatctcagtgctaacctccggcctctctctaaacatacccattcctttggcttttatagtaatcatttttttttgcgtttaaaaataattttattgtccaaatgtgccaccttggacacaatatttaagtcttgtccatttatttttaaatttgataagtctttaaaatcttagtctgtaggctcctcttgcttccttttcttcatgacttatctgttgaagaacttgggtgtttgacttacagagtcttaccccagtcttgacttagctcactgcatggcgatgctatagctcagtggtttcccccattcttggtgtttcctacaaattggcacttgaattcagagatgggatcagacttggatttgatgcctttgatgaagactataggaggcacataatgtctttttagctctttttaagatataagcagactttgatgcttactgcccatatctagtaatttattggattacaaaattttggtagtttaatgctaacatttttttcattagttaattggaatatatttagaaagaaacccttcttctcatttactgttttattaccactggtacaattcatatatgagaagcaagataaatgcttaattctttacctttatttactatttctgaagtaatgattggttccttatcatccctcgaagttagccaattcttttgaagaaatcactatgaagtcatactgttgaaattactgtgaagtcaagttgttcctctttggtccgtggggcttaagttgactcacgggtctttttgacttgacctcataatcttctctagcttccttactatctgatctgacaggacattccaggctcatgttttacattttctgttccaactctttatttttatttatttatttatttatttttgagacagagtctcactctgtcacccaggctggagtgcagtggcgcaatcttggctcactgcaagctctgcctcccgggttcacactgttctcctgcctcagcctcctgagtaggactgctggagcctgccaccatgcctggctaattttgtttttgtatttttagtatagatggggtttcaccatgttagctagaatggtctcgatttcctgacctcgtgatccacccgccttggcctcccaaagtgctgggattacaggcgtgagccacagtgcctggccttctgttcaactctaatcagccatcttttcaaaatgccttggcttcttctaatggtatttggagatcacagttggggtactaggcatggtcattgctactgattggtcattttaagcctttttagttgcaggctaggaaaaaaaatatacatatatattaacaggtttttaacatatacgttttatgttatatatgtatattgcttataatacaatatgttatcttaactatattatattaataaaatatataccatatggcaatatatttactatataaatatgtttaaatataatgccaaccctaacccaaaatagggtatgtatataaaacaaatttatattataataatcatactgtattaataaaatgcacataacatttttctcatatataatgtatataacaatatagaagtataattaaataaagtctacattttatgtgagacaaaacaactcctgtgttcatagcaatattttccattacaattcaaaattgcagaactttaacctctttgttgcctctgtgtatcttcattcttctggattcagaattctgactctcaaggataggggaaatgacagaattagagtatctcacaattgcttatttgtcttgtcctgtgctatacacagagcaatctcaggataacaatgttaataccactaccaatatgattactaaaaacattaaaaatgtatttgtacataatcttcctgtaatattaaaaaaaaagttgtactatatctatattgtcagaaaatgtggctgttatctataaggttttatatatatatctccttagctttcatttagttttagctctacaagtaaatcccgactctttttgttgatatctcttttgtcattttagtttcctgaagctcattctctagtacaggagtgggcaaaccttttctgtaaggagccagaggggaaatatttttggctttgtaggccctatgatctctgctagtactcattcttattcttatagtgagaaagcaatcacagacagtgtaaactatgagcatggtggctacgtttcagtttcatataatttttatgtgtaatgatacagtatttaaaaaaatttttgcctaacccccacccccaataattagtaaaatcttttcttagatcatggactgtacaaaaacaggcagtgaggctaggtgtggtggctgtcacctgtaatccctgcattttgagaggctgaggtgggcggatcatctgaagtaggagtttgagaccagcctgaccaacatggtgaaaccccgtccctactaaaaatacaaaattagctgggcgtggtggtgcatgcctgtaatcccagctacttgggaggctgaggcaggagaatcgcttgaacccgggagctggaggttgcagtgagctgagattgcaccattgcactccagcctgggcaacaagactgaaactgcgtctcaaaaaaaaaaaaaaaaaaaaaaaaaaaaaaaccaaaagcagggagtgaatgggccagatttggcctacacactagtttgcaaacctctgttgtattggacttctcagagtttatgagttcttgcatgttgttaaattttctctgcctttcatagttgcactgacttctatggatttaaaattcttagcttgactcagcctggtggctcatgcctgcaatcccaacactttgggagactgaggcaggaggatcacttgaggccaggagtttgagaccatcataggcaacatagcaagactccatctctacccaaaaaaaaaaaaaaaaaaaactgggcacagcagtacacatctgtaggcctagctacttgggaggtcaagatgggaggatcacttgagcccaggagtttgaggctgcagtgaactataatggcacccctgcactccaggctgggtaacagagcaagaccctgttccacgaaaagaacataaaattattagctcatactttctttccttgaatttcttactcaaaagagtttattattccattttcttttggtataaaatgttgctgtcaaagtctgatgattatttaaatttctcttttgtataagttacctattcctgtttttttttttttcattttcttttacttaagtaatattgctagaatttttcttggtatgttggtcatcctggaatgaatttctcctgtagtgtggtcttttaatatgtatttttagttcaagtaaattttcttgagttgtatttttaatatttgctcttttttttgctttggttctcttcaaggattcctattattcatatgttggatgttcttttttattttcaatatttctcatcttctgtattatttattcattttttatatttaaattaaatatttttattttcaatttgtctttctcataaggcattgtctgttttccttattcactcttacattctttgtagctgttttcatttctggaatgattttctttttcatttctagttgtatcctgagttctgtcatctcatttctgagcttttctaaatctgatttatactattttatgttatgtgtcacttaaaaatgtcttttaacttgttttgaaatattagatgataggccaggtgcggtggctcacgcttgtaatcccagcactttgggaggccaaggtaggcggatcacgagatcaggagttcgataccagcttggccaacataatgaaactccgtctctactaaaaatacaaaaaaaattagccgggcgtggtggtgcgcgtctgtagtcccagctacttgggaggctgaggcaggagaattgcttgaacctgggaggtggaggttgcagtgagctgaggtcgcgccactgcactccagcctgggtgacagagtgagactccgtctcaaaaaaaaaaaaaaaaagaaatgagatgatagttttgatctattgtattggtatgtttttctcctgtgctttcctgccctacatggatgttactctggtccctttttctttgccttataaaaacattgtattggggccaggcatggtggctcacgcctttaatcccagaactttgggaggccgaggcgggtggatcacttgaggtcaggatttcgagaccagctcggccaacatggtgaaaccctgtctctactaaaaatataaaaccatattagcccggcatggtggggggtgcctgtagtcccagctacttggaggctgaggcaggagaattgcttgaacccaagaggcggagattgcaatgagccaggattgcaccgctgcactccggagtgagacttcgtatcaagacaaaaaacaaaaaaaattatgttggattttaccttgatattttatttcacttagtttaatgtgtaaaattggtttttctctacatttctttttaaagagccatgtattttaaaatcagtgactcatgtccaagaagttcaaacacgagtagagatagcaggaagtggtttattctgaggtcttgaaaagaatgaattaaccctgtaatctccccagtattctttttgatgttcctattgacatcactatattcagtgggtgctcctttctatctgctacattagtttttgaaagctttctttctgactcagtttatctcatgtgctaacttcctgaaccaatcctggaactggccttttctaccagaaacactcttttcttttatcatggaatagtattaaaaaccacaatctggatcttttggacagttcagctgtttttccgtggcttttttttttttttcgagacagggtcttgctctgtcatccaggctggagtgcagcggtgcagtctcggctcactgcagcctctacccgctgggctcaagcaatcctcctacctcagcttcctgagtagctgggaccacatgggaccacaggtatacaccaccatgcctggctaatttttatattttttgtagagaaaagtttttgccatgttgctcagcctggtttcaaactcctgagctcgtgcagctcacctgcctcggcctcccaaagtgctgagattacaggcgtgacccactgtgcccagccccatggctgtctttttcttctgaccctggttttgtagttatccaagtagcaactcttggtaagcctaaaatctatacgctttaaaatctgaattcataatatagcaatttactaacttgtggtatttctaagaatgaaatatgtatcatacattttaatttttacaatgattctttctgtccttcattcctgacataaagcctatggtaaattaaatctcatttccttaacatactgctcaaacccaaccctttcccccattcttctattaaaatttgtccagaaccatagagtcacagaatttaggaaatgagtagaattttggagcagtgatttcagcttttcataatttctttctcttcttttgtcttgctgtgttgcccatgctgaagtgtagtggctagtcataggtgccatcatagcgcacaacagctttgaacagtatctgggctcaagagatactcctggctcagccttccaagtacctgggactacaggcacacttggctcataattttttttttttaaatgaatcactttaatgatgaaaaatgcccactttttgtgatcataagacatttacttgtattcagatattatatgtatcatgcaaggtaaatttaaaaggaccttaaaaagcatatttttggaaacaaatttagttgctattgcataacaaaaaacttacagtgattaagggaaactgataattagatggataacaaaaaataccgggttaacagaagagtatcgaaggttactagtggataaaatctggccttttattctaagtcacaccgctgcctggtcaagaactgaaaacatttgaaacatgctccatcacactgcagttaccatactctcttatcctgacctcatcctttttggttacagatttatgggagccaagagcctctaatgttgctttctcattttgctttaattacttttaaaggccaatctagggagcacttccaaaacacattgataaaaaggaagttaagtctttgaaacatttgtagttatccagcatactactggctatttttcttttgtattgggtgggacaaaaaatagtcactaaatacttgatataagcttttttttttttttttttgacaattttacatttttgggtgagtaattttcctcaaattagaatgcacaagaaaaatctggttaatcagtgttccaggtcgttgggctcctgttaatcagaagttttactgtataatcataatgtattttggatgttctcatttatgttatttcttcaattctttgtgtgggtactctgattgcttgattacatctgcctggcatagtcgtttttaaagcagcatttataataaaattttccatctttgcaagtaaaatgagaatatggaaagacaattgatggttgaagcatgattgtttcctcttgtctttacttagtgtttagtgggtttcaggttttggataaagagaaatgaatatgattattgtcctggtccgaaatgattcatgtatccacctggagacgtagagttgatagaggtgtaggcttacctctattatctcctcatacagagcagcgctacttcctacgtatgtgctttacatttttggggatttgcataagattttttttttccatgaaaataaggttctactaaaaccaaatacagaaacatttgatagagagatactttataagcacctcttagggctgaaagggtttcttgtctagcatcctgccacttgtaacaccagcaaattctaggcatttgggttcctataatattattttagagtcctgtggacctagctatcttattattctagtgtcctcttttttttctggagacagagtctcactctgttgcccaggctggagtgcagtggtgcaatcttggctcactgcaaactctacctcccaggttcaagcaattctcctgcctcaacctccagagtagttgggattacaggcgtgcaccaccatgcctagctgatttttgtatttttagtagaggccactatgttggtcaggctggtctcaaactcctgacctcaggtgatctgcctgccttggcctcccaaagtgctgggattacaggtgtgagccactgtgcccggccattctaatgtcttctttttatcaagacttctggagagtggacaaaaactaacagttgtggcactcaacttggtgctttatattattattgatggggtttaggacatgctactcccaaatttggcaccttggcatataagctgaaggatttggagaaaacagcagaagcacgaaggtctctgaccttccccttcctctcttccctgaagcaggtcctaagacctaggagggactttctgaccttctctgaaccagatcctaagaccttcatgtgagagatgcccttcctgtatctggaagagaggagcatcctcatccccatagagaaaaggacgcagagtaatctgagtagtttcccccagtttatgatacttacctcttgctctccgtgctatcatttctccataactcaccagtcctcatcaaccctgtataaaaacactcaagtttaactgtttctttggattttcatttccttatgcaggctccggtgtcacgtacaacttacaattaagtaaatgtgtatgcttgtttttttggtaaactatcttttgtaataggtgccctagccataaacttagaagggtagaaggaaaataatagttttcctcctgtacattattttatttaattctttaatcaaacttaaaagtcagatattatccacattgtcactcaaagaaatgggtgctttagactcagggtctaaaatttcccttttcttttgttttgcttttgggtaggagagaagcatacctcttgaatttaaagacattggcttttctactcattttctctgaatgatttcattcacaacttttatttttgtatttatttttttgagatggagtctcgctctgtcgccaggctggagtgtagtggctccatctcggctcactgcaacctctgactcctgggttcaagcagttctcccacctcagcctcccaagtagctgggattacaggcgcatgccaccacgcccagctaatttttggtagttttagtagagacgggctttcactgtgttggtcaggatggtctcgatctcctgacctcaagatctgccctcctcggcctcccaaagtgctgggagtacaggtatgagccaccacacccggactgccattcacagcttttaattccgtcctgtatttgatgcctttaaaaatctgtattttggccaggcgtggtggctcatgcctgtaatcctagcactttgggaggcggaggctggtggatcatgagattaagaggtcgagatcatcctggccaatatggtgaaaccccatctctactaaaaatacaaaaattagctgggcgtggtggcgcgctcctgtagtcccagctactcgggaggctgaggcaggagaatcgcttgaacccgggagacggaggttgcagtgagccaagattgtgccattgcactccagcctggtgacagagtgagactctgtctcaaaaaagaaaaaatctgtgtttcagcctggacttgtctaataacccctatacctctatatctgcctcctgaacatgaatacttgactattgcagaggcctgtcagctcagcgtgtgcaaagttggagtcatcatctcgcctcttaaatatttatctccttgtatattctttgtgtttattccttgttctacttctacttcctgctcggggtgggtttaatcctcttggtcatgatggccaggagagcagtccaagcaacaggctactcagctgccctggtcaccaggagaatgaaccttttttcccaagtcaagattctttgcaggcagcaacgctaacatggaatgaacaggtgatgtaaaagtgatatacaaatatgcagtttattgtttataccaactctgacaaggtcgtaggacaatcagcagttaggcgccttcctcgaggaaggcctgcatataggtctggtttttcccattttatatttaccttcagttctttatgtaatgacttcatcctttatctcagcaaatacccccattacttttctagaccatgccctgtggtggagctaatggcatcatattttgttctgtctctagatctatttaagtcactagcttttttttttaaattagagtggcataaacaagagaggtagatccattgtcaaggtattcagtgtggtttgtgcagagtggttttgattgaaactgaactctacccagttaaattcccactggatttttgactcatcttttatagtcacaggatgcaaacatgtactttcttttgtctatttctctgaggtgtcagtgatctgttcacgtttcctggaaattgttgatatcctgttgtcttcatccatgttatctcctgtgtttagctcagagcctggcacagaattggtattcaggaaatatggatatttgtgttatactaggcattatgctgcaggctattgagaacacagagatttataaggtgtttacgggtgaccttactggctagattaggtggtgtaggacgttatatacaaatacagtgtcatagagtgacttttccgaggcacactgtttacccagaaggagttcttcagtgcttttggttgttttcatttgactttgttgcatgcatctatccacacatgtactatatgcaatatagtattttaatgtgttggctcaaaaactgttgtttctgcaataaaaataattagaaaatacacatatgggcttttcttttataaaattgtgactccacatcatgctccgtaatgttcttgttataaattttgacttgtttttctccacaggcagcagaagatgtcgttttcattggacctgacacacatgctattcaagccatgggcgacaagattgaaagcaaattattagctaagaaagcagaggttaatacaatccctggctttgatggagtagtcaaggtgagaagctactttaacttttattgtatatgtcttcaagttaaacattttgtcaaaagtataagataaaatgtaactattgcttttttgggatatacacacacacacacacatatgcacgcacatacatacatgtatatatgtttaaaaaatcagtgtttttacatttatttatttatttatttgagatggagtcttgctcttgtcgcccaggctggagtgcaatgatgcaatctcggttcactgcaacctctgcctcctgggttcaagcgattctcctgcctcagcctcccgagtagctgggattgcaggtgcctgccaccatgcccagctaatttttgtatttttagtagagacagggtttcaccatgttggccaggctggtctcgaactcctgaccccaggtgatctgcctgcttcatcctcccaaggtgctgggattacaggcgtgagtcactgcatccggccagaaatcagtgtttttaactggattattttattatttttagagatggaggtctcactctgttgcccaggctggagtgcagtggtgcagtcatagctcactgtaaccttgaactcttaggctcaaatgatcctctcgccatgactcaagaatccctccttctttagcctcccaagtagctaggactgcagacacacaccaccacacctgactaattatttttattttgtagagatgagggtctcaccgtgttgcccaggctggtctcaaactcctgggctgaagtgattctcccgccttggccttcccaagtgttgggattacagatgtgaaccattgtgcctggccaacttggattgttttaaatagcataagttaaaaagagtgagaaactgtttgagcattgtatttaatgaatcagcagtgactcagactttcataggaaaaaatttggtgattaaaaaatgtactgtcagatctctggactgcatttaatagtggtatgtgtttcatgtgttaaacattaagagtttctctgtatatctttatcttgagcttctctccatgtgcataatatgtaagttaggatcatgtttctggtgaaagtggtatagctataggtaattgtatattgcaaacatttagcaagggccttctgcagctgaaggcttctgagggagaaatgcagaaattgaagtatgcaacttctccttttcccatgagaaattattctgtttttttctagttagaagagagtcctcatgtagagttttaaccttgcgatttgacttagcctgcaggaactcttcatttcagcatttcgtattgttacttttggcattctgtgttgggttgttcttcattgtgcaagatcatttcatgcattagaggacgattagaaaacttgccccctagttaataaatatcctcagcttcttgcccatatttacctgcatttacttttatctatgtgtatccatgttgtttcttcccacttgttacaaggaagaggtgttccacatcctctggaaagccagttcctcctcctacgctccaaatgtattctttatagccttcacaggctatggttttactgattatcttttctctcttctgtgtcttaaaattctcctcatcttttagctccttttgttatcattgctattaaaaatgctcagtgaacaaatgtgttggtcactcagttatgtgggaaggatgtggtgatgagatacacatgatctgcgtatcatagttctcacagtttagtgggaaagaaacaaacatttcttccattcgtaaagcaccatcacccctatcactctacagctagttgccaccttctttctctcttcccctttcagtgccaaagctcttagaattgtccttcctcactttcatttctgtatctttcacttaatcttttcttgccgtctagcttctttcctcattcctactgaatttctcttgcaaagctaccagcaacctcttccctttgttaaatcaatatgtaattttgaattctgatcttatatcaatctttgagcaacatttgagtctcttggtcagtccatacttctctcatgagatactcacttttggcacattactcagttctagtttttgtgttttttggcttttttgaatgccattcttagattccttcccgattgttcttcctatctttgttccttaaatgggggttttattctgggtcctgagtaggacatttcctctttttattgtgctaacttgccctgggcaatcttactttttttcatggcgtcaattgccaccttttcttttttcttttactattattattattttttgagacaaggtcttgttctatcacccaggctagagtgcagtggcatagtcatggctcactgcaacgtcaacctcgtgggctcaagtgctcctcccacgtcagcttcttgaataggtgagactataggtgtgtgccaccacagctgcctacttttttatattttgtagagacgggggtctcactattttgcctagactggtctcaaattcctgggctcaagcagtccttcccctcggcctcccaaagtgctgggattacaggcatgagccactacacttggcctattgccacttttctgaccaatctcaaatgtatgtatctgttctgaacttcaggattacatatccagttgcttcttatatagctctcactacttgatgcctctgaggcaccttgaaactaacaattaaaagctgaactcatctttctcctgaaactagagattggtactatagcccatgcacacctatttttataaataaaggtttattggagggcaaccatgttcatccctttacatattgtctgtggttgcttttccactacagtggtagagctgagtagtagactcaatatgtggagtagactcaactacatgggacacatagtagactatgtgactcacaaagcctaaaatatttacttcctgatccattaagaaaaagtttgcctatccctgctctaaaattcttatccttcattcttttccgcctaggaaggtggtggctagaaacatagagtaattcttaacaaatgcgactgtggagaattcactcagatagctttctaatccatttacttctttctttgcccgtactaaccaaccccagattccagctactatcatctagtctggattacttcatctgccttctaattagtctccttgtagtcattcttgcttccatccaattaattttttaaaaattcttcacctcaagtatttataatgtctttgtgttacaaacagtctaatatacttttagttatttaaaaatgtacaataaattattgttgactgtaatcactttgttgtgctgtcgaatactagatcttacccattctatctaactggacccatttttgtacccattaaccatccccacatcacccacccccactcctccccactacccttcccagcctctggcaatcatcattctactctctatcactgtgagttcaactatgttaatttttagctcccacagatgagtgagaacatgtcaaatttgtctttctatgtctgacttagttcatttaacataatgtcctccagttccatctatgttgttgcaagtgacaggacctcattctttttggtggctgaatagtactccattgtatatatgtaccacattttaaaaatccattcgtctgttgatggacatttaggttgcttccaaatgttggctattgtggatagtgttgtggtaaacatggtagtgtagatatctctttgatagactgctttcctttcttttgggtatatacctagcagtgggattgctggatcatatggcagctctatttttagtgttttgaggaacctctatactgttctccacagtggctttactaatttgcattccccccaacactatacaagagttcccttttctctatatcctcgccagcatttgttattgcctgtcttttggataaaagccaatttaactggggtgagatgatctctcattgtattgcatttctctgatgatcagtgatgttgagcacctttttatatgcctgtttaacatttgtatgtcttcttttgagaaatgtctattcagatcttttgcccatttaaaaaattggattattagattttttttcttgttgagttgtttgagctccttatatattctggttattaatctcttgtcagatggatagtttgcaaatattttgctcccattccatgagttgtctcttgactgttgatttccttggctgtgtggaagctttttaacttgatgtgaccccatttatttatttttgctttgcttgcctgggcttgtggggaattactcaagaaatttttgcccagaccagcatcttacagagtttttgcaatgttttcttttggtagtttcataatttgaggttttaggtttaaattttcaatccattttgatttgatttttgtatatggcaagagataagggtctagttttgttcttctgcatctggttatccggttctccgagcaccatttattgaagagaccgtcctttccctaaggtatattcttggcacctttgtcaagtgaattcactatagatatatggatttatttctgggttctctattctgttctattggtctatgccagtactatgctgttttgattgctatagctctgtagtataattttaagtcaagtagtgtgattcctccagttttgttcattttcctcaggatagctttgcctatcctgggtcttttgtggttctatataaattttaggatttttttttctatttctgtgaagattgtcattggtattttgataaggattatattgaatcggtagattgctttaggtagtatggacattttaacaatattgattcttccaacccatgaatgtagaatctctttgcatcttttgtgtccttttcaatttctcgcatcaacgttttatagttgtttttttgtgtgtgtgtgtgtgtgtttttttttttagatggaacctcgctctgttgccaggctggagtgcagtggtgcaatctcggctcactgcaacctctgcctcccgggttcaagcgattctcctgcctccggctccctggtatctgggactataggcatgcaccaccacgcccaactaatttttgctttgtttttagtagagacggggttttaccatgttggccatgatggtcttgatctcctgaccttgtgatccacccacctctgcctcccaaagtgctgggattacaggcatgagccactgaacctggcctatagttttcattgtagagacctttcacttctttggttaagtttattcctaggtattttattttattttattttattcatagctattgtaaatgggattattttcttgatatcgtcttcactgttggcatataggaattcccatccattaattaatgatacttcagtttgagtgaccaaaaatccagatttgatcgtatgcctatctttaataacttttgaatgactactcatataaatgttttaaatggttggattttgcttagctctccaaactgatactgtgccagtctatcctttgcattgtatgtatccgccatacttgacatcgttcagattcttgaaacttatgtgcttagtcatatctgcttctgtcttcattcctgattgtctcttagtcattgtttaggtcttggcttaaatgtaaattcctcacataggcattccttaactgtcttcattagattaggctctctgctgtatttttccttaggaccctacacttaactcatcacattttaaatcatttattcattcatctattcagtagatatttaccaagtgcacgcaatttgtctgacactgtttgaagtgctgttgatatagtagtgaacaaaagagactgaacatatttttatgccctcaaggagcttacactatagaaggaaacagatgataaataataaaacatatgttctatgttgaaacataagagaaaaagactgctggaaggtggggctatattcacaattttatatacaggcatgtcttcatatctacaagggattggttccaagacctaccccctcagataccaaaatttgttgatgctcaagtgccttatatgaaatggggtagtgtttgcatatatcctacgctcatccttctgtatactttattttattttttatttttatatatttatttttttgaggtggagtctcactttattgcccaggctagagtgcagtgtcatgatctcggctcactgtaacctccgtccaccctgggttcaagcaattctcccacctcagcctctcaagtagctgggattacaggcatgcaccaccatgcccagctgttttttgtatttttagtagagatgaagtttcaccacgttggccaggctggtcttgaactcctgacctcaagtgattcacctgccttggcctcccaagtgctgggattgcaggtgtgagccactgtgcgcagccctgccgtatactttaaatcatctctagattacttataataccctaaaacaatgtaaatgctatgtaaatagttgtcccactgtgttttaaaatatgcagtattttaattttcctccctttcccttccccttcccctccccttccccttcccctctccttcccctttcccttccccttcccttttttgggtttaatccatggatacagaacccaaggatatagagggccaagtgcatgtttagcagaccatctaaggaagtggcaggacaagtcatgttgctatcctggagaagagcaaagcatattaggcagaaagaataacaagcgcaagattgttggttgaggttgaagtgtacctgctactgaataaacaccgaggaagcatgtgattggaatcatcgagagagacaatttagagataaggtaaaaaaagataatggtgtagtagggagcttagatttttagggccttacaggccatttcagtattaggtaaatgtctccttcctacacggagcgtaagcttctgatggcagggatgctgctctctttattactgtatcacatgcacatggtgcctgacatattgtcagtgcttaagtcaatgctcagtcagtgctcactaggtatttgttgaatgaataatattctaggagataaattttatacatatactcattttatatacgttgccatttagtacatattgtttagtcacatctattagaggcaccaaaagaaaccaaaaaccaagagaaaaaattaaaagacaatagaaacatatccacatatgcttcagatattggaattggctgagataactacgatttatatgctaaagaaatccaaggaaaatatggagaaaatagataagtatataaagaatttcatccgggtatggtggctcatgcctgtaatcccagcactttgggaggccgaggtgggcggatcacctgaggtcaggagttcaagatcagcctgatcaacatggcgaaaccccgtctctactgaaaatacaaaaaatatttgagtgttgtggcaggtgcctgtaatcccagctactcgggaggctgaggcctgagaatcccttgaacctgggaggtggaggttgcagtgagccgagatcacgccattgcactccagcctgggcaacaagagcggaactctgtctaaaaaaaacaagaatttcacaagagaatttgaatctattttaaaaattaaatacaagactgggtgcagtggcttacgcctgtaatcccagcactttgggaggccgaggtgggtggatcatgaggtcaggagttcgagaccagcctggccagcatgatgaaaccccgtctctactaaaaatagaaaaattagctgggcgtggtggtgcgcacctgtaatcccagccactcgggaggctgagtaggagaatcgctggaccacaggaggtggagcttgcagtgagccgagatcatgccactgcaccccagcctgggtgacagagcgagactccatctcaaaaaaaaaaaaattaaatagaaattctgtaactgcaaatatatgaaaataaggactttagatagacttaacattggactcaaccaagcaaaatatagtatccatgttatagcatgtatcagtttttgtgtgtgtgtgtgtgtggctgagtgatattcagttgtatgaatatgcttcttaaaaaaatccacctgaggtcaggagttcaagaccagcctggccaacatggtgaaaccctgtctctactaaaaatacaaaaaaattagttgggcgtggtggcaggcacctgtaatgtcagctacttgggaggctgaggcaggagaatcgctagaaccctgggggcggaggttttttgtgtgtgtgtggctgagtgatattcaattgtatgaatataccacttaaaaaaatccatctgaggtcaggagttcaagaccagcctggccagcatggtgaaatcccgactctactaaaaatagaaaaaaataagctgggcgtggtggcaggccctgtaatgtcagctactcgggaggctgaggcaggagaatcactagaaccctgggggaggaggttgcagtgagctgagatggcaccactgcactccagcctgggcaacagagtaagactctgtctaaaaaaaaaaaaaaatccattcattagttgaaagacatttgggttacattttgaccattgcaattagtattgctacaaatatttgtatgcaagtatttgcttatatatttgtttgttttgagatggtatttcactcttgttgcccaggctggagtgcagtggcgtgatcttgactcactgcaacctctgctgagttcaagtgattctcctgcctcagtctcccaagtagctgggattacaggcacccaccaccatgtctggctatgggttgtttttttttttttttgtatttagcagagacgggttttcaccatgttagactggtcttgaactcctgacctcaggttatccacccgccttggcctcccaaagtgctgggattacaggcgcgtgccactgcgcccagccatatgtctgttttttaagttatttggggtatgtacccaagagtggaattcctgggtcatgtggtaattctttgttcagctttttgaggaactgtcaggcatccaaacctttatgtactcccttcctcttgtataatccactcctcttcaatttgggtagaacctgtgaattgcttctctaactaatagaatatggcaaaggtgatgtgatattactcccttaattaggttgcattatatggcaaaagtgatgggatgtcactgcattcaattacattatgtggcaaagtggttgggtgtcactcttgtgattatgtttcattatatagtacttgatcttaacagactagagaacaagattctttttgctggcttgataaagtaagcagccatattaaggaagcctacttggcagtgaatggtgggcagattctaaggatctatgtaaggacagtctctacccaagagctagcaaaaggctggggtccttcatcatgcagctacaaggacataattctgccaactacctgaaagagcttggcagcaaatttctccccatttgagtctccagtgacaatgcagcctggttcactccctgattgcagccttgcaaacccctgagcagtgtatgatgaaattattattattatttccttatgaggtcttgtcctctttacctttttgttttagacatttgtgtgaatttgggtaggggtttggatgtgtcattatgaaccttgatctactcagcctgaatatttctaccagtataattatatatttttttgatgaggaatgttgcctttttgatatcttcaatttggacttgatttattcccaagaatactgatgtgtcactgtccaaattatttctggcttgatgatgaatggtggagtcctcaagggttcaaggaagagaccatcaggagagtgtttgatctggaaattctgtttacacgggagatttttccttatgaaattagtgaatgtagtgtctcctaggaagggaatgtttcttggctaaaggtccaaaggtgaccgttgtgtgctgggacatgggaaatgtgacgggtattatccatatctgtcaactgagtagtttgttgattccgagggagagcttgtggaacaatggcaggaattaaggtaaatatactgccacccatatcaataaaatttttacttgtttctccgctaataattagtgaaaattcgtcttgtgagttgaagagtaaaaggagaaatgggtacttgatttgctgttagaacatttgcctactatcattttttcccaattctcttgaataaaacagaacaattatttttccattgtaatttcttcttacaatctctgcaggtttctttatcaaaagactggtgtttaatttttggagtgggagcatctagttttatcttcaagggtatcatcttattctgggtcttatactgcctttgttttcaggctcttttgaaatgtgtaatatggagttacattgtttgacaatgtggtgccttcccagccagtttttgcttgtttataacattttctttttctggcttaaggctgttcacaagaagtgaggaaggagctggggtcacaactacttgagggcttactcctgaatgctaactgaaggtagtaagagcccaccctggaagtctgcaaggggcttatccttcgtctgctagaacaactgaattagagttacctgttttcacaggaaagattttggtaatagccttcaaaagaccgtgtccaatatttacagtttcttttttttgtttttgttttttttgagacaagagtctctttctgtcacccaggctggagtgcagtggcgcaatcttggctaactgcaacctccacctcccgggttgaagcagttctcctgcctcagcctcccaagtagctgggaccacatgtctgagccaccatgcctgactaatttttttttttttttttttggtatttctagtagagactgggtttcaccatgttggccgggtcttgaactccttacttcaagtgatccacctgcctcggcctcccaaagtgttgggattacaggcatgtgccaccgcgccccgtcattcacagtttttctaaaccccactggctttctgtgcatttggggtctgaagtcactctcaggatatttgtttcccctttctaataggtcttcctatttccctctccttgctccccactttgtaactatccttggtgaaatgatgccatttataaagagaagaccatgaatttgcattacatatttaatgcatttaaagaaacagaagtctgactctgagagaccacagacttagtctgagccaaactcatgggagtctcctaatggcatattgaatatgttgtttgtgcacctcctgtcttgggctcacagcctaatggttggccatctctaactgcaaacctgacagtgccttgttggtttaagatttggagagactgtctctcctaggcccagacttccatggacaaagcaagtcaagacagaggaaaatactcaaggttcccaggtaaattgtgttctatttggatgatgatctgatgaaaccttctgaactcactggcttctagagtcagcatgaaaatgggcttatgaaacctatgcctgtcttctttcaggtgaactttgacttatggacttagaataaaaaatgttgaggacagtatattagtaatatgggaggtttcttccaatattaaacattttcaaatgtgataagaaattcagtgggtctttattcctacagttgttgaaaaggaaattggacctctacccagtgtgactcatctcaccattgtggttggggagacccctgagggggtcgctcagtgggcctcagagaagcatgcagatgccagatctaagatcttgaactgtggcttttagtgggcttcgaacatgtgtctgtgggtaatacacttggttttgcttgttcaacaggttattttggttatcttcttaggaggctgcatctgaatttgcagcctctgttctagtaaatttggaaaatatggaaaggtagacaggagaaaagaaatctcatcttttcagtttttttccttgtatgcattagatgatttgtaacatcctattacactctcaaatgattgattctcattatctgcactaacgactatttctgaatttgtgacgccacagctgaacctgcaggttatagtttccagataagcatttacaaataatttttaaggaatgtccttttgtttccctgggaaatttttttttttttttttttttgagacggagtctcaccctggagtgcagtggtgcgatctcagctcactgcaacctctgcatcccgggttcaagcaattctcctgcctcagcctcccgagtaattgggattacagacatgaaccaccatgtccagctaattttgcatttttagtagagacagggtttcgccatattggccaggctggtctcaaactcctgacctcaagtgatccacctgccttggctccccaaagtgctaggattataggtgtccaggtgtgagccactgcgcctggtggaaataattttttttgagacagagtctcactctgttgcccagactggagtacagtggcacaatctggactcactccatccccgccccctgggttcaagcgattctcctgcctcagcctccggagtagctgggattacagatatgcgccaccatgcctggctaatttttgtatttttagtaattagtaattttttagtaatttttgtatttttagtagagatgaggtttcaccatgttggccaggctggttttgaactcctgagcttgggtgatccgccctcctcagcctcccaaagtgttgggattagaggtgtgagccaccgtgcctgactggaaataatttttaatactagttttatttttagtttgtttttatttctgatacaagaggctgtacatatttttcttttaaatttggctattaatttaggtttctggtatagtgactccacattcacttggagctacaccattcacatttactagtttagatatattgagtataagattacttttgagagtatctatgcagatagaagtttgctgatggaaataaatagtaccgaattttggaatatcttgggtttttagcaacagtttttcattggcagagtgcatatgccaattacaggtaattctgtcttttaaaaaatgtttagtgttctttaaaattagtctacagtgtttttaagactaaagtcttttccttgataactatattctattttttttccccaagtagtttccaccagttatgatacaattttagtttgttacatttctccttcaaacatttgttcctttcttatttgaatatgtaggatgttacatggagacagtttacccatacccctttaaagcattgtgtgcagtacttcagtggtcttctgcaactcttctttttaatggcttattaatctgtccttgaatcatccttttccttagagagaaactaatgttttaaaatgtaattatcaagtaatcgtttggtatcaagtatttgcctttaacaaatttaattttattcaacatttcattaccttgatctcaggaactggagagcagagtgaaaggcatgcacattaagatattggagacaggaattgggatcacagcttttttttttttaaatcaatgaataacatgccacagatcctgctttcaaagagcttaaagccttctgtgtccggaattggtgggttcttggtctcactgacttcaagaatgaagccgcggaccctcgcggtgagtgttacagctcttaaggtggcgcgtctggagtttgttccttctgatgttgggatgtgttcggagtttcttccttctggtgggttcgtggtcttgctggctcaggagtgaagctgcagacctttgcagtgagcattacagctcttaaggtggcacgtctggagttgttcgttcctcccggtgggcttgtggtctcgctggcttcagcagtgaagctccagaccttcgcggtgagcgttatagctcataaaggcagagtggacccaaagagtgagcagcagcaagatttattgcaaagaactaaagaacaaagcttccacagtgtggaaggggacccgagcgtgttgccactgctggctcgggcagcctgcttttattctcttatccggccccacccacatcctgctgattggtagagcctggtggtctgttttgacagggcactgattggtgcgtttataatccctgagctagacacaaaggttctccacatccccaccagattagctagatacagagtgtcaacacaaaggttctccaagtccccaccagagtagctagatacagagtgtcgattggtgcattcacaaaccctgagctagacacagggtgctgattggtgtatttacaatccctgagctagacataaaggttctccatgtcctcaccagactcaggagcccagctggcttcacccagtggatcccgcaccggggctgcaggtggagctgcctgccagtcccgcgccgtgcgcccgcactcctcagcccttgggtggtcgatgggactgggcaccgtggagcagggggcggcgcacatcagggaggctctggccccacaggagcccagggagggggtgggaggctcaggcatggcgggctgcaggtcccgagccctgcccggcgggaaggcagctaaggctgggcgagaaatcgagcgcagtgctggtgggctggcactgctgggtaacccagtacaccctctgcagctgctggccagggtgctaagtccctcattgcccggggccggcagggccagccggctgctccgagtgcggggcctgccaagcccacgcccacccggaactccagctggcccgcaagcgcagctagcagccctggttcccgctggcgcctctccctccacacctccgtggaagctgagggagctggctctggccttggccagcccagaaaggggctcccacagtgcaggggtgggctgatcaggtccctcaagtgctgccaaagtgggagcgccaagagcgagcgagggctgtgaggactgccagcacgctgtcacctctcacttcttcaggaggactgcaagtattcaggcaattgactacattttgataatgctaagctcaaggcgcaggggcctatgcatataggatgggcatgtaacctagttttaggtatcattgcagattttccaatggaaatgatagctaagtgaaacctcaagtctgagtggtagtgagttagctgaaaagtgagattgatgatggacacagctctaatgtcagtgaaaacatcttattgcaaaagcctggaggtgagagacagtgagaactctggaaaactgcagatttgtagtatgaggggctgcagttagaaagggagctagagagaaaattaggatccagatatgtatgggctggaatgtgatgtaacttattttgaaggctattcttgtggtttggggagcctctgaataatttcatgcagaagagttaacatgacagaattgtggcattagaaaactcattttggtttgttgtgtggaaagtaaattggagcatggcaaaacttgaagttggtagacaaattaggatcctcttctaatccaggatagaaacggtagacccctaaaataaagtattgtatgcaacaaagtagatggtgttgagaaagatagtggaagtggaatccatgggattatgtgatctgttcaatgtcaggtgtgaagtggagggaaggatcattgatgattattttactgcatttggttgtaatacctattaacacaccagtttcagaagaaatttatttaatgtcctttagttctaattgttcgttaagaggaaatagtaatacccgtttacaccacagaacagagtatggccgtgtatttgaatgagttttgtaaattaggcagtgtagatttaaagtagtaattgtttttatcacctaattggccagactttaaaaactgtactcttgctttagcagaaggaggcaaataactaagaaagctagtgtgaaggaaatcatttaaaaaagaccctaaaaacaaaaaccaaaaaattggagacaagctgtgtctcagcaattagaaagtataacattaaacattagtgtatttgtccctgctaaaccaagaataatcagttttcctgatgaagcctcaaaggttttatattttggaaaaaaagactcaattatttttactatgctgtttttacaatgatagaaaagtgtactaaattttagaaagcttttttttttctttgagacgaagagtgtcgctcagtcacccaggctggagtgcagtggcgcgatcttggctcactgaaaagcaccaccttccggtttcaagtgattcttgtgcctcagcctctcaagtagctgagtttacaggtgtgggctgccacacctggctaacttttgtgtttttagtagagatagggttttgccatgttgcccaggcttgtctggaactcctggtctcaagtgatccaccttcacgacctcccaaagtgctggaattgcaggcatgagccactgtgcccggccgaaagatttggaagtatattaaaacagaaagaatcttctgcctgactttgagttaactggattatgtggaagctagaaagccattcctgagcccaggattgtttaaaagtttctgctttactttatatatgaatgcagaatagtttgaggacagcttttagggtacagatataactcttacctgtagtgtcttgaaacaaattattatttttttttaataaacagtcactgattcccttctagaaccagctgtaaactcctaagtggctttcatatgaatgggtagcaggattctcatccacagaatagaaaattaaggattggtaagtaggcagtagcaagtgagaaggatgtctgaatcatgaatggtggtcggcgttgacactaataccactatcaaaatgtatgggtgtttagcatctgggaagaatgattcgaatgtgcctgtctttgttgtagtgttttctgcgcttccttgtgttttgccctgttcaccagcaataccgagttcgtagatcgtctgatccagtgcattataagagaggaagtacatgttttttccagtattgtagcgccagggttagttctatgttatctaggttcagaagatgagtaatgacacaggatataacaagtaaggccaggcagggaaggtaccaacatggtagtttggggtggcgggctgcccattttctcataattactaaccttaattgagtacctactgtgggccaggtgctgttctaatgtgtttcagccttgactaatttcatcttcttaataaccctatgagatagatactgttattatgtccattttacagatgaggaaaccgaataccagagaggcactctagtaactcagtcacagtcacagaagcagtattggagcccaagccttctggcatagcgcctgtgttctttttttctttgagacgaagtcttgctctgtcgcccatactggagtgcagtggcactatcttggctcactgcaacctccgcctcctgagtagctgggattgcaggcatgcgccaccacgcccggctaatttttttgttttttttttggtagagacggggtttcaccatattggccaggctggtcttgaattcctgacctcaggtgatccgcctgcctctgcctcccaaagtgctgggattacaggcaggagccgttgtgcccagcccacacctgagctcttaactgcaaggcttggttaccccacaggccatgttctaggtattaacaaataaatgacatttgcagaaaaggcaccagatttttgttaactcttttcacgttttttctggttagtttttactaccatttagttagtttttgtagcatcatccaccactcccatcatattcacagttaaatagtactttttactgttactattcttgggttgggtgatagagcccacttaatgtgagttgttttgtaatagaggaataagaggaataaaagaaatgggtactggtttgcttggtttctttcccttttctccgtttcttaagctactcttttggcattgtattcttagtactttcctgtaactctttccccatcggtgctcaaaagagttaaatagcttcagaacctgagtgtgccttccctcaggacaagctgggattacagaaagaatggaccaccaggtagtttatcacttagaagaatagaataaaatgatatcattggactcttttttccctacctcctgattggaaaccatcaggaataccatcatctgagcattgttgctgacacatttttaatttttttgtgtactttttgttttctcaattgtattacttgtgatatgaaaataaaactattctaaagacttcaaatgaaaaatttttaagggaaaatgaatagcatcaaatttgttttaacaattctgctgaaatttttatatttgactttttcttttttttttccagacagggtcttgctctttcacccaggctggagtgcagtggtgccatctcggctcactgcaacttctgcctcccgggttcaatcaattcccctgcctcagcccccggagtagctgggattaaaggcgcatgccaccacgcccagctgatttttgtatttttagtaaatatgggatttcaccatgtcggccaggctggtctcgaactcctgacctcagatgatccgcctgcctcagcctcccagagtgctgggattacaggcgtgagccaccatgcctggcatatttgacttttcttccactttggggaggattattatgtaatgtgtcagaaattttcttttaataaattataggatattattgaacattatgttaacagagtttattgttctaagccctttcatattttcatgtattgtgtgtcatgtaatcatagatgtgagagctgtcttaagaatattttaaagagtgttaagaataatcagctccactttttcttcaaatattgccaagctgtatttgtgaagagataatgttgttttgtttaaaatatatttattttatataaataaagaacaaaggctgggcgcggtggctcactcctgtaatcctagcactttgggaggctgaggtgggaggatcacttgaggtcaggagttcgaaaccagcctgccaagatggtgaaaccccatctctactaaaaatacaaaaaaaattagtcatacgtggtggtgtgtgcctataatcccagctacttgggaggctgaggcaggagaatcgtttgaacctgggaggtggaggttgcaatgagcggggatcgctccattgcactccagcctgggtaacacagtgagactctttctcaaaaaaaaaaaaaaaaaagcacaaagtatatttagtaaaataaagtttaaccttttacatttttatgaaataaagtttgatatctatacattgaaatgagctgctttcttttgttttgtattataacttaaacttgtggcttttcaatttgaaaacttattgccatgtagaatttgattttttttttttcctaatgcaacactttacttaaaaattatggagtagaactatattttttagaagagcaggttttacaaaacctaaaattcaaactctggaagttgcatgatgtggtggaagaagtgctggactgagaatcccaaaaatattgggcttggttttgcccaatgccaacagtatttcactgagtgcaccttgttttaaactgaagcaaaactgaagtgtaaaaagtaaagtagaggttcctcttcaaagactttcctccccatctaattaggaataaatagtaacttctcttagaagcaaaatttattctaagacctgtgctaacattcttaaatatctgctagctgtaataaagaaatcaatgtactttatgttctcagctcccacaatttagcctaaatatttgccctggcatgcttatactggtccaagcaagcattaagtcatagcctgttcctcttccttatttgaaggtgtttttacctttctcagtattccacaagttacttcctccttcctttgttctcctctgccgttgcctcttttaaaaagttctatgttgttagccaattgggacaaatacaaaatgtgaggtcctgttccagccaatggaaaccggacacagcagtagggtgggcgcctcaggttataaatgaccctgtctcctttgttcaatgtactctcgtggcaaaactgctggcgaatgtaccctttctgcagaaagtaaacatggccttgctgaggaaattaaatttatgttccagtgctgtttctttacggcactggggaacaagcatttctaacagaagcctgtctggttctgagtccctgccctgaacccctgcctttggatgtcagttaactcacttataaaaccgctgctctggagatgaatagttctgttggcatttgtgagattgtgtcttatcctaacagactaatttttatggaagctgatgcggatagttgtttattcatggaagaaataatgtgttgattgcgttaatttgctaaactctggggatttagtagagagtaagacagctagttgttgccctcatgaaggttaagtgtgaaaagggctgcataattgcagggcgtggtgtatgtgttcatgtggcaatgatacctagccaggtgtgggaggactggaaaggcactctaaagaaagtggcaggctgggcgcggtggctcatgcctgtaatcccagcactttgggaagccgaggtgggcggatcacctgaggtcaggagttagagatcagcctggccaaaaatggtgaaaccctgtctctacttagaatacaaaaattagccgggtgtggtggtgtttgcctgtagtcccagctactcaggaggctaaggcaagagaactacttgaacccaggaggcaaaggttgcagtgagccgaggtcgtgccactgcactccagcctgagtgacagactcccatctcaaaaaaaaaaaaaaagaaagaacgtggcattagctgaaactggaagcatgccaccctggactctgggaggaaatggtcattttcctgtcacccagactactgcctcccagcctgactcttcagatccctcttgcctctcaaagtgttcatttgtttgttcattcattcatttattcttccaacaactgttggttgaataacaactgtgccaggcgtgtgctcgggatttgaaatacctaacttgaaccagctggacaagggtttctgtccttatggagcttacattttaatgggctagggaggtgcagagggtggacagtgcacatcataagtaagcagatgctatgccagaattctccagcctgcaaccagagctagcccttcatttccttgctctgaggctacagttcagtttctctcatgtggctgtgaggcccagccttcccctcgcctctctcttcaggtcccagacactgtttttcactacgcttctatttctaaggtgtcttttcagttaccacgcctgagaaagttttcaggaatctatttttggattagagatcccctgttgtcacatgccctctttaaaacttgtacataacatgcaccacataatcattccttagctgctgtgtggctgtatttaaggtttgtcttttccaccagcctgtaaattacctgttggccaagatgatgtctttcttgttccgtcccgtgtcttcagggcccagaattgggcctattgtaataaaagctggtttggtaaaaggggagagagttactggctgaggctggctgaactgagaaggctgtgcaaggctggggagcctgcctgggccttgggctgcagggtaagatgcaagatgaacaggggtggggctgagactcatgcttaggcggacaggatcaagtattgaaaccagcctagggagttcaaacttggttttgaggcaatgggatgtcatgaaaagcttaagtgattttggggactcctagtttgttttgataacatttaatattctcaaaatcattaataatttgataacttcaggcatggctgatttaatttttaaactatgaaaatatgaagtatgaaattatgattcttatggtaaaaaagttcaacgtgtacctaagagcatacaattttaatttcccttttcctacaacttttaatcctaccttttacatttatttatttatttattcttaaatatagacaaggtcttgcgatgttgcttaagtcagtacagaactcctgggctcaagtggtcttcctgcctgggcctcctgagtagctgggattataggcctgagttaccatgcccggctgtctgtcctacttttgagcagtaaattggtttctgtagctgtctaatgcttaaactttcctgtgcgttcaaatgtgtatttctgtcttaatgtaggtaaggtcatacgctatgtactccaacttgctacccccgcccccagtatatactttattttgcttatttttacagtgtaagagttactctcttaaagcttaattgtcatttgtcattgccttgtatagaaccaaggcatcttggactgtgtaccaaatcccataagatctggccagaacagggccacgccgtccatacctccttatcttgtgctttgctgccacttccttactgtgtttcagctttagctgcctgatattctttccctatgaaattgcttcctcatctaggatttttatatgtgtggttccctctgtctaatgttctttctccctgatctttccatggtagctagctgtttatgtttatgtgtgtgtgtgtatgcgtgtgtgtgtgtgtgtgtgtgtgtgtgtgtgtgtgtgtgtggttttagagacggagtctcactttatttcccaggcaggagtgcagtggcgccatcatggctcactgcagctctgacctcctgggctcatgcaatcctcctgcctcagcctcccaagtagctgggactacaggtcccaccaccacacccagtaatttttgtatttttttgtagagatagagatcttgccatgttgcccaggctagtctcaaactcctaccctcaagtgatcctcccatcttggcctcccaaagtgctgggattacaggtgtgagccactgtgcttggcctggctagatgtctttatccttaggtttaaaattttactccagaagggccctttctgagcagcctgtctgaaacaagttctccctagtattcttgcctgagtactctgtttctatgtaacatttattttagttatcaattgatttgtttattttctgtttctctcattagtttgtaataagctccatgaaggcagaagatgtatttcatgtagtgttgctgggcagatagttattgaattaatgtataagtggttgaataagaacatatagatcaactgcattctttttaaaggctaatatttcattttatggatgtaccagtcctttgttgaaggcttactaaattgtttttcagaatttttttcttattaaaacaccaccaacgaattcaaaataatgaatttctttgtatgtctctctgtgttcactcatgtgggtatatctgtaggatgacttcccaggagtaaaatttcagaacaaaagataacgtgtcctcaaacttttggtagatactgacaatttctttttaaaaagattatcccattttctatgacaccagtaatatgagaagtatttaactttgtcatcctggccattatcagattttaatttgctagaggaaaagtgagatctcattgttttaatttgtatttctgtaattaggagcaaggctgagcacagatattgtgcttctggaactgtttttctgtgagcttttaatttaatcttttgtgatgattgttggtcctttttttagttgattcagagtttgattaaagttttttaaacttatgatgttataggcaacctttacagtgtgatgtcacttagtgccattgaatttggagctatatagggctttttatctcttcaaaagtaattttgtagagcctgataataaaacttcatgttctcaaagaccatattggggctgagtgtataatatttagtagtttattattgaaacagtaatagagattttaatgtccagtgcataataggtcctcagtaaagtatttttggatgaatgagtgacaagtgaaaagttaatttttaaggcagcttgattttatttgaaagttcatttagaagaatctaattttcatagtaagaagacttagcatgctgttaagttgaaagataagcttgctttgtggcatgctatagaagtgttggatttgtggcagtggaatttttaatttgctgtgtcagatatagatatggctttatgtatccatacacacccagctataacatgtatattcaaataagtgacaaaatatgtctaatgaatttttgaattaccttttaaaacttgcctgttagttctctcaagtgatgaactttttacaatagcagtttattttctctcatcacgttggaaagaaatgttaaaagttttcttctaggtttattataatccagtcttcatcagccatcactcttcctgtattttgttcaagaggcactaattgttcgcatttggcaggtttaacacttcctgacagagaggctattaaggggaagtattctccaataactgtcactggctggaacaaagaaccttccaactcaatgtgtggaaaccactaacattcttaaatgacccttttcatggattttcatccctttaagctaaagtttggagaatgtagggtcagcgaaaacagcaacgtgtaataaagcagtaaaccttgattttggaaggcatagggtgggagatatagatttatctctgacttgaaaacaattgttatttggaaaatctcattagcagatgtgactgcttggagtaaaaaaaaaaaaaaacaacttaaaactgatgtcgctttcaggacccctttgaacttaacaagcacctatttgtggagcagactggctaatgaaaggaaattaaatttttctgacaacttcccctgccaacctccttattcaggggatgttattaggtactgaagaactttaaagaagatttttttttattagacataagtgaaccagttataaacatccccccccgcccccttctcggaggattctgacatggttgctctacattttaaacgtattagcttaaaagcttaaaaaacactgggcttcacttcagcattttagtcattttctaaaaattcagtcacacttaccagctgtggtttcaaaacaatattgtcagtctttgtggtagtttagtttgtgtcactgaattacacaaacacacacacacacacacacaccccacacatacccacacacacgaaggaggcttagatttcaacattatctttattgttatttggggaaatgattcagcagtgtcctgtgttggatgtgttaggtgagggttaatgatcagtgaaattacttagattcaagggaagtttttgtcttttcatcttcttagaggtagaagtggcattggttaatatttagcaataactaatccttaaatggataaacttttaccccttactgtttaggaaggtattttctttcttttgctttttggagttttttcctccagtagttggttcgttgaaattaaagtttttttttaatttatgtaacaagatacaattgtagagataaaatatgtacctgaaaaaaaaaaaaaagaaagaaacaatagaaaagaaaaggtaatgcagattaccaaaaggattttttggaacaattcgtaattcctgtaggtactggaaattaactttcatatttctgcaaaatcgatcaactactcccaaacaatagagaatcaactccccctgctgacagaatctaggaaaacatgacacataatattggacagaaacaagctggctgcggacaagctttaatgacctgatttatgattcagtattgattgtaaacatctaaattctgccattaaattccggcaactgcaccaaatcattggcaattctggtagtgcttcctgccagctcatttcaactgctttgagtttcttaatataataatgatgaggtagaatttacattccacttatggtattaattttacatttctctgaatgaaaagggttagaaggtagtaaaattgaacattaaatgaatcggaggagacagtagtgcaatatatgactgccctaaagacattgtgcaatgcctcatgggattaatgttgagtctcatttcctgcttttacaggatgcagaagaagctgtcagaattgcaagggaaattggtaagtccttaaattaactttggtaggatttctgtgtctttcagcagatacggttgagtcaacaggtaataagtaattcccatagagcaaataatactttaatagttttagattttgattacttgttgctctggaagaatgtatcagttgaattgccaaattctattattaaaggagactgtaaagagtaatttgaccttaactatacataactcttttgtaagatgagatcacaggctaattcaaagaaggaattgtcttaagaattctaaagattggatataagtttaatgtcaatttatatgtacatagttgaatgtggtttgttaaaattaagaacatttggattaaaatgaagataccatatgtgacatagttctttaagtttttgccttttgctaagatgttaggtatcaacttaatcttgttagatgggaaagataaaatagatgtgggaaattagaactgaatgatctaaattggaataaaaggtagactggaggagtttttaatggctgttttacatgtacttgtatttgggcagtgtttcccaactttttaatttcttttctttttcttttctttccttttttttttttaagatggagttttgctgtcattgcccaggctggagtgcaatggcacgatctccgctcactgcaacctctgccttccaggttcaagcgattctcctgcctcagcctccctagtagctgggattacaggtgcctgccatcacgcccagctaattttttgtatttttagtagagatggagtttcactatgttggccaggctggtctcgaactcctgacctcaggtgatccacccgcctcagcctcccaaagtgctgggattacaggcgtgagccaccgcccctggctcgcaactttttaattttaaaaatattcttggcggtcatgagaactatttttggtatctgctaattgagaaaatgtgtaagggcatgctattatatggattaacaatattgttaaataactttgcaggtttaataatcaaatcagtaattgtatacatttgacagaaatttgtacagatgagagaaattaggcaatgcttgtagggatcccagcgtcttctcagcattcctgtacgcctcagtccaagcatctcatcgtgccacacgaacatttctgtaggcctgttttctcactaagattatttagatctattttctgcctctagagagcatttgatttggcaaagctcatatagttgtgatatgtagaaatatcttattggtctggaagtgatcacttgtactagtaagcgtgttctttgcaaatgggacagtctaacttagcaggtctttagtgacctgaaaagcagtttggcttattgcacccttgtttgtagttggtactgtctaaattatttgggctttgcccatcattaagtgtgttttgttgtttgctttgcaaaaatctatcttattgatataggtcctggatttaagaccagaccatagaaaatcttattttatctgactacctcatctcttcattttttttttcagaatcattaacatttcaaaaagcctatcagtacttcataggaacatttgctcgactgctaaataaactggactatatagaactgattctgtggtttctttatggagaaaaatcaaaagtttctgttcatggtttgaaatcactggtattcctcattgcctaagaggcatataatatacctactggcttttgaggatagttttctaaaatagtttaattccatcctgtcagacatctttacatttaaaaagctctttttctagttctaggttagatattattatcaacctcattggatataataatactgttattattattattacagtatctacataaaggacaatatttagagaaatttagggaaataaagggattagaagaaaatttacagttacactgcagtgccacattttgaatggtgaattttggacttgcgagcattccctttgtgtaaatagcaggccgtggattgctttgcttcctttatgccttttcttccactttctttctttctttctttctttttttttttttttgagacagacttttcactcttgttgcccaggttggagtgcagtggtgcgatctctgctcactgcaacttctgcctcccgggttcaggtgattctcctgccttcacctcctgagtagctgggattgcaggcacacaccacaatgccagctaatttttttgtatttttagtagagacggggtttcaccatactggccaggctggtctcgaactcctgaccttaggtgatctgcccacctcagcctcccaaagtgccgggattacaggcataagccagtgcacctggccattttccactttcgttataacctgtcacctttaagataaccagctcatcatgatgggcctctgtctaactagttctcatcactttgctttcctccctcaatattttaatgctgtgctttacctccttttcattttttattttttcctactgaagttacctaatctaatctaagtcttttttctttgtacttgggcacatcctttatgactcctttctctttcctgtccttcttctaattcttccccaattactctctcttgcttgtgaaataaatgatagcaatcatggctattaagtataagagtactggtgttttgcttatactgaaagaaagggaaaccataaaatttgaggtaaaataaaccataaagaactagggtcatcagctcttacaaagcttttagaatttctctgaaaatctcttctgaatcacctcagaagcctcgcataaaatcttttccttgaagtgctactttctaaagtaaattaaattatgttttattaaagtctgttggctttctgtgttgtttgatatttcgtaagttttttactactgattttattgagatatatcacattttaactatgattatgattccatgtgaaaatgtgttcctagttctaaacaactgatttataatcaaacctttgaacctatccatttgtaagttgttgattgtccatgtgttatacctattcatagagttctctcttaattctttctgtgttatgtgatgaaaatgaagtttatcctgttttatgtgatttcctcctctctcatgtctttgcttttcttctggaaacattaatctatgctgccaaagtaggaaactcactgtattgagcattgatgaattaagtgccttttacataatggtaactccagtttatggagcatttcttcctaaggccaggcactttggaaatgttgtttctaatgctaattcttgggtttaatcatttttgtttacatttaaggaaactaatgattagaaatggtaagtaatttgctcaaggtcacagaactatcgagtggtggaccctggtttaaatttaggtttatttgactccaaagaccacagactttttattatactgtgtctaaaccaatgggattagaggatggcagctaaaatttgagcgactactttgtgtaaaatactgtaaggtactcaaatgtgttatacatggaattaaagaagcagacagtctcctatccttgatgaggtgagagacagttaagacttaatatgttacttgtatgtatttgttttttggactacctagtttctctcattcttgttcctgattttttactttgacctatctaagttgagagatacagagctattgatcctcagtttgtctttaacctcaatgatagacaacagtaatcagtgagcttgatttccattgaagtttgatctttttactgggccaaaggtccttaatacaatcaagtcaaaattgattcttgaaaggaaaataaattgtgaatctaaaacctgtcctttaacaacttccagattattcagattcttttcctttgcttgtctttctcacaatcacaaatcatgcccaatttaaataaaaacttttttttttgatcctcaggtctaccatactacaaacctacttctcccagaatttccaaatctcaataaatgtcacccctttcagtcaggccaaaactgagtctctcctggatgcctcttttcctcatcatcctgttgtaaatacatcaataggcattgtcagttcatcttatatacactgtcttcattactaccactctcctccaaactacttttgtcttttgcagggactgtggcaatagtttctttacttcatttcttaaacatttcacatagctgacagtgagatatttaaaatctttaaagaacaaggatatatttcatctcatcccagcccatttctgctttaaattctgtaatgactccattgaacttagataaaaatcacaattctttactctgactactatccctatgtaatttgacacctgcttttctctccagtcttattgtatactactcccttctctgcctcccatacttcagtcacattagcttacttgaacacagcaaatttcagggccttaggataagtttttttttttttttaatcttttgcggggtgaagggggatggcaggacctagcagactcttgctgatatcttcacaaaaatagctccttgcagtctttcatatcttagcctaagtatcatgtcttcaagagaagattctctaatactgccacccagtcattctctgtcttataactattttctaaatttctgcatagtattcatgatttgcagattttttttattcataaacttttctccaagtattttattttgaaaaatttcaatcatacggcattttgaaataattgttacggtttatactcgtatacccaacactaagatcccactattaacctttttctagatttgctttaccacttatctgttcatatactaatccattttatttttgttgcatttcagagtaaattgcacaaccagtatatgtcccattaaatacttcaacatgtgttattaattgaattcagtatttgtatacagttttgttattttgatgccaaatttgcacacaatataatgtgaacaaatcttaagtgtgtatttgtggattttgacatatgcatatatatatataacttagaatcccaccaaggtgctgaacatactatttccctggagatttccctcatgatccttccaagtcagttctcgcctaccccctggcctgcaggtaacttgttcagatttttatactaaagattagatttttaaaaattaagataaatttttaatactatacaattcagcctttcaaagtgcacaattcggtgattttttgtgtatttacaaggttgtgtaactgtaatcactatctaatttcagaagatcttcattactccccaaagaaactctgtactcattagtatgtacttcttattttctttccatctagtccctgacaaccattaatttactttgtgtcttgtggatttacttattctggggatatttcatataaataaatggaatcacaacatatgaacttttgtgtctggtttctttcacacagaatagtgtttttaaggttcatccatgttctaccgtttatccctttttacggttggataattttctattgtatgtacatgccacattttgtctgttttttatttttttgagatagggtctcgctcttttacccaggatagagtgcagtggtgtgatcccagctcactgcagctttaatctcctgggctctactaatcctcctgccttaccctcctgagtagctaggactacaggtgtgtgccactatgcctaatttttgtatttttttgtagtgggttttcaccatgttgcctcagttgatcttgaattcctgggctcaagtgatccacccacattggcctcccagagtgctgggattatagacatgagccactgcacctggccttatctatttattcatctattgatggacatttgggttgtttttacctcttggctattgtaaatggtactgctatgaacatttatgtccatgtatttgtttgtatacctgttttcaattattttgggtatattcttcgaagtgaaattgctgggttatatggtaattctatgtgtaacttttggagatactagcaaattattttccatggtggctgtcccattttacatttctaccaagaatatataagggtttcaatctcttcatatccttgccaacccttgttattttctttcttttataaggaaaactattgccatcctagtgtgtgtgtagaataatatcttattgtagcagagggaagaatagattaaaaaaagtgactcaactatatgctgtctataagaaactcactttagatgcagagacacaaataggttgaaagtgaaaggaaggaaaaagatatcccatgtaaatagtaaccaaaagagagctggggtggcatactaatgtcagacaagataaactttaagtccaaaactattctaagagacaaagaagggcattttatattgattaacaattacaaatgtatatgcaccaggaaacatggccctaaaatatttgagataaacattgacggaattgaagggagaaacagactaattctacaatagtagttggagactttaatagcacactataagtaatggatgcaacatctagagagatcagtaagggagggaatagaggacttgaacagcactatatactaattagaccttatggatatataatgaccattctacccaataacaatataaggcacatttttctcaagtaactattaaaagaggaaaggagtgatgattgagttaaaataattgttaaagaaaaagaaaatataataacaaacaggagcaatatctcataaagtgttgcccatgactcgcaatgttcccaagacttagtttgatatagaaatatttttccccgcatgtactgatttatattgatggattgctcttttcttaaaatagtataggattctctgcaatatataaattttatttttctttgcaaatgattgctttatattaatttgattactattttatagtaaaatttttgttgtggtggtggttgttttttgagacagagtctcattctgttgcccaggctggagggcagtggtgtgatctcagctcactgcaacctctgcctcctgggttcaagcgattcatctgccttagcccccacttagctgggactacaggcatgcaccaccacgcctggctaatttttgtatttttaatagatacaaggtttcaccatgttggccagactagtctgaaactcctgacctcaagtgctccccctgccttggcctcccaaagtgctgggattacaagtgtaagccaccacatctggctggttactattttgtagtaaaattgaccatgagttagttttctttgtatttctaatacttaatgcttgttacagagtatatattcagcaagtggttatttggtgaataaatcaaaatgaaatatgtatatatatgtatagaaatgaattaagcaatcacatatttaaagttcttttgtaatatttatagaccagaatttgactataattttctcccttttcccccttaatcttcaattttataatagagatacctggggaaaaaaaggaatattaagcaaaacatgataaactttcagcaaatagataattgaaacaaaatgatctaggattattcaaataaattcagtatatacttgttagtgactactagtcatcaattcttgtaggctgtccttgtgttcattaggctggactaatagaaatttataggaatctaagattcaaatgtatgaaagtcttttactgaaccttattgcctttacaccagcctgttcccatgacatcttatgttctttgaaagtctggctctcccatttgacttattttactattagtcttctgatgtagtgtgtctgccctgtctctgcgtagtgtgtgggggctatatggtagtcctttcttttctgccctggctgtttgcctttgcctattcttctcatcttccttttggcataatacaacatttttttaaaaagttacttttgttgcttatatacaaccaataattcatacttaagagggataaaaatatgtggctaagtcaggaatctttttattttgtctatttcatgcagcttagaaaaattttcacatgttatatatgactctggggttaaggttatatggaagaaacctttgcaaaaacattacaatttataccttcttcacaatcttacatcttgttaatttatttgccaatttcgtcttcaggagaagacatttaatatttaaggagattgaataacgcctaaggaaaagttatgttaaagaaaatggcattaaaataatctatgtgaaatccattaaataatgagatgtatattttgctgttttcctattattgaagtgatgtggtcatttgagattagaatgatattccctgggagacaggaacttgtgttctgtggctttttttcttctttcttttccaatgggtgcttatattttcttttattattccaacatgcacatttgggtttaagcataatttcacaagttctttttctgtcttttactgttaaatttgctgtttctgtctccctttatttctctcagtccttcatcttctttctcttgttttattgttagtcattcgtgaataccatttttttcctttttctattactctgttggaaaaggctgtgcataacattcaggcaggaatgtggaaacacattgtaatgtgaaaaaaacattgctttttttgtttggaaacttcctgtgtgtgaagcgttttgctctaatctgggcactgaaatgcactgatttccgatccctggagcagagttagggatctagtatttttatttgcctaagtagagagaaataggcaggcaaaatcagtttttcctttctctgccaaagaaatagtgtcataaaatagtgtcatgtattggtttgtttagtgtataatacatctggattatatttttgtaggtactgaatattgattcttatttaaatatgtttatatagttatttgtatatatgtgtatgacagactgaggaaaggctgtgtgtgtgtgtgtgtgtgtgtgtgtgtgtgtgtgcgcagtagtagagatgtggataaatcatagactccaacatatatatgtttactagttactggataattacagaccccaaatagtattgatgcaaatgtgcatcacctcagtctgaggtctgccaactcgaatgatactccaaaactaaactgataatgatgaaactaaatataactattttgtgatttaaagagagcaataaaatcagtggaaaattatgatcaaataaaaaatgagtaatgcattgatagtagagtgtatttccccaatttgtttgaatttaaactgtttccttgtttgtatctacagcaggaatttttcagtgttagtcacatggtgcatggcagccaaatttcccagtagattctgaactagattccttggaaaactctagtaatatgctaaatttaattggagtttgtggagttgtcattagttcaccagacctcgactataccacatttttacagcccctctcctgtcactttaaacaacacagatttagtttttcttcattctgtgtgttcaattctcattcgtcaggttgtagggtgagaaggaggcattttgttctatgctatccttattcagtggctaaggctgatggagtttccaccatctgcaatgtcatagattacagaggcaggacacagaaaagcctcagttttggtaatcatcaataagacattcttcatgacaaggtgtttactattatatctcattgtgtggctttgaaatttgcagattgtcaccaccatctcctaaatatttcttgaatttatctacttctctgcatttctgttgctattctctttgtttaaggtagtgtcatcccttgcctacatcactgtaacagcttttgaaatgtactcctcttatcatagcttgtaatcccttggaggtagactctggaagcttattgggggaaataattttgggaccaatacctgagggggaatgaaggaaactgagccaagggaaaagttgaattgattctctctcaacaaagccatcagctaataatttagagagctgtgaatatttgttggtcttttttagttgttccaagttcgggcaagaggattcagcctttatacacctgtatcaactatctagggggtgtgggctgcccctaggaaggggcatgaccttaggcagaaagccgaggacaagtcagcttttggttgacaatacttacaacagttggggcaatgtcctgaactagggatctgggcagaaaactgtacttaataactttgagatatatttttcatgattgttcatttctaagtaatttcagatttctgctatgattttgactcatatgttatttggtgatgtattttaattctttaattttttgagatagagtcttgctctgtcattgaggctggagtgcagtggtgtgatcacggctcactgtagcctcaacctcctaggctcaagcgatcctcccacctcagccactggagtagctgggactacaggcacatgccaccacttttggctaatttttgttgttgttgttgtttttgtattttttgtagagacagggttttgccatgttgcccaggctggtctcaaattcctgggctctactgatcctcctgctttggcctcccaaagtgctagaattacaagtgtgagccaccatgccaagcctagtgatatatttctaaataactgaaaaaaaaatagttttttattattattgatttctaacttaattgctttgtggtcagagagtatcatgtttttcatttaaaaatctttcagatttgatgaaaattgctttatggctaaggaataagtcactctgatacatattctgtatgttcctgaaaagagtgtatattctcaaattattatatgcaatgtcttatagaaaactcaagaggtcaaacctacctattgggatattcaaaacttctagtgagtttttttttttttttttaattaagacaatggagtctcactctgtcacccaggctagagtgcaatggtgcgatcttggctcaatgcaacctccgcctcccgggttcaagtgattctcctgtctcagcctcctgagtagctgggattacaggcacccaccaccatgcccgaccaagttttatagtttagtagagatggggtttcaccatgttggccaggctggtctcgaactcctgacctcgggtcatccgcccaccttggcctcccaaagtgctgagattacaggcataagccactgcgcccagcctgtgtgggttttttttttttttttttttgagacagagtctcactctgtcgcccagacgggagtacagtggcatgatctcggctcactgcaagctcccctcccaggttcacaccgttctcttgcctcagcctcccaagtagttgggactacaggtgcctgcctccacgcccggctaattttttgtattttcagtagagacgaggtttcaccatattagccaggatggtcttgatctcctgagctcatgatctgcccgcctctgcctcccaaagtgctgggattacaggtgtgagccaccgtgcccggccttttttttttttttttgagacaaagtctcgctctgtcacctaggctggagtgcattggcacaatctgggctcactgcaacctctgcctcccgggttcaagcaattctcctgcctcagcctcccgagtagctgtgactacaggtgcctgccaccacacctggctaatttttttgtatttttagtagagatgaggtttcaccatgttggccaggctggtctcggactcctaaccttaagtaatccgcccacctcggcctcccaaagtgctgggattataggcatgagtcaccacatccagcctttttgtgatgtttttggatatctgatggacctatatttgaaaaagtgattttccaatttttccttgctcgttaggttttgtccctgtttagataataggtgtattacagtgtatcgtgtttccttggctatcaaaacataatgaccaatttttgttttcaagtctaattatgatattaatattcctaaacaagcttatttttgttttatccttgtatcattctttatctttttcatctgccagtgaactgttgttttaggtgtgtctcttgtaagtgcacatctaaatttggactggatttttattttattgtttttctattcagcctgctggagcttgtcttttagctggagagtttagtccatttatatttattgtatttaaaattatattttgatttatttatataatctactttttgggggttttgtttgttccattctttggattctgttttctttcttggcttctttttgatgacgactttaaaaaaaatgtctcttgttcttattttatgtccccttcccattcctccctccactatgttggaaattttatactctatttctattgtttcagtgcttgctatagaaatttcaacttggagacattccttcaggtgtccttcatctttggcaacatttagtgttgtcagtgttttggattttagccattctaataggcacatagtagtatctcatagtttcagtttgcagttccctcatgacatataatattgagcatcttttcatgctattatttgctatctgtgtttcttttttattgagatgtctcttcaaatcttttgttaatttttcaattgggtggtttgtttcctggttgagttttaagagctctgtgtattttggatacaagttctttcttaggtatgggttttgtaaatattttctcccagtctagaacttatgtctttattctttttttttgagatggagtctcactcttgttgcccaggctggagtgcagtggcgcgagcttggctcactgcaacctccgcctcccgggttcaagtgatcctcctgcctcagcctcctgagtagctgggattatgggcacccgccaccacgcctggctaattttttttttttgtacttgtagtagagatggggttttgccatgttggccaggctggtctcgaacccctgacctcaggtgatctgcccacctcggcctcccaaagtgctgggattacaggcatcagccaccatgcccggctgtgtctttattcttttaagaatgttatttgggctgcagaaatttttattttaatgaagttaaatgtgccaatttttaatggtttgtgcttttggtgttatatgtaaaaactcattgctaaaccaaagtcacctagatgttcttctattttttctctagaaattttatagttctgcaatgtatatttaggtctgagatccattttgagttaatttttgtgaaaggtataaggattgtggcaagattaattttcttgcataatgaatatccagttattccagtaccctttgtttggaaagactatctgcatttaattgccattgcttctttgtcatagttcagttgactgtatttgtgtgggtctacttctgggctcttgagtaatttgtctgtcttagacaataccatactgtcttgatgtctgtagctttatagtaagtcttgaagttgggtattgttagtcttttgaatttgttctttttcttcaatattgtgatgcctattctgggtcttttcctttccatataaactttagaatcagtttgtggatatctacaaaataaattgctaggactttgattttaattgtgttcaacctatagatcacgttgaggaggattgatatcttaacaatattgaatcttcctatccatgtacattgattatctctacatttagattttcatccatttctttcgtcagagttttgtagttttcctcatagatacactgtatgtattttaagattcatgcctattttatttctttagtgctaatgtaaatgtcactattttaatttcaaattccagttgttcactgctggtatataggaatgtgataatcttttgtatattaatttgtattctgtaaccttactataattgcttatcagttccaagaattttgttgttattgctgatttttttggaattccttcatagacagtcatcttatccactagtgaagacagttctatttattcctttccagtctgtttactctttatttccttttcttaacatacttcataagctggaatctgcagtcagatgttgaataagagttgtaagaggggacattcttgtatttttcctgatttttgggagaaggcatccagtttcttgtcattaagtgtaatgttaactgtaggctttttgtgtatattctttatcaagtacaagaaatttctctttattcctagtttgctaaactcagtgattgttgatttttgttaaatgctttttctgcatctatttatatgatcataggatttttcttctttagcctgttaatgtgatggattacattaattgatttttggatgttgaatcagctttgcataccaggattaaatcccatttggtcatggtatataattctttttatatattattggattttttagtcattttaatatctaaaaacttaattttaaaatgtttgcttttttcttatttatctcatcatgtttatttttttctccaaatcattttacctgtttgtaatagctgtaacttataatagtatttgtaacaactgttttaagagtcttcatttctgggtttctttctgtcagctattttccttctgatatgaatcacattttgcatctttacctatctcttaattgttgattggattctagacattgtaaatgttacattgtgtgtttggattttgttacctttatttaaaaggtatagatgtttagtctggcaggtacattaattttgtttaggttaaggccttttaggctttaaaaaagttttcttagggcaagtctagcatagtcctttctcgtgttctgattaaacaagcttgtattatgctgtctctctacccgtcacacttcctgtcctttggttcataatttctatttcattatacgtctatggttttttcgtagtataatgtaaacccatgaaagatgtaggcaggagagagatataatagtatatataccttaagaaaatttcactgaccactatgtggcttggatgggggcaactgtagtagtggggagttctgctagtaggccagtacaagagtcctggactgctggtagtttgtgtaagtattatgattaagtattatgataactgagataaagaaaagtgaatagatttgatctttttaaataaagaatttataagagtttcatactatccagcagttgtgctcttacacatagatccaggaagctcatatacaaagttccagacaacaagtacaaaaatattcaaaggaccattgttatataaatagaacaggttacagtctgaatgttcattcacagtggaatggataatgctgcagtatgtttgtaggtgacatagattacagcagtaaaaataatgacttacagctgctcagattaactaatagatttacttagtaactcttactttgcatgttattctttaggcagtttcagccactgcagaaacaacaaagaagacaggcaaagatctttgtctttatgtttttttaatcattgtgcagtgaacaatgtagatattgactaaagcaagaatcattaaagttcatttttaataatgggtgaaaattgtttggatataggatcatcacagtttcaaagtatcaatctacagattatttgctaagaaaaaatggcatactttctgtgaggaaatttaatggatgccatcttaagtaatcaagctttatcagtttgggataaattgactttttattttacttttgatgcgatggaagaactcgaggatacaatatcaactatgttgtatttaagatttgttaaacatcttgaatttaatgagtgaataatcaggtatattcaaattgtggaatattctatcaaacaaccaccctgggttcttcagaaatatcatggtcatgaagaactccccccgccatcagcacaaaacaacaaacacaaacccacactttcccttctggggaggctgagggggttcaaaaggcaagtgaactactttacattagaggagcacaaagaaacgaaacaaagcaatgcgtactatctatgtaattctcatgagcaactttcatctggggatttccttcctttctgtcctagttctttctcggagtggggtgtcttttctcttctgaggtcctattacccatatcagggcctattctatccatctagaggactgttcaacttcctgaaatatcttttgttttctttttaccttggacctttccttgaggaaacaaaggccttgtagttaattataggtgttttgcaattggttatttaaagaagatccccattccccatcacatctccttgattcatgagagatttctgattagtaccgctggattaggaataagacattttctaagaaatacttttcttttcccttctttttatttttcctttcccattagtatattctatgaaattttaattcaagaaattgtaggtgagaaaaccacataagattctttattatacagcgtaccactgttgcatcaatagggtgtcattttatcagcttttaagttaccaggttgtgctaccatgtgtggcttgggttttgcttgaaaagtaaggttatttattgtgtcttgagtaggtaaatgtgacattatcagttggtcaaaaaagataattctttttaacttggaatccataactaaatggaaaatctcctaagctcctagaatcttccttcattcatccccttatcttccacatccaaactgtcgctaactctagtctttgtctttctctctatctctgttgctagctggactgctgcaaaggcttcctcatcagctccttgtttctacctttgccctttcaccattcattcattgcacagcagccaaagtgatcttttaaaatgctgtattaggtacttccctttcctgtatcacaccttccaacttgttccttctgtctggactcatcccccctcactgattttcagagtgctcgctctatcttgtcattaggttctcagtttaaatactagttttctcagagaagcattttcaaggagcagtaaccctgtcactctcagttacatttattccctccgtgttatagcagtcatcactatcttacattgtgtataagacatacatgcacttatttatttatattaatatgtgtatatacataaagaaatactgcagccttgacctcctgggcccaagctgtccccccagctcagcctcccaagtagccgggattagaggtgtgagccactccacccgactcagacatatatttagatgcatgtatgtttgtatatcattgtctgctagatagcagggagttttctgaatcgttggcctttgtagcctgcagagagccagataaggcttatagtgtatattcagtaaacattttttaaactgatgaatacaaatttgatagtagagttagaaagaaggctgcttgctttgtggtagaaagtaagacgcactggtagctgggaggtgagggacccagagaagatgtcctgtcctgcacttaaacctgcccttgaaaactgagtccagaaaagtagcaatggaaactttgtagtactttgctaacctaagtttctgtattttcttcgtatattttgtcatatagtattagtagatttcttttcggaagcattagtgcctcttttattgtgcagaagagaataaggagtggagactgtctctgtgttggaggttcagtgtcagtaggggagtcacttctgtgtctggggtgaggtaaggtagtagcagtaagcatcccatgagaggacctggaaggtgaggaaaaacttgggaagggcactagagcctgatttttttttttttttttttaaagcagtctcttctactaggactttcacctccttttacgagtagaatttgtattttgttatgctctgtgtattagtccattctcacactgctaataaatacatacctgagactgggtagtgtataaagaaaaagaggtttaatgggctcacagttacacatggctggggaggcctcacgatcatggtggacggtgaattaagagcaaagtcatgtcttaacatggcaccaggcaagaagagaatgagtgccagcaggggaaataccagacacttacgaaaccatcagatctcatgagaactcactcactatcacgaggacagtgtggggaaaaccgccctcatgattcagtcacctcccgccaggtccctcccacagcacatggggattattacatttcaagatgagatttgggtggggacacagagccaacgcttatcattctgtttcaaacatatgtcagctgaagaatacaaaattaaacaaatacagtatagacaagagtcaagcacagaagtaagtgctccagtggatgagaaaatgtgagagaacattagtggaaatttcatgtccagatgaggtgaggggtaacaagtaccatcaacttgatcatttctgatttttccaggaatgccaacttttgactaaatatttttttccttccacttcccatttacttatcttaattagagtggcagggacacaagaaagtagggatgagggactgaactgttggatattatttaacattatctgtgtggattattcttttccctcctcttcagatttctaagtattgtttctccatggtgtggtgacagcatatgtactgcctgaaatcgatttggcataagaagttgagtagaaaaccttactgttacattatttcagaatatagctcaatggttaaattaagagttagtatcagccaggttcagtggcttatgcctgtaatcccagcactttgggaggccaaagcgggaggattgcttaaggccaggagttccagaccaatgtgggcaatataatgagacccccatctttaaaaaaaaaaaaaagaaaattagctgggtgtgttggggtgcacctgttgtcccagttactgaggaggctgaggtgggagggttgcttgagtctaagaggtcaaggctgcagtgagccaagatcacactctgcactctagcctgggtgacagagcgagaccaaaaacaaaaaagctagtctaacttgcatcagtttcttccttcctcccaacatttttctgtttggcttgtgagattttggtcagggaatcttgccttcctgggttacatgtattcacaggtctaatgctgtgatgccagcagcactgggagaccacaatgccttattatatattgtcctattctctaatgacttcccaccttttctgagcatctgataattttttgttgataaattgttttatgtatcttgtttccccagcttgttccttgtgagcaagaatgatttccatgtcatattttgaaattcacaaatcactgtatagtccagggtccttagtaaatgactaaaatgcgattagtactggaaccagaaaaactgcaaatttcctaatcgtcagagggaactgaatgtagtggagatgtgggctgtctctcagctcttgtggcttcctgttacatggataaatggtttgtgatgatgcattgataaaatatttttttgagaggatgggggtaaggatctattaagttgttgtaaacagggttttgcaggtataccagtttcaaatttttagattgcgctttttcactcccgtaaaacaggctaattcttctctactgatttcattctgattattttatgcttgttattgtgaatgagacaaataccattcttgccattctcatgcaggattaaaactcgtgcataatctcttgcagaatcaagaatcaaagcatgcacaatcttctatgctttgtccccatctatgttttctattgtgttttcccctaccatcctgcagataactctgtacttcaactgaattgtttcagtcattccttaaacttgtcctataatctccacctctgttttccccactattcctgcctgaaatgttcaagtcctgctcattcttcatagcatcatttaaatagccctttcttttttttcttctttggaaacggagtcttgcgctggagtgcagtggcgtaatcttggctcactgcaatctccgcctcccaggttcaagcgattctcttgcctcagcctctgagtagctgggactacagacgcacaccaccacacccagctaagttttgtatttttagtagagacggagtttcaccatgttggccaggatggtcttaatctcctgacctcgtaattcgcccacctcagcctcccaaagtgctgggattacagacatgagccactgtgcccagcctaaatggcccttctgataatacacttttcttaattatttttctctctacctccctgtgatcctttctgttttgaattgccagtgatagaactatttgggtcctttgcttttctcttcttggatttgaaggctcccagtgtaagagcatgttctttatctgtcttctcagtgcactgagcattgtttcaaaaataccagcccatataaacatcatgaacagaaaaaaattttaattgaattaattataaaacgcttaggaagcaggtgccattttaactaagttgaagttaaagagtgatgttttgtggtttggggttcaaaaggtctatgacatttggccttctcttcccttttcctctaaggatcctatagcttgagttgagtgccagtagagcattacaggccaggaaggatcctgtaagggctcactgagctcttttttcttcagaaaagatcataaacaaatggtcccaaacataggagtatctctaccttgtttttagaaaacatctaaagaaggagacttgtacacttttcttgataaatcgttgtaaatgactcttgctgtcagaagttttactgtataataactaaatacttaatcatgtaactgatgacaattttatgagtttaaaactttagctggaagtgtgctttgttttgaccttactttgtattttcataacaccctgttaatgtacggaacagtggaatagcttctccattgataccagtgagccctggagcttctgctccagcccatagcatcgtagccaggtttggattttccccaataccatcatgtcacttcttgctaataaaagctgtaggggttgtctgtgactcttcagatgaaaataccttaagtacctgaaaatcaccatttttgaaaaaagggaatttgttatgcatgcaaacctcagttttggagatgtttcctggtgctattataagttgtttcttatatctttgattacttaatactgtacttctgtttttggaatccactgttaatttatgtgtgttttcttagcttttattactggggaaagtgttatgtttattggtacaagtacccttttttcttttaaaatggtcacactctcattttttaaatacatcattacactggtgttactttcctggtgttattttcctgactctaaagaaaggaacttttaaataaattaattattgttttctgcgttattgaacatgtggtcaattgtcatgttcatacatcccaatgatcaaagtctgaacttctgtctaattcttccctgctgttaggctaccctgtcatgatcaaggcctcagcaggtggtggtgggaaaggcatgcgcattgcttgggatgatgaagagaccaggtgagaggctgtccaaaatatacttttgatgaaaattgcagttaccagagttttattaaactgacaggtaaacagataccaaaagcataatggagtaattacagtaaccatctaatttttacacttttgaatgggaaaaagattgaaattatgtggaaaccttccttatttatattttgatgatgattatcttattatagaaagggttttactgttttaaacattaacaaaggattttctttttgtttttaccgtatatttttaaaaattacagtcaggattctattttctgggcataaattactaacatttggctatataattctaaatgtcatctaaagatttaaatcaactatatttaaaagcagttataatttcattgagacttaatgtattacctcaatatgtagttgctttcctttgctagtgcataaaagtagtgaattactttgataattttagagtgtgaaatatattctttttccttgagtttgaaattactgtgtcctttatatggaatgcgctcttattataatttagaatactttttatggcccaatctcagaagttacacaggtttccctccagtgaacacagcttctgctcaaattcaaggggaggggactgagtcttcacttcttcatgagagcgtgggcaagattcttagaagagcacgtggaatgggagatactgttgtggccatctttggaaaagacaatctgccacagcccgttttgtgggaaagaatggtatcataaagaagtcgaatacaacttaatggttttgcaagagatgtgtattttgtggacttcaatttttttctcattgtttttctgttttgcacagtacttacatagcaatttcactgaacgcttagcgcttatttttcattattcatcttaggatctcaggtttcttatcagtcatttctccagggctactgttagtaacttactcttttatggtgcggattactctttatagtttcttggaagtgaggtttgctgtgctgctgttgatttataaattttaatttacagcttaatattttgagaaatcactatatccattcatatattaggcatcattttgtaaataatttagccctttcttgccaagtaaatagcacattgattcaaaatatgtttataaaattaataaaaatacatgaataattttctacttaaaatattactctcttcagcttgataaataaaccatctcagaaaacttgttgagatcaacacaggcgtgcctattagatttaataatacaagctcctcattttaagaagttgctctatgtcccttatttatttgggaaagtcaaaactacctaaaaagggaaagaacagtactgcaaacatgcctatgcttgtcttttggagccactaaccgtgaacaccataccacaacttatccaccccttcttttcctctctccctctcgaggaagtaattggtttttacataatccacaaagatttcatttttcaggtacaaaggaaaatttggtagcttaattactttattcctttatcctaaggggtgtctttttcttgtaacatctttcctatgttttttggggggaagtagcatctatgacttgtcttggaatctgtaggacatctgaaagattttttttaaaaatgtaatggtttttttttttttttttttttttgagacagagtctctctctgtcgcccaggctggagtgaagtagcacgatcttggctcactgcaatatccgcctcctgggttcaagtgattctcctgcctcagcctcccgagtagctgggactacagctgcacgccaccacacccagctaatttttgtatttttagtagagacggggtttcaccatgttggccaggatggtctcgatctcttgacatcatgatctgcctgcctcggcctcccaaagtgctgggattacaggcgtgcaccactgcgcccaacctttattatatagtaaatttgggtgagaattatgaagattgttgaaggttcacttagatattttcatagtaatctctggctttcttttccctattcaagtttaaatgaagcgtatggcatgattgggaaactgattgtgtctatatttttgaatatccccactaagacttttggcattgtgagtgcaatttctgttttatttttgtattcctagcatctaaaatatatccaggcacaaagttcagtaaatacttattgaatgaatgtataattgaatgtcaccagtgatattcataatagagtttcccatgagttctaaaataggttgttggcgatgctttcaaacttgctgcttattttattttggtgactttgactttttacttgtggtgttctgggtttaaatgcaaaatgaaagatctcaatcattatagtggaggcaaactgtaaagtgctatattttttctttctgttattatatccaatctaataaaaagttgattatatggtatcgaaaactaattcattttgcttccagtttctttgaagtttgcagcctcctaagattcccctaaatcaacaatgtaatggaggactttattcccctaaatcaacaatgtgatggaggactgagaaaacctaataccttttctctgagacctctgagaaatgagttttttgcaatgttttgaaatttgtcttctagtcagttttacctgcagtgttgtacaaaaacaagcaaattagttgtgtgtgtgtgtgtgtgtttttttttttttttttgagatggagtctcgctctgttgtccaggctggagtgcagtggtgcgatctcggctcactgcaacctctgccttttgggttcaagcgattctcctgcctcagcctcccaagtagctgggactacaggcgcacactgccacgcctggctaattttttgtattttagtagagacagggtttcaccgtgttgcccaggctggtctctaactcctgagctcaggcaatccacccgcctcagcctcccaaagtgcttggattacaggtgtgagccactgcacttggccacaaattagttgtttccaatattactaggtggactgtaggattaaatgatattattttaaagttgtaataattaaaacgcatcttaagtgtaccaacctggattactatatgacaaggattatcattaaatttttctattagtagtctgtcatcgccaaaactagaagcagcttttgagatgaaaaaccatcctttaaaaaaaaaaaaaaggaagaacggtcagactaacaaaacaaatagagcaatagggctgacatcattaaagaaaacacaaaacaagcaaatcagatagttgttttttatattactagatggaccatttgcaacttaaaggactggaagaatttggtttcagtattgtacattaaatacagacatttagtcttcagattaagaaactttattaaatataaaaggaattaaagcacaaaaataagcaaattggatagttatttctaatattagtagatggaccatttgcctcttaaaggatcggaagaattggctttaatgttgtacattaaatacaggtatttaatcttcagattaagaaactttattaaatgtaaaggaattaaattttatatgctgattatatcaatggatagaaggcaatatatgctcaattacttttaggcaagcaagtttgggttttttttttaattgttttttcttttcttttttttttgagatggagtctcactgtcacccaggctgtagtgcagtgacataatttctgcccaccgtagcctctgcttcccaggttcaagcggttctcctgcttcagtctcctgagtagctgggactacaggcatgggccaccacaaccagctaatttttgtatttttagtactgatgggatttcatcatgttggccaggctggtctcgaacttctgacctcagggaagccactgtgcccacccaagtttgcgttttgaaaagattggtcaaatgagccctaaatatttgaataataggcatattttaatagtaatgatttaaattagtttgtaaacaaaatatataaagcaataattaggtccatatttttattttaaaaaactatacttttataattactatttttgatcaattttatagaagataaaattgtaatgatctgtgtgggtgtatgtgggaggcaactgcatttcaagatgtggatttaaaatattaagcagtgttcttaagaatcttcctgttggatgttcaatctcaatgagtgtatttgctgtagttccactccagtcatgcaggtgactagaccctttacatttttctttgcatcttctgacttctgaatcaaacagatgtttttttatatttttgctagtggaattaaggtatattatggttgaagaaatggaattaattttacttgctctgtatggtttattaaaatatcatatttaggctgggcactgtggctcacacctgtaatcccagcactttgggaggctgaggcaggtggatcaccttaggtcaggagttcaagaccatcctggccaacgtgttgaaaccctgtctctaccaaaaatataaaaattagccgggcgtggtggcacacacctgtattcccagctactcgggaggctgaggtggaagattcacttgaaacccggcaggcagaggttgcagtgagctgagatcctgccactgcactccagcctgggcgacagagtgagactctgtctcaaaaaaaaaaaaagtgatacttagcagttggtaaagtatcggcattcctgtttcaatggaaaatctaggatctgagaagttaaataactcatccatggtcacagagttagtgagtggaaaagtcacaggtcaaccaaaattaacttagttatttgtatattgagtaaaggtttttgcttttttcagaataagccaaaataaatatttaatcgattgtgttttcttttataatgatagctctatttgttttgttagtctgactcttcttctccttcttccccttccccttcccctccctctccccccctcctccttcttccttctttttttcacagggatggttttagattgtcatctcaagaagctgcttctagttttggcgatgatagactactaatagaaaaatttattgataatcctcgtcatatagaaatccaggttggtacatttaagatgctttttcattattattttaaaataatatcatttaatcctattggaattatcttttcttccatttagaatgattgtgagttgtgcctttagaatctgttgtactttccgttaaagtgctaggatgttggttgggattgggaatgatacaaaaatctacctccaaaaaatgcattcctaagatagccgaccaggctaatctccttccaagactggaccattatagggcattttttaaaaaagaaaagtgcctgacctggactcctgtgctacttcagtttaccaaatgtccgtgtagcttgctgtgacaggtgttctgctaggagcttgttgtatagagatctgtaaatcatttcttctattcagtttaagatattcatccttaaagtggttacgtaggggcatagattttggcaaaacaaaatgggttttctaaaataaaacggggaagaagacaagtctgttgaagttttcatttgcctgttgaaaatgccttcatgctaattttatacattatgactatgaattgatatgtaatagctaaaattgataaaaacaaatgtcaaattagaaataatgaattttaagtatttttttaaatcttaatttggtgtggagagggaaccagataaataaaaggttatttgctgaccttatattttctgacaggggcatgatacaaaaagtcctagattctgtcagtttattccttaagtttaatggtcactttcatagatattatttatgggtggaaaatcatcatttcaatcctcaaattttctaaagtgagaaaaaatatccaaacttatataatcagttggatgttttacaacattgaacacagtttctttctgaggctagcaggctttgttttttgcctttttaaaaagattttctaaattgatatatcacatataatatctgtatatcatatatacggtatctgtatatcatatatacagtatctgtatatcatatatatggtatctgtatatcgtatatatatatatggtatctgtatatcgtatatatatggtatctgtatgtcatagatacagtatctgtatgtcatagatacggtatctgtatgtcatatatacggtatctgtatgtcatatatacggtatctgtatgtcatatatacggtatctgtatatcgtatatatacggtatctgtatatcgtatatatacggtatctgtatatcgtatatatacggtatctgtatatcgtatatatacggtatctgtatatcgtatatatacggtatctgtatatcgtatatatatggtatctgtatatcgtatatatatggtatctgtatatcgtatatatgtgatatctgtatatcatatatgtgatatctgtatctcatatatatgtgatatctgtatatcatatatatgtgatatctgtatctcatatatatgtatatatatatacagtgaaatccataaatcttaagtgtgcaattgaagacaatttctatacacacacatctaattgtgtaacaaccatccaggtctagatagagaatgtcccatcacaccacttcctagtcagtccctacctgtggccgccaaaagtaactgctgttcctatctgatgtcagagattagttcttaaattgcataaatgaaatccagtgatatagtctgtcacgtcttctttttcacacatcatcatatctttgagattcttccctgaggctctgttgtcctttgcttctaagaattgctctgtgatctcccattatttgactcacctgcagtttatccatattgttgttgatggatctttgggtttttagtttctttatattagaaataaattgctgtgtctttttatgaacatatatacatctctaggatagactgaggagaggtattgttggattacatagtaaggttatttttagttttagtgggtactctggttgtgctaatgtatactcccaccagaaatacatgagagtttccattgatgccacccctgccaacgtgtgatattttcaatttttgaaaacatttaaccatattagtggacttacgatggtatgtctgtttaatttgcatttcctggatgagtaatgatgttaagcatctgtttataagtttattgaccatttgaatggcttattttgtgaagtgacttctcaaactttcatccttgccttcctttttcaaattagatttttaaaaattactggagtgtccgagttctgtatcaattttgtttatgagtcctttgtcagatgtatgtatagtgtatccttctcccttcatgcggcttgcctgttcactttgataataatgtctttcaaagaacagaagttctgaattatagtgaagtcaagtttaagtctactttgtgtaccctagttaggagtttttttgttttaggtatgatatttaagtctgttactctcctttacttattattattttgtttgtttgatgtgaggcagggtcagagtaatttttaaaattctgatatccactttttccagcatcatttattgcagtgaccttttgttgcatattaagtgagacttcgtcattgtcttaactattttgcttttataataaatctagaaacctgattctgtaagtgatctaaatgtattgtttttctgcagatagttttcattctctttaggttctttgaatttccgtgaaaagtttagacttcacctgtcaacctgttccccctacggacacctacgcctacacccacccactcccacctctacctccactcccacacaccccatctgatgggagatttgtatttgggtcgtattgaatctagagattattctggggagaattgacatcttaacaatgttgaattttctttcttccctctctccctccctccttcgctccctccctccttctttctgacagaattttactctctctcccaggctagaattctggatattttgtgaaggtagaccagattttctaatagatggatgttatgtacaagaaaaaaaaataaggtgattttagggttttggcctaagaaatgagaagaatggagtgggcttttactgagataggaaagactgtgagatgtgcttgtttttgagggaggaaatcaggttataaagttggataaatcaaggttgaaatgcccattagatatctaagtgtagatgttgagtagacagttggctatttaaatctgtaatttaagggagatatttagattgtccttcttgtaagatcgtaggggcagaattaattttgtccttcactgtattccccatctagcacttgttcacactactggaagaccacttaggtaggctgttttatctttaactagttgaatttcgtaacaggccatgaggtccttaagggtagagagtaggtcttactcatttgctgtccccagcaaccagaccattgtctttgacattactaatactcaataaatgtttgttattttgtgttaaataattacatacctagatcagctttttagtttattttatttagccatggcatacagcctgggtgatatttttaaacataagtgaaaatgcctcccagttaataggccacacagatgttctcatatctcatctatacttagaagggtttttaatttacttttctttagttttcacttatttatattaagtaatttatgcacatgataaagggtaattaataaaaagtaagcatcccttttactctattctaagtcctctagtttctgtccctaaatgcaggcaccgttactgtttcttggctattcctccatacatagtctaagaagtatatgtgtgtatgtcacctattatttttcacatgagccattatatactatgtcctttccacaatgaaactgcactggtagtgtgaatggcacctctctttgtggcataaaccagtatttctcaaccagggcactactggcatttcctgggttgggtctagggataccaacaggcttgcattatgtgacattgtctattataataaagctttttcaggaagcagtatagcttagagatttttctacattcagtacgtgtaaacctataaaatttttaaaaaactcatgatgcatttaaggattaacttcccttaaaagcagtatttatttataatgttttctgattacatggcttcctcatttatttaatggaataaataatcagcaaatcatttttgttgaatgcctagtaagtgcacagaatttttaaaaaatgaactgggagactatacagaatttagagaagaacaaactcttgattctgtatatgaatctgatattttatagttggaaatatttctgagaattcttggttattttggctttatttcttggagactgtctacttttactttcttgtcaactagaatttaaaaagaggttgagagttattttaatgatttcaaatatttttagatttacttcatgcagccacctttgagtcttagaaaattccagcttattggcattttattgctgttatgttttccttcattgcttggaatcattcttgagtttcagaaagggtttgttcctaaaaattaactttacagtcatatattaactatttattttacattttaccaattatagccatgatctttatttgatttttttcagaagccatatcaaatattaagattgatattatctgctatttataatgcacaaagaaacagaatgacttgttcagagaagttgcatagctgtttggaactaaaattagtgcctggtctttgggcttctaaaacagatcttacctctgtaaacctaatatatgtattcagaaatataaatcaacaccttaaatctgaaaatagattggtccgtttctgaaaatcagatgttctaggcaaaaactttaatgaagagctgcttttgagtttccagatttagctgaaaaagatacatgttaaatttgaatttcagattaacaatgattttttaaaatcactgttccatgtagtacttgggacatagctagaaaaaaattattcattgtttatctgaaatttaaatgtagctggatatcttgtattttatctggcaatctcagcttattttccattacaggttgaatgtatctcttaactgaaatgcttgggaccagaagtgtttcagatttcagatttttttgggttttggaatatttgcatttatacctgctggttgggtatccctaatctgaaaattcgaaatgctccagtgactgtttcctttgagcgtgatgtcaaaaaatttcagcttttggagcattttggatttcagattttctggttagagatgttcaatgggaaaaactattatgtttgtatattaactccagacctttagcagtttcctagaacaaaaataaaccacagtacagacatccatagatagataacagattacatattgggtggaaatgcatacaatgtcatttcccaatcaacagacatttaataatgttaacatcaagcagatgtttgtaataaagctgcggtggcactcctcagcaacattgacatccagtgtttatccccttcactaacactcagtgtccttcacaaaatttgtacaactgattctgatgttttactcgttgtatttgaaaggtgatatgaacactttttcctcaaatctttttgataaaaatgttttattgagctttggagtaataaatatagttttcctttgttaacatgaatcaaaataatgttttgagaggtatgtatatactatgaagtttgaatattaaaaaccaagagatgttgcatgcggaaaatattaaccatcatctactttgtgggtgtggttatatggtttttcaaatggtattgctctttcaggttctaggtgataaacatgggaatgctttatggcttaatgaaagagagtgctcaattcagagaagaaatcagaaggtggtggaggaagcaccaaggtaagtctcctaagaaacatttataaagcggctgcttttatgcatttcattcattcattcattcattcatcattcactgacgcatgcattcagagacagggtctcactctgttgcccaggcagtggtgcaatcacggctcactgcagcctccacctcccaggctcaagtgatcctcccaactcagcctcccacgtagccgggactacaggtgtgtgccaccatgcccagctaatttttgtgttttgtagagatggggttttgtcatgttgctcaggctggccttgaactcctggcatcaaaagattagcccacctcagcctcccgaagtgctgggattataggtgtgggccactgctcccagccacatttctttttttatttgtttgctttatcagctacaattgcactaatgttcatgtagactctgttactgcatatttttataattaagaatttgttacttgatttcctcagtgctttaatgtgtaaaagggagagaatacttgaaaaagaagtgggtttttattagaggagaaagttgggtagacagccaactgtgacttctgcaggcttctaggaagtatggaacctgatggtacttcacgggatttctgagatatatgccttctagactttcatgttggtgaagggttcataaagttggtcctgaatttatcctaccatgaaaggcttctggagtgtggttcttggaaattccttgaattatcagagccactttgggtacttctccagggcatctttcatgagtttggtgtatggggcctcatttctcatttgatgctaggttgctatttgtatatactctggtattctctttgttcttaaaaatcctcaggtgagtgttcctagtaatttttaattaccagacggtaagaagtatagcttattgtagctttaatcagcagagctagcatatcttgatataatgcctatatagtttctgaaaatagtaagtgagaatgtgagtatatttttaatcccggagtaatggtaaaaattcaactctattttagttacattggtttttaaaaatatggcatggtgttattagttttaaaacatggaccccaaatcctttgccatttttctctttgagcagtgaggggaaggatcattgttcccttttcttgattctgtgctctgtgaaggcttgacccgtagactacttagaagtgatgctgtgccagtttccagcccaggccttgggaaactgccagcttccgcttcctgttctcatgggatgcttgtgcttacacaccagccagtatgctgtgaagaactgtgtagcttacataagatgtggccatctagttctcaaggcccaggaacaggatgtaagaagggaggaagaagaaaagccaaagggaatcctcttcctgtgtctttaggaagatcctggaaggtgctgaagctaattacttggtgttgatctgaagttagacacttagctagggagacttgttagtatctttttcttaagaaaccatgtgctgagctagaactagtactgtagtactgtagtatggaggaaggggaaaaaggatacctgtggaacagtaagagtcttcaacacacatgtcttgcaattttctgtttccttgactgattatcaattccaattcaattaacactctgtttttagtaaaaacctactcaagtgttacctgggatagaaatctttcccagactgggaaccttgaatcataaaatgtgtttgttttttctctttgtctagaaatacaaacttttcataatgaataccttatctacttatttagagaaaaaaaggaaaatatacagcagtaggaatcaaaatgaaaaagctagaactcatcattaatactgacctgatatgtatttgtacactgtgaaatgttaaaataaatggaatgtgtagttttcagttcctggagtaagaatcggctgggcatggtggctcacacctgtaatcttagcactttgggaggctgaggtgggaggattgcttgagcctaagagtttgagaccagcctggacaacgtagtgggacctcatcttcacaaaaaagtaaaaaatcagctgactgtggtggcatatgcctatagttccagctacttgggaggctgaagtgggaggattgcttaaccccagaggtcgaggttgcagtgagccgacatcatgccaccagattccagcctgggtgacagagcaagaccctgttctcccccaccccccgaaaaataaaaataaaaaaaagaatctactaatgtgctttgagggcaatgctagctagggtcactcatatctctggatatctagcagggcttttgaaaagggcaagggcaagatcaaataggagaaagatagtttcacagagctgcactgagattctccagatgttatgctattaattgttagttggggttttttttagttgcattaattttgtcagccagttattgttgaaatgtcatctatgtctatacattaggttaatgcaaactatattatagataattcataacacttgaacccattgatttattgtaacttcaccaaaagggagacagtaggaagtacacttcccacctgtgaactcttccccctcccccaccccaatccaacttgaatatattcaaggctctgagtctaactagcaatctatatgaaatagaaatgtaatatgaatgttaaaagacaccgtggggttgcatgcagttgaaccaagaatgtgagaaataagacagtaaaatgaccagatccttggccagaaaatggggaaggggcattacagattaaaagagtcttaagatacaaaagccaatcaaatgcagttttggaccttatttggatcctgattcaaagaaatcagctgtataaagatatttatgagatagagaaatttgaataccaagtggatattaaatgcttttaaggagttcttgttttttgtgtagttgtgttacaaaagggtactttatctcatagaaacagacatgtatgtttttaaaagtgaaatgatacctaatttgggatttactttaaaaacaataaagggtgggcctggtagagaagtgggcaagtagcatagataaagccagagtggctatgtattaataattgctatatattggaggcagcttcatgcaagttttttatactattccataataaagcttttatagcatgtcatctcaatcctgctcatttgagaataattttaatccacaagtagaaaagtagttaatgttttgtttctcagagcctttctttcatagaagcaaaatctgtgaaaatgcaaagtggtttgatgatatttttttcagggtttgttgaagtcattttagcttaacttgcctgcttgaaggtgggtttggtatcttgaagccaaacgtgcaggatttagtggatgtattgctgattcttgttatttgtggcagttatgttctctaaagtcaccttgattactgaattagtgaacactgaataatttcccctaggggaaatacagggttaggttcctgcgagcctttgcttataacattttcctcagtggattaatacataattttgttttttgtgtatttctcatttaatatctgtggttgattcattaacagtgaactcacaatcctggccaacaagactataacacgtgcctgagtaaagcttatcccacacacattttctccagacagtacttcatggccttcttgcacatgggaaccccagacagcacctaaggacaatgcttgatgggccatttcacaccatgaaatgacacacacacacacacaaatgcaaaaaaagtgacactaaacagaccttgaaaaggatgcttgttatagtatgagcattgaaacgagaagggagagcatcaccttgttcagccttagcatactggagtctcaaatttttcacctctctgcacttgttcacaaaggaccatgaaagcgccttaagtattgattttggggttacaaataaatttcagcaagtaggcagatttgtaaatatggactacatgagcaatgaggattgattgtgtatgttagatactaataagttatttttctcccagtttttggctcgaagcaattctgaatatatatgttaaatattagaagttgaagagtagttatatattttgtgaatggattgaagttgcagagtaatgtgaaaagttcaaatgttttatacaaatctaaagttgacttatttgagcatgttatgcttaataatatagtcaacatatattataaaacatatataaagcacaatattttgaattcttaaattggtatagatgatctatatctgagtaaactttaagaaaatgtttatgtaatgcacacaaaagataacttgatttttgtccgaaatgtagacaaacatttttttgtatatgtagcatttttttggatgcggagactcgaagagcgatgggagaacaagctgtagctcttgccagagcagtaaaatattcctctgctgggaccgtggagttccttgtggactctaagaagaatttttatttcttggaaatgaatacaagactccaggtaacaacaactgttatttattcctctccatgcctctgtactttacccttccttctccacccttttttgttttataaatgttaaaaaattaactccataaagtgttaaataaagatttagtttttatgcttgtgctaagacatctgttaggaatgacggatagtatccctctaaagttcaatgtctagacctctgctttgtcactgttaatactttatgttggaaataccactttgtttttttcttgaacctttctagatgaactgtatttgtcagtgtgtatgtgctgttaagaaaaattactctagatattacaaataggaagtgatacagtgattgcaaaatctttggaaggatggaggaaggaagggtacccagagtgaacttcggtggtgactcccactgctgtaccactcagccaggctcccagaggaaccggcacctctgccacagtgaggacgttgagaatcaagtggctgcccttggaactgttggctttgggggacataacttccttagttctaaccaaatctcaggaagcgactggcgttgtaaccggtggctttatttccttccttcttcccttttttctttcatttaaattgtgaactatacagaaacatacatagaacacaggtgaataattgaatgtattattataaagcaaaaatcaatgtaaacatcaactgggcctagaagtatttacaaaacagccagctctttttacactagcctcattttcttctccttctcaatgattctgattccccctccatcttccctagagctgtctcctatctgactgacttctcagaaccttcagttttcatatcattcttcctttgaattacgcatacctaagcagcattattacttttgtttgttttttaaaactatattaatgggatcgtatagtattcgttcttttgtgcctggcttcttttttcagcatggcatttgtgagatttgtgctatttcatggaactcctgtatgatacattttctaagaaaatgccactatttctttatctgttagatttctgtagatagtttatttccagttttatggaatttgtgttagtttgctaggactaccataacaaatgatcattaactatagcttaacacaacagaaatttgttctcgtacacttcaggaggccagagtctatcatgcaggttccagccgagtgggttccttcctggggggttggagggagaatccactccatgcctctctcctggttctggtgttgccgacagtccttggtgttccttggctttggcagcataactctaatccctgcctcagttgtcatattgccttctctctgtgcatctctgtgcccagggttcccgttttctgtagggacactagtcacattggattcaggacccttcccatttagtacggcctcatcatacgtgatttcctctgccaagatcctgttttcaagtaaggtcacagtcacaggttgtgagtggatgtgaattttgacacgacactcttcagtccaattcaccattcaaaaaacacatatggcctacagagataaatagattagtacttgcctaggactggggtgggtgagtggggggattatgggctgatggctaaggggtggaataggacaggagagactgaggaaggcatacttatgcctgaaaacagtgtcaactcttcttccgttaggcccttgggggagggggtggggggggagggggtgttgagtcactgcaggcatgagctgggtcgagcttaagccttcctgcagtggttttctcacgtgcaccaaggggccgcttgtgggatttctgcatgcctgcttcatcctgagcttgagggcttgcctctgaccctgtgcttcatgggagccgtgtcttcatgcctgtgcctctttcccagagggagactcctgtgggccctggttagccctaccatgggtgcaggagggctgttttctgttcgctgtgccgtggcggtagaccgtccttgtgtccttgaactttgaggtgagttcagtagtggccctgctgctccccagccgtggggaagctgatgttctgggctccaggtggatttctgcctctttcctgatggttatcttttgcgtgctatggctttcttcatgcttttactctcgacctacctgtttgaagacagttcacgtgtgcctctgtaagcagtgtataatttttcagcccagtttgatatgtttgtcttgtatcttgaccatttgctccttagaaagttgacagaaatgctggtatttttgagtttaaatttctaatttttaaaaatgttttcttcttgtccaatctctggcctttttcctttttttttctttcttttgcagtatttatcatttaattttttcctgtacaagtttgggggttataaatactgctgatcttttggtagaacctctacattacaacacacatccttaatttatcaaaaactgataacagtgtcttttcacctgagctgccagactgacaagggagcttagaacatttaaagtccgtttactgtctcctgacttgggtacaattatcccccgaggccatttctcttattattttagtcatcattcattccattcctcccacatatttacctttctttgtctttgtttctggtagtttcttttagaggtttacttgggacaatctctttttgttgacagccaatgactttatgttgccttgttcatgaaatgcgtttttactcttcttagacgtcttggctgtgggccgtggctcacccctgtaatcccagtgctttgggaggctgaggtgggaggatcccttgagcccaggagttcaagatcagtctgggtaacatagtgagaacttgtctgtaccaaaaaaaaaaaaaaaaaaaaaaaaaaaaaaattagaaatcttagtttggccagtatttttttcaatttattgaaaatattatttcactgtttctggtgagacttccccactcattctgcattctgcttatttggacataattgatttttccttttggtagcatttattaatttctgtttttgttagatttcctttaactttttgctgattcgtgtacatgtatacatggaattcattgaatattttgtctgtagattaatgtcttttaattttttttggaaattctccaccattattacttctggaacaatctcacatacacagatgaataaacctataactttcattttagacctccttaatatatctcttatgtttcttatgctctctttgatatttttcatcttttttggataatttcttctgtctttcttaccttcccttatgctgtatttaattaattaatcacccattgagttcctgatttcaattgtttatatttcagttctgaaatttctatttggttcttttaaaagtatgattcattggtttttatcttttcttgtctcctatttgaattttcaattttgacttttattttttgaacataattaacttatttgttttgtagtacatgtctgataatgttgacatgtgaagtcttatgactacttgtattaactgctttttatgctgtttcttggttctgctgttgagttcctgttgggccttgttattatactgtcatatacagttattttaaaaattgttattaatcaaaacctaagatgatggattctttcttatagagatttttcaaatttttttctgccacatgcctatggacagtagtatttgtgactacggcaatctaagctcaaagtgtaaggctccttgaactcctgaggggatacacagcccggttgcagttctagagaatggttggttttattccagttcagtcttatcttgaggttgcattcctttatggtgcccactaaaagtgggggtagtttatcaaggttctttgataaactgatactttggtggcctcttatcttcgtggttatgcttttgatttgttgatgccaccaaaagtatagcttatattcatagtccttttttcctggaatggcaaatgacgttagggcaaaaatggtgttgagtgttgggtttgcaaatctgtgttttcatcttggttttggctgatcccttcctatattcttaccctgtgatgtttttaagaagacctcccccatctcccattccccaccagttgttttctagtccccaataagcccaagttccaagctgagtggctttagaggtacattatgcctatagattaaataagtttgtgtcctgactctcaacaccccccaaaagcagtgagcgggcagtggaatgacagtctgtgcctcactgctatctcacttttcctttccaaatctcatgcatttgcacatccagaacctcatgcagtcacatggaaacctcagctgtaagggagtctgggaataggctttttaaccatctgtattctgcagtgtaagagtataccctagaaggagtttggagggaaagttcagtgccagcccaccattttcacatgaatataatcaccaaaattttaatctgtaagttatatgtaaaaagttaaaaacattgctgtattttcattgtaaagtataactgtcaaataatgtggctgattttccttaagtatggcaaaagtgatctatctagatgcattttgagactagtattgtaaatacttgtagcattttataggtagtagctcagtagttgttgcttaaaactcatacttcctttgaaatcacctttgtagcctatattttattttgtgactatctttagaagtgacagaattttgccttttgaaggttaatttgattttgattaaaatgtatctttataactaagtatgtctaattagattattagctgggaaatcatgtttttggttaaagtgaagactttattttgtcataatgagaaaaatagcttgtaatttgattctgaagacaatttgagacgactgcaaaatatttgtattctattctagaccaaagagatctgagattttttaattgaggtacttatcagtatttatggaattgacaaatgggcagtttgttattctgttcttgtgttatctttttttccatttgtttctggctcatttatctcaggttataagtttgttcaagtttgtaccatggttgtttctggtataaaacccgatagttgattttttttttttttttaaacagagtctcactctgtcaccaggctggggtgcagtggcgtgatctcggcctgcaaacctccgcctcccgggttcaggcaattctcctgccttagcctccagagtagttgggactataggtgcgtgccactacgcccagctaatttttgtatttttagtagagacagggtttcaccacgttgaccaggatggtctcagtttcttgaccttgtgatccacctgcctgggcctaccaaagtgctggtattacaggcgtgagcctccgtgcccatcctgtagttgatatttttatcgaataattctatgcagttggtcaagactatctaagtacctatgttttgtgtattggatagcttgctaggaaattatgttctataccctcaaaaaattataaaaatatttcaagaaaaaaaatcaaattcacaaagattttgtcatattaccagatctaatatgacaaaaattgtgaatcattaactcataatgatatgaatcagtgctatagaatgtcatgtccatgttcggcctgaaattgccccacttctcaccggtggtctgggccccacactgtgagaaaatatttcactaatacctgcgcttagcaaacgtcccaaggtctctgactgattagagctcttgttcacgaacagagctctgatagtacctaatgctgttaagcgtgctattttaatagcattctatgatatttaacatcatactttgagacatttgtctcccatgtagtgtttaatcatatttttctctcttgtggtttacttccagtgactgtgatcctgtcagttaccagaataagttaattttaattttttagaatgtatctgtgtgatagggggtatttgatgtggaggatataattaaatgggagcatgaacaaagaattttggacttcatatgtgttcagaaaactattcttacatattccaaagatttctttctgatattgtttaaacaatccaatttgtttttttttgagacggagtcttgctctgtcaccaggctggagtgtagtggcacgatcttggctcactgcagcctccacctcccagattcaaacaattctcctgcctcagcctccggagtagctgggactacaggcgcataccaccacgcctagctaatttttgtttttttagtagagatggggttttaccatgttggccaggatggtctcgatctcttgacctcatgatccacctgcatcgacctcccaaagtgctgggattacaggcatgagccaccgcgcctggcccaagtgttcttttaatagtagacattctctttcaaatttctttactaaccttaaattataatacttaaggcacattcaccaaattctttatctcccaagatatatgttatctctaattagtgtttcagtttgaactagagggctataattttctttgttctttttttattttctttgaaatttcctgattgaactttcactttttccagcttcagaactgtgttttgtttttgtttttgttttttttttttttggtaacagaaatgcatcttcactttctacattttcttaagagtgaaatttgaaataacaatacagtttctccataaagagatgcaacactaagaaagtcaccgcgtttggtgcattaatagttggttccgttgactggttttgttctcaatctggtcacagtttatgtaactgaattacctttgctatcttcacatatttttgctttattttttttaagtcactggttttctgttgcttaaagataaaatttaaatgcttttgcatcacaacacaagcttttttttttgtagccctgatttttcccccagagtcctgtttcttgccagtgccgatctctgtgtatgaattgcaagagactcctttctttttcctgaaggtgcctttcagtttgacttctttgtgccttgtatcatgccactcccattgcttggaatgttctctgttcacctctcacagtgaacactgagctatgtatctacctgcacacccacaccacacacacctgtctcccctctctgaccatacttctccctcatctcacctctctccacatttgaaagatggacagctagatggagaactactctacggacactaggattttgttaaaatgctattttattgaagtgtattctagtagtcccccttatccatagttttcctttccaaagtttcagctacacacagggtctacttcatttcaaatatattaaatggaaaactttagaaataaacaattcataagtgttagattgtgcactatcctgagtagtgtgatgaaatctcacaccatcctgctccatcctgcctggtacgtggatcctctctttgtctggcatctccatgctgtagacactccctctccatgagtcacttagaagctacctcactgcaatgagacatgatggtgccactgcactccagcctggacagagcgagaccctgtctctgaaaaacaaacaaacaaacaacaacaacaagaaaaaacagaaggaaaaaaaaatccgcctcggtgatcacatcgactgtatgatacctcagtgcttatgttcaagtcacctctactttatttcataatggccccagcatacaagagtagtgttgctggcaattcacatatgccagagagaagccataaagtgcttcctttaagtgaaaaggtgaaagttctagacttaataaggaaagaaaagagtcatgtgctgaggttgctaagctctgcggtaaggatgaatcttccgtcggtggcattgtgaagaaggaaaagaaatttgtgctacttttgctgtcaaaagtcaaacttcaaaagttatggccacagtgcatgataagtgcttaagatggaaaagacattaaatgtgtgtgtataagacatgaatagaaaagtgttctaattgacagcaatcatgttctatactatccacagtttcaggcatttgctggggacctaggaacatgtcccccaaggataaggggggactactatatatgcaatttgctgggataattttagtttcttattttgttgaatggtaatactcagaatttataatactttgtttaaaaaaatctagtggttcataagagtctacaatggaaaagttactctccataccacacttttatcacagccatttatttttcctctgttgaagcaacctttgttttttttaacatactaatttgggagtattccatgcctaatttaaagcattatctttttcattttaatgacttctaataacctgtcatagggatgtaacagtcatataatttcaccagatctctatcgataatttttccagtattttgctatcccaaataatgcaattatgagtgaccctttatatccactttgcacgtgcagaagtagaattgctgggaatatatgtgcttttataaattagttaagtattatcagtttacctcttaaatgagagcttgtttcttctctccctggccaaaagtgttttttgccttttgatctttgtgtgatagtgaaaaatggtatattgttttcattgtttatcatgaatttttctttatagattcatttatatttctgtgaattgactattagatcctttgccctttgggttttcttattgatgtgtaggtatttgcttattgttgggggaaattagccctttgtgatattgtcagaaaggaggggctttgtgaatattttcatagggctacagggcaggtgctttctgagcaaagaccctggcagttgtgagaggtgacagcgtgctggcagtcctcagagccctcgctcgctctcggcgcctcctctgcctgggctccaactttggcggcacttgaggagccttcagcccaccgctgcactgtgggagcccctttctgggctggccaaggccagagccggctctctcagcttgcagggaggtgtggagggagaggcgcaagctggaactggggctgcgctcggcacttgcgggccagctggagttccaggtgggcgtgggcttggcgggccccacactcagagcagccgggcaatgaggggcttagcacccgggccagcggctgtggaggttgtactgggtcccccagcagtgccagcccaccgtgctgcactatggcttggccccaatattttctctctgatggggaaaaatggccacctgagggaagtacaaattacaatactatcctgcagcttgaccttttctgtaagagggaaggcaaatggagtggaataccttatgtccaagctttcttttcattgagggagaatacacagctatgcaaagcttgcaatttacatcccacaggaggacctctcagctcacccccatatcctagcctccctatagctccccttcctatgaatgataatcctcctctaatctccccccgcccagaaggaaataagcaaagaaatctccaaaggaccacaaaaccctcctggctattggttatgtccccttcaagctgtagggggaggggaatttggcccaacccgggtacatgtccccttctccctctctgatttaaagcagatcaaggcagacctggggaagttttcagatgatcctgataggtacatagatgtcctacaaggtctagggcaaaccttcgacctcgcttggagagacgtcatgctactgtgagatcaaaccttggcctttaatgtaaagaatgcggctttagctgcagcccaagagtttggagatacctggtatcttagtcaagtaaatgatagaatgacagccgaagaaagggacaaattccctaccggtcagcaacccatccccagtatggatccccactgggaccttgactcagatcatggggactggagtcataaacatctgttgacctgtattctagaaggactaaggagaattagaaaaaaacccatgaattattcaatgatgtccgccataactcagggaaaggaagaaaatccttctgccttcctcgagcggctacgggaggccttaagaaaatatactcccctgtcacccgaatcacttgagggtcaattgattctaaaagataagtttattacccagtcagccacagatatcaggagaaagctcgaaaagcaatccagggccctgaacaaaatctagaggcattattaaacctggcaacctcggtgttctataatagggaccaagaggaacaggcccaaaaggaaaagcgagatcagagaaaggccgcagccttagtcatggccctcagacaaacaaaccttggtggttcagagaggacagaaaatggagcaggccaatcacctggtagggcttgttatcagtgtggtttactaggacacttttaaaaagattgtccaatgagaaacaggctgccgcctcgtccatgtccactatgccgaggcaatcactggaaggtgcactgccccagaggacgaagattccctgggtcagaagcccccaaccagatgatccaacaacaggactgagggtgcccggggcaagcgccagctcatgtcatcaccctcactgagcccccggtatgtttaactattgagggccaggaaattgacttcctcctggacactggcacggccttctcagtgttaatctcctgtcctggatgactgtcctcaaggtcccttaccatccgaggaatcctgggacagcctgtaaccaggtatttctcccacctcctcagttgtaattggaagactttgctcttttcacatgcctttcttgttgtgcctgaaagtcccacacctttattagggagggatatattagccaaggctggagctattatctacatgaatatgagaaacaagttacccatttgttgtcccctacttgaggagggaatcaaccctgaagtctgggcattggaaggacaatttggaagggcaaaaaatgcctgcccagtccaaatcaggttaaaagatcccaccacttttccttatcaaaggcaatatcccttaaggcctgaagctcataaaggattacagaatattgttaaacatttgaaagctcaaggcttagtgaggaaatgcagcagtccctgcaacaccccaattctaggagtacaaaaactgaacggtcagtggagactagtggaagatcttagactcatcaatgaggcagtaattccactatatccagttgtacccaacccctataccctgctctctcaagtaccagaggaagcagaatggttcacggttctggacctcaaggatgtcttcttctatatttccctgcactctgattcccagttcctctttgcctttgaggatcccacagaccacacatcccaacttaggtggacggtcttgcccaagggtttagggatagccctcatcggtttggtcaggccctagcccaagatctaggccacttctcaagtccaggcactctggtccttcaatatgtggatgatttacttttggctaccagttcagaagcctcgtgccagcaggctactctagatctcttgaactttctagctgatcaagggtacaaggtgtctaggtcgaaggccccagctttgcctacagcaggttaaatatctaggcctaatcttagccaaagggaccagggccctcatcaaggaacgaatacagcctatactggcttatccttgccctcagacattaaaacagttgtgggggttccttggaattactggctttggccgactatggatccccggatacagcgagatagccaggccactctgtacgctaatcaaggacacccagagggcaaatactctggtgggaatcagaggcagaaacagccttcaaaaccttaaagcaggccctagtacaagctccagctttaagccttcccacagtacaaagcttctctttatacgtcacagagagagccgggatagctcttggagtccttactcagactcgtgggacaaccccaccaccagtggcatacctaagtaaggaaattgatgtagtagcaaaaggctggcctcactgtttaagtgtagttgcagcagtggccgtcttagtgtcagagactatcaaaataatacaaggaaaggatctcactgtctggactactcatgatgtaaatggcatactaggtgccaaaggaagtttatggctatcagacagccacctacttagataccaggtgctcctccttgaaggacccatgtttcaaatacgcacgtgtgtggccctcaaccctgccacttttctcccagaggatggggaaccaattgaccatgactgccaacaaattatagtccagacttatgctgcccgagatgatctcgtagaagtccccttaactaatcctgaccttaacctatatactgatggaagttcatttgtggagaatgggatacgaagggcaggttacgccatagttagtgatgtaaccatacttgaaagcaagcctcttaccccagagaccagtgcccagttagtggaactagtgcatcaccctctcaccctccctctccccaccaccaaaagttgagaaggggcagatatgccagcaactcttctacaagctctaattttaatagtctgagctttcctttccagatgtgcatacccctctgcatgtgtgtgggggggaagcaggccattaactacgctgcctcatggggaagtggggtatgaggaacgggactaagatgttctgtgagtaaacaattgcactgatctatgattcagaaacctttttatttttaataaaattttctttttaattgtcagcaaggcaagttatttctatagaagggtgtgcccttacagatggagcaatggtgagcacacactcggacaagggaggggaaggggttcttatccctcacgcacgtggcccctgctgctgtgttgttcccctgttggctagggttagaccgcagaggctaaactaaatccaattggctaatttaaagagaatgacggggtgagtgctttggcgggagtcagggcagagcaggtagcaggtgatcggaatgagttagggtggagtaggtaactgaaaaaggttgctttacgaggaacttaagtttaaaagtagaaggcaacgaattgaacatattgacatattaattctttgaaacgaaatttagaactcatatctaacaacccctccccttgtatttccttacagctttcttttcaaacttttttttaatgtgtcttggcttagttgttttgcttgattttccaaaagaagaagcttctctggataaggtggaggatagttaagggaggagaaaccttttttttttttttaatgtcttggcaggattaacaaatactcgtatgaaaacataacagatatgatttgtaggtatttttccttatctattgcctttttaactttgtatgtgttttttcttcttgtatagaaagtttttatttgtatgcagtttaatttttaaatcttctctttgtgatttcaggagtgacatacttaggctttctgtgctctatgagcaatcaaactgttttctttcatgttttcatcaaatatttcatctttaatggtgaaatcttcacttcatttggaattcattttattttattttccaatggctacctgattgttccaacaattattgaataatcagtcttttctgtaataattcgaagtgctatctacattacatactgaaattgcagatgtatgcagacctattacttcactcttctttttttaatttttctgcttattcatctcctagcaccacactggtttaggtattatagctatatattatagtacagtatctagtagaactattcctttctcattacttttatttttcatatgaaaaattagcctatagattagcttattgtatttatatttaacagaagaaaaagaaattaaaatgacagaatctctggactattagataaatgtttataactttccacagatatattaattcctaaaatatgttctttttttcccttccagtgacatggaactaaaatatgttcttaataagaaaaatggttatgaaaaacatttatatttttgtcatcattttccttcatatttcaatctgaaagagtatattgtttctcttttacaaaagtaatggaaattggcatacttatatttaatcccgctgtctttacttcctaactcttcatgtttgctagttttattattagttctatgtgattgtagcatttcctttcttttctgtaggcatggctctcctggaggtttcatcttacttgtgtattttatcactttatggtcactgtcagcatcttaccatagcttcatgattagtgagttctttattttgatttgttttatataaagttagggggtttttttaatcaagaatttattttttagagatacctgtgggtagtgtatttgaattcttagatggattaaataaggttacccttatatttgaaattttaactcagatgcaaaccgtttgataccttcacaattgtaggactttaaacatctttctgtggtagaccttcagaattttatgagggagtatcaaaatttaagattatcgattgttttattcaattcctctatatatcttttctttttccctttaaaaattgaatctgtttgattaagaaagagatagacggagtttttatcataattttaaaaacgaactttatttgttagagcagttttgggtttatagaaaatctaagtacacagaattcccatatgcccctccctcatgccacaccatttctctacttaacatctcatattagtttggtgcatttgttacaactgatgagccgttatcgatgcattgtgggttttttgtttgtttgtttatttttagagagaggggtcttactccaccacccaggctggagtgcagtggtgagatcctagctcattgcagccttgaactcctgggctcaggcaatcctgccaccccagccgcccaggtagctgggactacaggcatgcatcaccacgcctggctaatttttgtattttttgtagagacgaggtttcaccatgttgcccaggctagtctctaactcttggggcctctgtctcctaaagtgctgggattatagccccgtgccagggcacccggcgatacattgtttttaactaaagtctgtagtttacactagggttgctctttgtgttacacattctatgagtttggacaagtgtatctaccattatggtatcataagaataggttcattgcctcagaaatctttgtatccaagacacctttgcatttctttccttctttccttgtttggttctttctgtctctcttctttcctttcctttttcccttcttttctttcccttcctccttccttcttttcctttttccctctgtgtgtctgtctcactttcttttcctcattgtaattttcacacatacagaagtacttcagaatagcaacagtagtagagtagagccctaggaatctgcaaccagcttcttatttacttcccagtgttgtttcacgtatgccttcttttcctcagttgttcctctcttggctggagtatcagacattatataaattcacatcatactgaagtatatgtctttaagttttccctacattcctaataatgcatatttttaaatatttatatacagtataatttgatgtatgtgggtttatgactcttgtacatgagttatgtggctattttcttgcctgaatgtttatcttgtttaaatgtttaatctgaaatcctactttgactcatgtcatactgtatctcctcctgttttgtctggtcctttattttaaagccttctttattagttgttttgtttttttagtttagaaaaaattatgtgtgtatgtgtatttgtatagatggggtctcaacatattgcccaggcttgtctagaactcttgggctcaagggatcctcctctcttggcctctgaaagtgctgggattataggagtaagctgctggcgcctagcctgaaaaaattttctaagaacctaatccaacattttcttttagtgtgaaaatttaattcttcccattttaaatacttgattttatttattttatcttatatttaaaaattttttttcttgttttccattttgtttttccttttctgtttgttgcttgaaataatggttaattatcccttttgtttcccattgataatttggaaatcctattgtcctttaaaattttatttatgtttatttttctattcagacagacgttttctctgtcatttgtaaagatgatgtaactagtttccttgactttccaacactgaagatttgctaagataatttaatacttctaagctatttttagtttatctcttcttttttagcttttttttagctcccatgtatacagcccagacacatctttcattatttgctatatcttcagctttcttttttgagatttctgccctagttcacttatttgtgtagcacattttttcatgaaatttcttcagtagaatgtgtggaatatatgctctgaaatgtcacatcctcaactatgtttctttagccctgaacgggggatactgttttgattgaatacaggattcttgattaggattgggtttcggttcttgtctttcaggagcatatgaatttcagctgtgttctagcttctagtattatgtctggtgtcattctgatttctttcccattgtagataatgtagtcttgctgtctgaaagtttgcccaattttttttatttctctctctctctttttttttcttgagacagggcctcatcctgtcacccaggctggagtgcagtggcatgaacctggttcactgcagccttgacctcctgtgctcaagcagtcctcctgcctcggcctcctgagtagctgggaccataggtgcatgctgccacgcctggctaatttttaaatttttttgtagagacgagatctcactttgttgcccagcctggtctcaaactccaggtcttaagtgatcctccagcttggcctcccaaagtgctgggattacaggcatgagccgttgtgtctggctctaattttcttttgatcattggaattcagggacttttttttccaaccaggatatgccttggtttgtgtttgtatacattaaccctgccttttagtccatgccctttttcagtgttcaggtttaagtattgcttcatttcagaggaagtttcttctgttatttaactatttccttccatcagcaattttctcctccttgtggaacttctagtttttgcaatttaggtctactggatatgtttctcttatgataactgtcattttatatttatgctgtgtctcttgacattatttctttattgatcttccaggttactaattcaggttgcaacagtggttatcctctcctataagtaactgactaaattgtgcaattgggaaatcacattattttagctcagaaattctaattgtgcgttacagttagccctccttacctactagttctgcatctgtggattcaattaactgtggcttaaaaatttaaaaataaaatgaaaatatcaattcaacaattaaaaaataccaataaaagcacaatatagtataacaacagtttacatagcatttacattgtattactataagtaatctagagatgatttaaagtatacggaaagggctgggtgttgtggctcatgcctgtaatcccagcacttttggaggctgaggcaggaggactgtttgagcccaggagatcagtgctgtgatgaaccatgatcatgccactgcactgaagctgggatgacagagcaagacccatttcttaaaaaaaagaaaagtgtacgggatgatatgcataggttacatgcaaataccatgttactttatatcggggacctgagcatctgtagagtttagtattcacaggggtcctgggaccaatcccctggggagatggaaggaggactcaggggatgtgtgtgcacatgcacatatgtgcattgctacttcttaagtttttaagtgcctttactgctttttgggcaaagttgtatttttctcctgtccttcagcagctctgtttcacttggtctgtgtaatcattattctgaatgttttttctttcttgtgctagtaatccccctgctgtggttttttgggggttatcagtactaagttctgcttcttgaaatattctaagtgacagcagcccttcagatggttgaagacatgaccatatctactccagaggcctggaagagcatatgtctcctagcattctcatctcaaggacagaattgagctaatttttattgactacttggattcctgggcaaagagaccacggacccatctggagcctttattgacttttcccctgaggtccatggctctttgcaagccagtctgtctccatgatgtgttcctttcacattcttccctagagttctctgaagctagtctccagttttcgttcagccacagagggagaagagcctgttcccagtttttggctctcatcttctccctagatcttggtgcttcccatgtcctcagctgcttagtaactctgggggagatagacagcatggagtttggagtggagaggtgggagccaggctggttccaggctgtttttgacagcttctcagagcaggaatagctaacctgggttatctggatctctcatgagctttagggaagtctgtgaaccctctgaagtcagatatatagttttttagtgagaaattcagtgagattcaaaattgtaaaatgtttcagaacaactgcagctgactaatggaggactcatttaatcattgtttttgttaattgcaaacatctactgttttcactcagagcaagtaaattctagttctcttccttcttagctgtgtgaccataagcaagttccttaacttctgtatgttttgatttcctcattagtaaaatgacattaattatagcatttgctgtataggattgtcagcattaaatgagtttatatagtttacaaattcaaaatagtacctggtttatactgagcacacattctttctgctaactgtgagtatcttatccataacatttgcatgctgtttattatatattggttgacatttttactcttactgttgtcattattattaacattattgctattactattgtcattaatataaagcctgtctgacatctgaaaagatggcaagccacatattaaataataactttctctcattcttttgtcagttaactgcaaaattattgttacatgtgaacaaacatatttgaaatattaaccacttttaaagagatctcctttctgttataagggtgtttgtgtaagaagagtctgggaggaaaaatggaaactgaaatcttccaaaaatgaagctgatagagaaaagtatttactacatggcttaggcctttgtgttaagattaatattaggaccctgaatacacctttccaaattcgtgtgtgtgtgtgtgtgtgtgtgtgtctgtttgtgtgtgtgtaattaataatttccagatgctaggtttttttttagatttaagtgttttggaaaagcatcctctgtatagtctacaaagtctataggagttagaaaattcccaaatagagaggaataaaatcttaataagtaagtaattaaaaccccaaacatggtcagtcagctgtccatatctttgagaacagacaggtaaactgtcccacttttgttagacttagtcagttgcttatgttgattggtacagtgcaggaggaatctacttttaccatggaaggaaaggtacagtacaattgttgaaattctgtgaaggctatacactctaatctcatcagggggaattctgcatcacagggaacctttatattccagaaagattttagaaatttttttgtaacttgattttgccctttgccatttgtttaaaaattaagaattattgcaacctaaattctggtttataacaattaactataattgaacaaataccatattctaatttcagactagttttggattaaaaaaaaatttctagacctgccagatgaaaatattttggtcttttatggaattggagtgtttgatagaaagaatgaggagaaattattgggaaaaggatttctaactaattgtaaaatttcattcttgtcagaaggggcattttggatgtgagcaaatgttgacctttttgattgtatttaaaatgatagaggccagggctctcaggctgtttagagtgagccagaattgggatgttttggcatgttttgttctgggaaactgaggatagaaggtaggatgtgttataccctcccttattatttactgaaccttagtagaaaatgaaggaaagaagtttttggtatacagatatgtatagataagcttttcaggcacttagatttggggttttgttttaaagcatattgtaaatgatattgctgtctgagttctggactctttttatctatgtttaactttttaaaactggtctttgtattagtttgctagggctgccataacaaagtatcatacactggggtggctgaaacaacaaaaatgtgttttctcaaagttctggaggctggaagtccaaaatccaggggccaacagggtcagtttcttttggaggcctttctcgttgcttgtgggtggccatccactccctgtgtcttcctgtggcctctcctctgtgccttgtgttgtctgggtcctgatcttctcttatgaggataccagtcatgctggattagggcccactctgatgatctcattttaacctgagcacttctttaaagaccatgtctccaaatacagtcacattctgaggtggtggggctaggacttcaacatacgaattttggggggtacacaattcagcccataatggtttccttatcatttcttcatgtgattattattcttggggtcaccaggggaaccctataatagaatctgttccgttttcgtggtcactcttttttttttccatgtatacatagcatataaaaattttaaacaacttactagaatatgactggttctaaaaatcctatctcccatccccccaaaatgaagacttgacaccggttagtctattctaaacattctgatttcagctccaaagtgaatttttaaggacaagttccagaaatgaattggcagtggtgatattaaatgcatatttagttttccaagatgagctggaaaactaaatttttagtttttagtgctgttggactatttaggaatagccagtactcactttgatgtatagttctgatgttattggcaaaaataaacaaatcaaaagcacaaaacaggcaactgacaatgtcatgtctctgaagagcacatctgtatataatcctacacaggtatacgcaccttcatccatctattctaagcacgaagaatgtatcagagaaaaggggagaaaaattggtttctaagccctgcagtccaactcttttttttgtttttttctgaggtagagtctcactctgtcacccaggctgtcactcttgaatataaccattgtttccaaggtgagtttataggagtgatgtgttggggcttatttcccaacatgcttttcatccttgagtgctgtggatcaaaatctaataaccttagatctttattttgaaatcctgtattctcaggaggtagagcttcagaattttagtaggtacatgctagattctgttccgtgaacagaaagagcagaatctttctgaacagacagagcagaaccaaaaataatggcattgaccatcctttcaggctggaatagcaacaaactacaaagacagaggcctattatgccaaacacttatgaaactgaattttatgtaatgggacagtttcctcatatttcagtgggtaatcatactaaactactttgctaagttgaatccaacaagttctgcttacaaaagatagctttcgaaaaaacaagtctttgtaatacctgtcagtttagacaggatatattgaataaaaatgtcacttaaaattttgttaatttaaaagaacattattttgataacaaaaaatttcagcattctctcaccacaccatatcttgagagcaatctcctatgccttctctattaaatgacagtgatgtattgaagaagtttgtgcatgtgtggaaggattttgtaaatttcaaagtgccacactgatgttggttatacttaggtatggtgggccttacacttttaggggcagtttctgctttgactaagcaactgggccactacttaccagctgccaaataattagagctgcagatatagcactgttgaaggaattttaatacttctcatcagcctcctcctcataatggccaagttaacacacactgcgtctttctgacttctttttacatgttgtgacttttccccttttcccttaaaactgattttcctcagttttaattttcatttcaagtcaactcaggtatataattaaaatttccttgaatcttgctcaccttcaggatgacttgcctgttattcagttactgatcctgaaagttttagaaattattaggtaaatatcacagtaaaatatttaaaagtttaggtcagaggaaacatatcgcacaaactatctgctattgtataactatttttatttaacatagtgggaggattctgacaagaatgttggtcaagtcagatgtctttatttttaataatgttttataatatgaaaaacaagtctttctagggacactatttttatttttattaacttttttattttttatttttttgaggcagggtctcactcccatttcccagactggagtgcagtggctccatcttgcctcactgcagcctcgacttcctgggttcaggtgattctcccacctcagcctcccaattagcgggactacaggcatgcgtcaccatgcctggctgatttttttgtattttttttttttttaaatagagacaaagttttgccatgttgtccagtctgctctcaaactcctgggctcaagatatccacctgggtttttctcccagagttctgggattataggggtgagccaccgtaccctgacgtatttttcttaactttaaattttgaaatgatttcagactcacagaaaagttgtaaaaatattacaggtaatttctgaatacacttcactcatatttaccacatttactttatctttctatctatatctgtatttactggaagcatttcagagtaagttgcaggcctagtggccctttactcctaaatatgtctgtacttcctaaaaacaagtaaattttcttatgtaactatagcaccataatcaaaatcaggatttggacattaacatattactgtcttccaatttagggactatattcaaatttccccagttgcctcattaatgccttttgtggtaaaagaaaaaaaaatctggttcagcatcctgcattgcatttagttgttgtatctctttattctctctcaatctggaataatccttagttttttggtcagttgtgatcttaacattttttaagagcataaaccatttattttataaaatgtcactcattttaggtttgcctcttttctcatgtactagattcagtctttgcattctgggcaggaatagaaatgacactgtccatctatgagcaccatgttggtagcacgaagtgcctctttatcccattattggtggtgttggctttgttaaggaggtatctctggcgtttctacactgtagactttctattttccttttgtccttaataaagtatcttatagggagatactttgagactctataaatagccagcatactttcactcactagctttagcatacttcctagtttgtatttagtgaggaataggctgaagatgacaatggcagtgtcagagtttattattataatttttagaatcatgaggtaggtaacaacacagtgccaaggagatttagttttccctaagcttattctgctaccgaaatgagatacattaagcactcagagatgaagcacaacctaatttacctcacagttgcatttgacaagcttggttatattttgggaaataaatttgaagcaacagatgagtaagagggagtggtaagaggtattagacacgatgctaatagtgacagcttggtggtgattaagaatacaaaactaaaaatagcaagtagatctataaaaagctagccgattgttaccatctagcgtaggtgtatggagctaaacatatttattctagtccatgagggtgattatggcatgagatgttataaggcacgattatgtcctataatatggcatttgataattttttgtacctgtttgaacaaaagattcatggtgagctagggatataaccaatacaaataaatttatcaacaactgttagactctgcagtgtggcactcccttgagaaatttgtctttgaggattcaggtattataacttggtagggcttactccttttttgtgagtgtgaatttttttttttttttttgggttcgggcttactcttgctcactaaatcccaagatttatatattcacatgctaatacgttaacaatgcaaaacagtgctgtctggtggatccctgatttgtgtgctttttagaaagagcacattgctgttgggtaggaaaaacatatgaagccaggttctcaaatatttgtgtggtaaggatggagtaacaataagggaattccattttgtattttgaatgtttttgaggcattgtttccaaaagtgtgttccatggacttggcaactcataaaggtactttgcaaaaggaggaggaagtgctgcgcaaggcccttctctaggagagtcacaggacatatgggcatcctaatgacaagagtctttcctaaacaatctgttgaactgagattaacccggtgtttcccaaatagaagtgacacagaaaccttttccccccacataatagccctcaaaacagatgcatattagcatcagacttctgtagttacatttttcttctaagtgggacaagatgaacttgttggtttaccagacaccaatttttgacttttttgtttttttatttttataaccttttgatcaagttaaccatcttttccctccctccctccctcccctccctccctccctccctcccctccctccctccctccctccctccctccctccctccctccctccttccttccttccttccttccttccttccttccttccttccttccttccttccttccttccttccttccgtccttccttccgtccttttgttcctttatataaccctgttctatcacttaagtattgagcttaacttgcagagagaaaccattgctaagcacttgggaatagggggatatttgtgattatttaagcaatgttgtgcttataagatttctggtaataacacagtctaaaggaaatgcttcatatcctgtggagtagctttggaatcctatgtatttagaaggatttctttcaaaaatgtttaaaattataagttttactttaaagaagttaatttcttttacctggaaaattgaagcaagttagactattttgtggacttatgcagtacttgtcaaaaggtaaatgttttttaaaatttctgttagtaaggattttacctttagcagcttgttattttagttatctgcttagttgcttctaatttgaattacttgtagctccctaatttagattgtaaaatgttatggctctgttatatgacttaagtttagaacacagtgggtccacttttggatcccattcaaagtggatctgatgtacttattttcctacacagttaaagatccctcttcaaaggtgaagcagagacacaataaatttggatcttgaaaccttcatagtaatatgctttttaaaagacatgtatacataattgtatagccattgcatatacttttatacatacatttctttcatatacattactgtcaggaagatcaggaagataatgtcatctctttagtgagataaattccaactccatcgtgaccacttaccatagatgtgactctgtatttgctgttcattcattcaatatgtatttatttgccttgtatatagtatgtacttatatgggcactggtcatagaaagaggaaactgaatggttcacttaacttttgaaattgtcttttcacctatcagggatgtgtgaatagtattgatgtaaagcacttggcacgtggtaggttcacctcttttttttttcctgagatggaatatcgctctgttgcccagactggagtacagtggtgcaatctcggctcactacagccttctcctgggttccagcaattctcatgcctcagcctcctgagtagctgggactacaggcatgtgccaccacacccggctaattgtttttatttttagtagagacagggtttcatcatgttgaccaggctggtctcaaactcctgacctgaagtgatttgcccgtcttggcctcccagagtgctgggattacaggcgtgaagcgccacacccatccaggttcacctcttgagtagagtgctgagatgctttctcacatgagattggtttctagtaataatagagggtttttttgctagttactttcttattgtatttatcttatagagtcttggttcttacaaaatcataatttgctttcaaaaatacatattttaaactacctaataagatctttatttagtgtcacatttacgaagggttgatgcttattttagtgatgatttgtcattaaaattatgtcaaaatgtcttaaaatgttgttgaaactgtaagcaaactcaacacgcacaaagctaattatgggtgccatctgtttatttttacaaagctttttttttaagactatggcattgtctgcttatgataagcttcaagattattataatgactaagtcctgtccttcaattagtgtagttgaagatgggaagataattcgtttgttcactgaccttttcctgtgtcagagtgtatgaaatatgacatgtcatgataaagaaactattgtgaagtgcatttagaagatacttaatttttatgagaaaaaaatgacatcaaagcagcagatgtggccaaagttttgtttaaattcttagaacttattcaaggttttagatgaacggtagacttttccagtgacttaagtggcttcattttaactcaaggttaagaatttctaagtgatcgaccaagtttatgttgacatgtatccctgtttgtgtacctatatgtcagcacatgtttttgtacatacatatctcatgtgttagtgcagaaggccaggtacatgcatgacagcatcagcccaagtagttatcagcaatctgctgagagagcagagcgatcgcactggctctgttttgcaattgtgcatgctaagcattacccaagtcagtgtggagggaaagcaacctgaaggatccatctgctcccttctgctacactgcctcgatgcaagattacactaatctggctgcttgtcaggacaggttagtgaaagcatgcaagtgggtgagacttagggtggactagtgctttggaaaatcataagctgcccctgtagatgccacgttaagtgcagcagaataggttgattatcggccacattgaagattgccgtgaaataaatatatagctttttggttaagaattagtttcaaaattaaaattcttaaatattgttggaccacagataaatcaaaattgagaaaaataatacagatagtttacaaatacttttaggccttagtttttcttatgatttgtgtattgtgtttattctttcattttattcccctagctcaagagttttttagtcaaatatgttcaaatgttacattcgattaacttcattttacccaaaaacttttgtgatttttcttgtttgtttctatttatttacccttttctacacctactgactggcagaccttggccttgcaggttgagcatcctgtcacagaatgcattactggcctggacctagtccaggaaatgatccgtgttgctaagggctaccctctcaggcacaaacaagctgatattcgcatcaacggctgggcagttgaatgtcgggtttatgctgaggtaaaatgaatggtgttgggaggaaggatggtggttatgtccagagtcatgagacctggtatagccaaacaatgaggtaaagttagggttttataatgttgccaactattggattacgtaatccataattaaatcagaaaaaaattagataattttgacctaattccagatagttttaaagaattgggcttagttaattgtcatgtatttgtagatggggaaatagctaccaatcctttaagaggcaacagagcattggttaaatactcttgagcttgaatggaccatggtttttgttttgtttgcattttctttgtttattttcaaacaacactaacaagaagtagcatttatttccatgggttttttaaaaaaatgcccaccttgggtacacattagttgttgatcagatatttacttaaaatttttcccaaccttttttttgtataattttctcctttattattacataaaaataacaatcaaaatttaaattgtaaagcttttagtaaaacatgtactcttaatttataattttaattttgggttttactcataaactctcagttcagtacttctaaatgctttttttcaaatgactaaaacaagaatgcaaggtaacatttgtactatttttacttttcgacatcaaaaatgtctgtcaagattaaaaataaatcagtgtctgtgtttaagaatactgagagctggtttgaaatatttttcaaggagttcaaaaatatgttttggcgtgactgtattgctcttgcttttttcatattttaagtagtattactttcattcttatgacactgaacctgtttattctgatgatctaagatatttacaaatgaagtgcatatctagtagcgtgcaaagttttttttttcaggtctttatttgaagaacccaaattctcaagttttaccatatgtgaactgttttgagaagtaagaaaaacaaatatctttagtataccacatttgttgttctaaacttgagtatgttttgatgtagggcctaggttattttattttttgcccaaggcattctaagaagttttataaaatgttggaattttaccaatttcaataaagtatgaacaaggtcaggctaaattctgcttacagttctgtttgatttttaagtacattctaagttgtctagcgtaaaagacaataatattctgaaatctgtgatttggtaaataccatatgttgaaaatagacctataaatggttcttcattgtgtaaatatttaaccttacttgtgctgatttatatttcaaagactgtgcttcctttcctttgaactttcaggacccctacaagtcttttggtttaccatctattgggagattgtctcagtaccaagaaccgttacatctacctggtgtaagtcattaagctgtaataccagctgaagggttaaaatcgtgatttatgtcatacttttatgttaaagcatgtcaacaccaaagggtgtaaattgaaggacaagtgaaattcatgggaatcatggtttttgtgttgaaaacaaatttttttcagtattttgtggtgttcaagaaagtcaggattcactggacaggggaagcctggggacatctgatgatataaatgatagcttacagtgttcccaattctttcgaaaattataataaaaaaggctgtgaatcctaagaatgagaaatgatgttttgtgttacaatttaatcttttcaataaatcgagtccaaccctgctatatagtcacttgtcaagaaattcaagcacaaaatcagctccttaattgaaatttaaggagattgaattaaggcaaacaaagtgtgcctcagtctattaaacctcatggactttaaagagtaataatatttatatcagttaaataaaagtgaccactgtccattttattccatagctcttctgtatttaatagctattttgaaaatagtttttgttgcagaaaaagagcaaggacataccctttttcttaatcaaggtaataagtgcatatatatatatatatatgacattatgttagctagtagatgacaaggctgtaccatctgtgaatattcaaattattcattttgattactggcatgaagatggtgaaagattacaggaagaattctaaatctgaagatattattggatatatgatttatttcactttttaaattgtttttgcccatgtgctttctaaagggacttgaccctttctgtgcttggagactccatgctgtgttcaaagccagaaggcagaaaaaaaattgtgaagatttaacaggcattatgtgacgttaaatagcacatgagaaaacaagtatcatagggacatatctaaacacttttttaatcaaacaaaagaagtattaaataagaattcataatgattactctagttgttagaagttttcaccatgttgtaatagctaacaggatgtcaaacattttgccctcgcaagtttttgcaatttgcaattttcaaacgtgagacctgttgaaagtacaagtgataatggacaaactataccccctacagtcttcatcccaccaaatctttcttcaattaatgctgcagcaggagttttatgtaataacatttgcagttgtgagccatccatagaaagaaaaaacaattaaaatgccttaaatgttctgcttactgctgttatttgcttgtgtgaatgttgcatgtcagctaaatggaccaaggagtagataaagtgattgggtgcaggagagtgcacactaagctttgtctatcattattgctgggagcaatcaaattgatgtcagcaggacagtagatgcgttgacagctgtaattatgtatctccatggtgatcacttttggcctgtcatggaggcccatgagtcccctcccttggaagcatttaatcagattgggctgtcacttgtcaggtagacatggcgggctgggagttgtgcttagggggagaggtgaattgagaatgaagggtgggagatgtctgatagtttcacagagtccactgtggtactgaagacagaaattttaattatgctagaggtttctgagcagtggtttgagaatctcgtacagaggtgcttgggtgttttgttgtggttgttattgtttgtttttcttccttgtcttattaaaactagagcagtcagtttaccttagaaaacaatttttggctcttaccttttttggtcacaagaatgcatacttaagagttaacttatggtttgtacttttcacatgcttcattaagcctgagatttattaatatggcagaggtgaagatttccttttttatttttgatcatcatgttttgtaaatttgttattttcagaccacagttttgttctgctcagaaatttggttctgatttcatttgaattttttcttaaagtttttagtgcaaatttgtatagcctttcattgaaggaatggagacttgatctgacttcagattggttgttaagaaataaaaatatagctgattattacttggaaaaagcagcataaatagtaaattataaagcagagttttcatactgtggtacagtttttaattgggaatactgatttgcttatacaaagatacgtgtttatatatatcttgattttatcgtatgtattttaaagttaagatgacataacttctgtgatcataatattagtaaataacaaagacagttatatttaattaagatctgtaggtaacaccttataggatgatattattcaaggcaactgaagttttaagtaaggaactgtagaagaacataataaatattctttattgtctatgttattttatttgtgggttgaacatctaagttcttcctagctttgtagcagtttatgtagcaaatgataggatgtagttaaagtcagaagttttagaacttgtatcagtctcgtttgtaaacacagcattagcaagcatgctgtggttttaaagatgacatagtggtcaaattagctctttcactttttagtactaaaattaagaaaatgaaaactcacagatatattttctgttatgtaacccgtttactagttgccattttggggctctttaatgtggggaaaaggtagattgtgattttattgcttttaaagctgctccattaatttttttctagtttttgtcaacactgtgaatttcatagaacatcagtttatgtcctgaaatatgttttcagaaaatagaaagccaagtatatttcgtaagtgtgctgaatgatttttgtttataattaagatttttgtatatgaatgtgaatacgaatacagatatctatatttttgtttgtgcttgcaaatacagaaataaaagcccttcaggtatgttatagtgttccttttacaaccttacaaagagaataatagtagtgtgaattttaagaaaatgaaactatcgcttgtcttctgatgtcaccgtataataaagccatcattataccctcatgtggatatcctagacaagaggttctacatgtggtcccttgataattgcctaaattaaaatattaaaggcctaacagccgctgtgttgacctttttctgccttgctgcagacagatgagctgctgtttattaggaaggcttcttcccacaggtggaaggctacgtgagcttccgctcttctcttcccacccctttacaatgttgggcatcaaagtcctgctgttccagcagctttgattcagttcctccatcctcaagacccctaggatgtgcctgacagtctgaagtattttgattagcttttaaatacttcagattccaaaacttctttctaataatttaataaatgttctgtcctcagtaactgctcatttttaaagttttgcatggctaacctccgtgccttgctgctggtatcaaactgggaaatgaaaacaagaatcagtgatgtactaactcactcgttggctggttaacagcaatcagcctcttcaaaagaatattttgaacttgtgctatccccctaccccccaccccaagaaaatcacaaaatcagaactctaattggggctttacaaagcaaagccataggaaaagctgtgtaaacatgaaagcctcaggggagcaacagtaacagaaaaatagtgttttacagttgagagggtgaggcagaaaaggaaagtgttacagacatgaaaggcccaggcccacattcctatggagctgaggaccaggcttgacgaggggcctcactggtgggctcagaagggtctggcagggagtgcagttagcaagggcatcgtccatgccatgcttcagctggaagacaccatcagagagccacagcatcctggcatagtgatgtaggaagtcttcattttttattttttatttttgctgttttttagtttcgtcattcagtggcagaacaaaaaatgtgttgcattacatattaacggatcaagattttagattgttttcctattttccagaagttgaaatgttatttgagattgaaattctctatccattttctccatggaaatgaaattggtggttacaaaaaaatatctacacaatatgaattacttttctttttttctttttttctcccaggtccgagtggacagtggcatccaaccaggaagtgatattagcatttattatgatcctatgatttcaaaagttagtttaatttctcaatggattatttgatttcttcgaaaaatcaatgatatttaaagagtctgaaactgggcctttatctgaatcataagctataattaaacaactaattatgcactgatgtaaatgtgaaagcagagcaggttttttctcttgagagaaaattcagcgttatgttagtttgtagtactcctcctccccaactaaatcatgccacaccatcacacacatgcatgaacaataataataataaacatctaaccagtggtgccagcctaactcattgccatgagaaggaattaaggttttttttggccattggcagaaattacctgagatggaagtatgaatgaatggcaagagttgggctgataggcagtgtttgttagagtactttttgatcttttctcttcagtttttacaaattaccaattatttaagtagatgtgatgtaagagtataagatttgttttgcccacctgtctttttgaagtttgactttccagaataaatgaattgaatttttggatctttaaacccttaaaaccgtataaagtgtaaaatgctgtaataattaagattgtggattttatttttattttattattatttttttgagatggagtctcgctctgtccgccagcctggagtgcagtggcacgatcttggctcactgcaacctccgcctcccaggttcaagcgattctcctgcctcagcctcctgagtagctgggtggctcgtgccaccaagcccagctaattttttttgtttttagtagagatggggtttcaccttgttagccaggatggtctccatctcctgacctcgtgatccgcccgcctcggcctcccaaagttctgggattacaggcgtgagccacaatggccggccagattgtggattttattttgaaaattctgtgttctctgaaatgatacatctgtattgaggaatgatttgtttttcaagccttgtttctcaagatggcttttccccaagtgtcctttttaatgttatagttgcagtaaacaaacacttttttatctgtctttcttcagttagggttttagtgcttttttttgggatagggtctccctttttcacccaggctggagtgcagtatcatgatcttggctcagtgcagccttgacctcccaggctcaagcgatccacctgccttagccacccaagtagctgggactacaggtgtgtactaccatgcagggctatttttttatatcttttgtagaaatggggcttcctcatgttacccaggctgatctcgaatacctgagctcaagcaatccacccgcctcggcctctcaaagtgctgggattacaaacgtgagccaccgtggttggcctaagttattagtagtattaaaataaaatttaggtcttttgtttattagagaaccaccatttaatttaaaaataaaactatgtaaaaatattatacgttgatttttaaatattccatttttagatgaatgtttttctcttcagaaaaatggcctacaaattaattttcaaatttgcttgatattgaagagctagtaaaacctactaaaataatcacaatctatagattggctaatataactgccagaaaaatctttaatgaatagttaaggtcttatttcattgccaaattatagagatacatataagtaggcactaaatcatgtagaatagtaagacttttctgtttttttgatttctgaaaaagtaccatttgcttctgtgtatattatatgtaaaactgcaaatgatttctaagatagtcgtcttctttctttatacttttatttttgaaactttactttttttgttagttatgaaagtgttaagggctggacgcagtggctcatatctgtaatcccagcactttgggaggctgaggtaggtggatcacctaaggtcaggagtgtgagaccagccaggccaacatggcaaaaccctgtctctactaaaaatacaaaaaaattagctgggcgtggtgacacacgcctgaaatcccagcttctcgagaggctgaggcgagaggatcgcttgaacctgtgaggcggaggttgcagtgagctgagattgcgccactgccctccagcctgggcaatagagcgagactccatctcaaaaataaaaaataaaaagaaaggaaagtgttagctattcagggtatcaaacttggaaaccacagaaaaatagggaaaaaatgtcttatctaatcctcaccactacccttggtgttcaaatcctatctcatatattcacgtttagctgtatctccttttaaattttttctgtacttacttttgttacgtttttgtttttgtaaaatcactctttactatgataatgaaatgtaggagaagagtctgaaatagcttgattctaatatttatatacttaaaaaatcataattgacatgtattgaaaactgaactatcataaaatttcgagatatatttagaaatctgttatgaaatattttaatttttactaaaatgaatcatttaacatagttctaaatatatatatatattgggttttttgtttgcttgtttttagctaatcacatatggctctgatagaactgaggcactgaagagaatggcagatgcactggataactatgttattcgaggtaaaaacaaagatttgcactcgttggttattgtatatggtgtccagttccagagaacagcctgggggtttaccaatgagaatatggcacagcacatttgctcactatgtgcttaaagagaaataagaaaaactcaaatccatcaaaccaccataccaagtatagccgtttccactgttttaagcaaatgcatattttctctatatgcctaacatatatattactctatataaccagtacacattggttacacaggccttcaggagggcgtcttttttcttacagaagtaatattgctgtggagaggtctttagtgcgtatttgggacacacgttcagtttatgtgagtttatctatgtttatctatatatgcgagtttagatagacataaataagttacttgggaagattattcctggaagacattaaagtatttgtaagcacattctatggggattttctccctttttatctctgcatttttattgtggtaattgaaatactagattttggttaatttaatttttactctaatgtgcttgagcagtaaatccatgaatttgagagtctgaataagaatattttgtcaaaactcatttctgttaaactgtgatataatacgacataggggcatggcatctgggcagtttgtcaaaatattagattagttttggtcccaactagaagttatttatctactccatctggcttctgaaaggagtactcttttgtatttacatgaataccatttcatgttttatacttaaatgaacattttcccactaatttgcttactctatatatgtatatataggttcaccagttactacagtttttaagtgactaaaatacaaagtaggcttgccattattctcctaactttatatgtgtcacatataaaaaataaattttgttgtataggtagatttttccaggcttagtctgaaattttgcctttgaattactgtgatgtagtagacagaaaccagacaaagctaggttcatagcccctgtcctgacgccatttaataattatgtgatttttggccaagcacggtggctcacacccgtaatcctagcactttgggaggctgaggcgggtggattgtgaggtcaggagttcaagaccagctgggcaaagatggtgaaacccagtctctactaaaaatacaaaaattagtcaggcgtggtggtgggcgtctgtaatccccgctacttgggaggctgaggcagaaaattgcttgaacccgggaggcttagtttgcagtgagccgagatcacgccactgcatgccagcctaggtgacagagtgagagtccgtctcaatgaaaaaaaaaatttttttttaaataaataattacgtgatttttgtcaaatgactttgtctctctgaatctcatactccacatttgaaaaatggagtgatagtctctgccttataaattactggtgaggattaactgaggttaagtatataaagggcttggcaccacactggcttatgttgttcaataactttagttgtcatcctttcttcctctttcctcacacttaataaaaccatatatttaagaatcaaggccaggcgtggtggctcacgcctgtaatcccagcactttgggaggctgaggagggcagatcacttgaggtcaggagctcaagaccagcctggccaacttggcagaaccccgtctctagtaaaaatacaaaaattagccaggcgtggtggtgggtgcccatagtcccagctactcaggaggctgaggcaggagaatcgcttgaacccaggaggtggaggttgcagtgagatgagatcgcgccatcacactccagcctgggtgacagtgtaagactctgtctccaaaaaaataaaaataaaagccatgtgttataaatcacattatcaatccattagtcatatgaaatttactaaatcatagataaacaatattgaaagaccgttttatgtaatttctaatactgtgtgcggaggttatatgctttcattgcaccctgttcaaatacttctccagagaatttaccgtcactgtaaaattaaagtattaattgtgtaattaactgtgaaatgttgggttatcctataagattattaggcacatgaggacactgatgatctttatcttgtttgtatgcatattgctggtgcttagcagtgtctgacacatgctagatgattaataaatgtttgttggatgaatgaatgagtgagcaagtgatactatccctgatttcaaggagttactaatatacttggtgtgaaaacatatgaaaagataagtataatattaatatagctttgtaggtgccccaataggggattgaaaaagggtagtgggagtttaaggaagaggctagcatatctttcttttctcgcctctcttggtcctttgaaagtaactagtactgctttaggactcatagtgtctctgtgtctctgtcgagagtacctcactttgttctgctttcaaatgatcctcagagtggcaggatttttaaaaagactggtaatgtcctgtgtaggtgaaataaaggggatgggcacgctcaagcgtctttgcagtatcacttgttatagtattttgggaaaataatctggtgttagatgttaaaataaaagtgcataccctctgacccagctattcatcttttgtgaatctttcctatagagttaaaaaactgaattatgagcatgttcaccatgacatttacaacaacattgtttgtagtagccaaaatgctgaccaaccacagtgtccgctaaatggatgaatgactgaataaattacaatgcattattactataaaatactatgcagctgtgacttaaagacctgtttgtatgaatcgttaaagtagaaaagcaatttgtagtcatgtgtagtacattctcatatcacttgaaccatcttctcatcctaaaatattttaaattgtgttggatgagcacagagaaaggtgtggacatctacatatcacaataatttttttaagctcaaaggatttatgagagaggggtttttcttgacacatttctcttagactttttaattttaggtattttcaaatctatagaaaagatgaatgaatagtactgtgcatgcctgtgtactcttcacctagattattatttaataaacttttttttgatatttgctttctctatttctccctttctttgccttttcctcttcctttctcacccttcctctttcctttcctccctccattctcttctctgtttttctcctgatccatttgaaagaaggttgcaaacatcatggcgcatcactcctgaatactttaccaggcttcttaaggggaagaccatgttcctgtaactggatttttcttgcctgctgcacagatagagtctatttattgagacagcgttattgcaatagagaaagagtttaataaacacagggctggctaaatgggagactgaagttttattactcaaataaatttctcccaaaatttggaggctagggtttttaaagaataatttggtgggcagggggccagggagtgaggaatgctgactggttggtttggggatgaaattataggtgcttgaggcagggtcttcttgctaccttcagttactgggtaagatcacagaactagttgagccagtttgctggtctggctgcatgactcctgagccttaatttctaatgttagttttacaaatgcagtctgttccccagacaaggagggggtttgttttgggaaggggctgttttcattgttttacagttaaagtataaattaaattcctcttatagttagcatggcctacacccaggaatgaacaggggcagcttggaggttaaaagcaagataaagttggttaggtcggatttttctcagtgtcataatttttgcagtggccatttcattcctgcaaaaaagcacaataccatcattacacccaaggaaaattgacagcaacctaacagtttcatctcatgtattgtccatatttaagcttgtccctcggagtctttttttattgttttttaatcccatctgtggcccaaagttacacagtgtctttgattatgtctctttattatcttgccgtctttcatatttcatttcattaattttcaggagagtccacggtagttgatttgtagaatgtggcacattctagatagaaagtgttaacgttggttcactaaaggcacttgtgaagtgattccaagaatgagggttgtaggtgataatttgcactatcactcacagaactcgcagaaactctttgcttactattatcagtttattataaagggtacagcttgagagtaacccagtggaggagatgcacagggcaaggtgttaggaaggggtgcagagcatccatgccctctccaggtgcaccaccctccatcacttccgtgtgttcagcaacccacaagtcctctgatccttgtccttgggtttttatgaaggcctgactaggtaggcatgattgatcctatcaatctgccattagtgattaagtcattcttcagtccctctcccctttggagggtgggggtggggctgaaagttccaaccccttaatcacatggttggatcctctggccacctgctcccatcctctaagagtcatctcattagcataaactcaggtatgattgaaaggagcttgttatgaataacagaagacattcctctctcaacagtcatttctatgatattcttgccaaaaatgtacaacctgagtataatcatgaggaaacatcagacaaaccaaattgaaagacagtctacaaaataaatggcttcttctcttcaaacatgtcaaggtcaggaaacacaaagaagagttgagcaacttatgtagatcaaaggaaactaaagacacatgacaactaaatgcaatgtgtgatcctggtttagatcctggaccagaagaaaaatgtttttcttttgtagtaagggtcataagtgggacaattggtgagatttgaataaggtctggagatgaggtgatagcaatgttagcagtgttaggcttgtctgattttgatccttgtactgtgattatagaagagatataccttgcttttaggagatgtacactgacatatttagaagtaaaatgacatcttgtctgcaacttaccttcatatgtttaagaaggaaaattatgtatctgtgtataaatagaaaaaattagtgacaaagcaaataaatgtgataagatgttatcatttgtagaacctccatatatagtaattctgcttactatttttttgaaatttttttaaattttgaattttgaaattatttcaaaataattttgaatttttttattttgaaataatttcaaaatttaaaaaatttaaaatttaatttcaaaataaaaagttaaaaaaatagggaagagcaagaacccccactctccactaatatttaaagaataaaagcagagatgcatttgggattttgaacttacatattactcatctggctaattctgaaggataggcaggtttaaaaacttgctttatgaaaggcagaaaagggaagacaatctactgtcttgtttggtaactgcttaattattcaaatatgaatatttttttcctgtgctgattgtgaacttttgttaagatagagaaactttgaagcaaaaatgtaattcggttaaaatgaatttcaaaatcctcatgaaataagagtgcttttggcctctgtttgatcctggcagcatgtctagctgatgtctgggcagtgttttggaaccagcaggcagtcaggggaaggccactcctaggggcctcttctctgtggcctggtggtgatttcccatacagatgggacctggtgaactctgccagaggtcatccttgactcccagtccacacctcccagtcataatttttatgagtatgtgattaataatatccttgaagttgtaaactaactctcaaagaatacctctactgtccccataccatttaaacaaggatctgttcaaatagtgttgtctttcctgggatgtgaaaagaaagaaactaaatgcaaaatggtaactttcaaatctgtatgatactgtttagtgcttcagtgattcttcccatctagctgatcttttgagctcttaggtataaaatacttttctgattattaccctcttttggctttaggattaattaatggacagtagtttcgggaacagttagtcgaggcatagatgtttgttgtctgccatgagccattatctcaccatattggccttaggaaagaaaaagagataacgatttagttttgcatagtcatatataatattttatttagaaaacattaaagagaaaatggttttgtgttttaattttgtttttaaaatatcatttagtgagataaaagtctgtgtttttatgctgtatttactattcaagtagaaagatttttaaaattccatgcttcatttacgtgcttgatggctctgttctttgatatccaaaatgtaaattaatatttgctttcaattcctttgagttagatttttctaaaattaacacctatttttcagctttggatatagaggacaaatacaacatatgatttatcctgtgaaactgcaagcatgttaactttctgaatattatcagtcacaaattttgggcatcagaaaataatctctttttttgttcaaattgtcattaactatttctgaaaactatattgtattttactgatgacagagtttggttccacctattttaacattggccacacagggagctaaaaaatttataccagcagtaggctataaacatgaaagccagtaaagttaaatatgaaatattaaatatatatgttaatagtattctttttttttttggagatggagtctcactctgtcacccaggctggagtgtagtggcatgatctcggctcattgcagcctctgcctcccaggttcaagcaattctcctgcctcagcctcctgagtagctgggactacaggggtgcgccaccacacctagctaatttttgtatttttagtagagacggggtttcaccatgttggtcaggctggtctcaactcctgacctcaggtgacccgcctgcctcggcctcccaaaatgaacaatactatttctgtttaaccagggcagggaagttcaaaaatcctgagactgcctgctaacttacttactgttttgcaaaaacacttgtaaattgaaatattctgaattatttatttgtacataagatcaatatttttggtaaaataaattgttgatgtaccttggtctaatacctttcatcccttccagtccctcccttagagtcttattttttccagaactttatttatttattgtaatatatgagcgatttgcatattgctggttttatttcacgtttctctgtctcaccctgttttggattccttcacatatgggagatgttcccccataagtaggaacgtctgttttctgatgtataccatcgaatctgcctgcttttctgaaccttaatcattcagacatcatctcacaggcatctcaaatttaacttgtccatgaatctgctattttcctctcaacctgtttcttctctgcaaatggcaacttctctcatgttgcagagccagaactttgggtgttgtgctcatctccccattctttgtaattgtggttgttgttttgagacagggtctcactctgtcacttaggctggagtgcagtgatgggcccagggctcattgcagtcttaacctccagggttcagctgatcctcccacctcaacctccctggtagctgggactacaggcacaagccagcacacccagctaattttttgtatttattgtagagatgggattttgccatgttgcctagactggtcttgaactcctgacctcaagtgacccacccacctcggtttcccaaaatgttgcaataacaggcatgagccactgcacctggccctcatctccccattcttgccatcagtccctgcctgcctcctgaatatccgtcaagtccagctgcttctcccatctgtattgtcagtgtcctagctgtggaccccagccttgccatttttcagcatatctccgcaattgtcccctaaggaatttttccatcttccctcttgcccttcctcagtcccttttccgtatagcagcctaagtgattctggattgcataaatctagtcatacctgccctgcttcccattctagttgctctcatgggaatgtggaatctgtgcatggcctatcacacgctgaatgcctattggccttttcactgcacccagcaccgttctctcctttgctcatactcagaccatggtgttttcctttcattcctctccataggaatacctggtggtaatcatttgctttttgcaacagtgaaatctctctctgtctctgtctctctctctcttttaattatactttaagttctaacaacgtgcaggtttgttacgtaggtattcatgtgccatgttggtgtgctgcacccattaactcgtcatttacattaggtatatctcctaatgctatccctcccccctccccccaccccatgacaggccctggtgtgtgatgttccccttcctgtgtccaagtgttctcattgttcagttcccacctatgagtgagaacatgcggtgtttggttttttgtccttgggatagtttactgagaatgatggtttccagcttcatccatgtccctacaaaggacatgaactcatcattttttacggctgcatagtattccatggtgtatatgtgccacattttcttaatccagtctatcattgatggacatttgggttggttccaagtctttgctattgtgaatagtgctgcaataaacataacgtgtgcatgtgtctttatagcagcatgatttataatcctttgggtatatatacccagtaatgagatggctgagtcaaatggtatttctagttctagatccttgaagaattgccacactgacttccacaatggttgaactagtttacagtcccaccaacagtgtaaaagtgttcctatttctccacatcctctccagcacctgttgtttcctgactttttaatgattgccattctaactggtgtgagatggtatctcattgtggttttggtttgcatttctctgatggccagtgatgatgagcattttttcatttgtctgttggctgcataaatgtcttcttttgagaagtgtctgttcatgtccttcgcccactttttgatggggttgtttgtttttttcttgtaaatttgtttgagttctttgtagattctggatattagccctttgtcaggtgagtagattgcaaaaattttctcccattctgtaggttgcctgttcactctgatggtagtttcttttgctgtgcagaagctctttagtttaattagatcccatttgtcaattttggcttttgttgccattgcttttggtgttttagacatgaagtccttgcccatgtctatgtcctgaatggtattgcctaggttttcttctagggtttttatggttttaggcctaacatataagtctttaatccatcttgaatgaatttttgtataaggtgtaaggaagggatccagtttcagctttctgcatatggctagccagttttcccagcaccatttattaaatagggaatcctttccccatttcttgtttttgtcaggtttgtcaaagatcagatagttgtagatgtgtggtgttatttctgagggctctgttctgttccattggtccatatgtctgttttggtaccagtaccatgctgctttggttactgtagccttgtagtatagtttgaagtcaggtagcatgatgcctccaggtttgttcttttggcttaggattgtcttggcaatgtgggctcttttttggttccatatgaactttaaagatccaattctgtgaagaaagtcattggtagcttgatggggatggcattgaatctataaattaccttgggcagtatggccattttcacgatattagttcttcctatccatgagcatggaatgttcttccatttgtttgtgtcttttattttgttgagcagtgttttgtagttctgtttgaagagatccttcacatcccttgtaagttggattcctaggtattttattctctttgaagcaattgtgaatgggagttgactcatgatttggctctctgtttgtctgttattggtgtataagaatgcttgtgatttttgcacattgattttgtatcctgagactgctgaaattgcttatcagcttaaggagattttgggctgagatgatagggttttctagatatacaatcatgtcatctgcaaacagggacaatttgacttcctcttttcctaattgaataccctttatttctttctcctgcctgattgccctggccagaacttccaacactatgttgaataggagtggtgagagaggccatccctgtcttgtgccagttttcaaagggaatgcttccagtttttgcccattcagtatgatattggctgtgggtttgtcataaatagctcttattattttgagatacgtcccatcaataccaaatttattgagagtttttagcctgaagggctgttgaattttgtcaaaggccttttctgcatctattgagataatcatgtggtttttgtctttggttctgtttatatgctggattacatttattgatttgcatatgttgaaccagccttgcatcccagggatgaagcccacttgatcatggtggataagctttttgatgtgctgctggatttggtttgccagtattttattgaggatttttgcatcgatgttcatgaggaatattttagggcctctctgtattgcctaggctggagtgcagtggcacaattatagctcactgcagccttgaattcctggattcaagtgatctccctgcctctgactcctgagtagctgggactacagatgtgccaccctacgcggctaatttttaaattttttgtagagatagggtctttgttgtccaggctggtcacaaactcctggcctcaagcagtcctcctccctcagcctcccaaagggctgggattacaggtgtgagctaaattcctccctaatgttaccatagccttagctacttatctttgggtccttctcatctttctgttttccttcccagccaggaaaatctgtgtaagtctcaaatactttcctcttcccggaacaccaaagctgtcatttcctatgcaggtgaacctttctggcaagtgatacctcttttctttttcaaaagcactctagtttgtctctttgtgaaacatgatcaagggattaatttcccatgttttatttagcctgatctctttcaaggagctttttacatttttgcctacctaattgatctttctaagcatcctagcatattgccttcagttgcttttcactttcatctaaacaaaagcaacgccacattttttcaatgatttcttaggtatattgatgtcattagaaatttcatctgccttctactatgtttctcattaaaaaaacttattaaagccctctgaaacatagttattatgtatgggccaagtaaatcattacccacagaacaagcatgaaatagctgtgtagatctcatgggcatgcgctatagaagatctgtgtgtgtgtgtgtgtgtgtgtgtgtgtgtgtgtgtgtgtgtgtacataaagcaatctataatatatatatatgtatatagtgaagaatatgatcgattctgatatatataactttttccatggaatttttgtgtagctaaaggaatagcattaatttgaatttgtgaatgttttctaaacgtcttgaggcagttttgataaattgagaattggcctttataaaatttagatacatagcatctcttgagtcaggaacagaaatgctcaggattttccatatggttgtggatatggtctagtataaaaggatgcataggaaaatgcctgggagggtatacatgttaagctgttatcattggctagcttagagatggaaagtcatattgaaaaggtgtgccctgctcgctcaaacacatgcactagggtacagggtaacctgctgtaacaaagatttctaaatacagtgggataaataagagagacgtttatttacctctcatgtaactgtctggtccatgctgctaggaggcaagtcagcctcatgaggtcattcaaagatacacacacccatcctgatgtgccactccgtttgaattgccaaagctgagtttctgccatgtcaggaaacccacagtaagacgagaagaaaggaagctcaagcaagcaatgagagagtcggaagttgcgtacatcactttagcttaccttcctttgtctaggaattagtttgtcatgcctacctacaagctagatgggaaagtggagtctgtgtctgggtgtcttttgctcagctaaaattctattactatggaaaaatgaaaagcaggttttaggagaaactagcagtctgtcacaataaactgtgtcttaaaaattgtttatatataattatatatatgtaactattgtgatatataatgtgctaatcattaggtaaactattcagtctctctggattgcaattttcttttttttaattttttttttttcttttagagatagggtctctctctgtcacccagatttgggtacagtgatgcagccgtagctcactacaacttcgaactcctgggctcaagtgatcttcctgcctcagcctcccaagtacctgggactataggcacatgccaccattcccagctaattttctgtttttattttttgtagagacagggtcttgctacattgcccaggctgatcttgaactcctggtctcaagtcatctcccaccttgacttcccaaagtgctggaattaaaggtgtgagccactgcacccagcacaattttctcatttgtaaggtcccatttttctctgtagtttacttattctataactagttgcgcagtttcccaagagcaggtaccatattgtgtgctctcattttccttcccatgatatctaatggctgcatgagtaatagtgtagaatacatgttgatgcatatagataggtttgctcagattaaagggctagatagtaaatgttttagactttgtgggacacaaggtttctgttacaactgcttgactctgctgttacaacatgaaaacagtcatatgtaagcaaaccaggctggctgtgttctaataaaactttttttacaaaaataggtaggaggctagatttggccttcaggccatattttgccaaccattgtcttgtaggaaagttacactttccaaatagatacaggtgtaaactcagatttcaggagctccattctttttttttttgttgtttttttgagacagagtctcactctgtcacccaggctggagtacaatggtgcggtctcggctcactacaaccttcacctcccggcttcaagcgggaggcctcagcctcaagagtagctgggattacaggcgcctgccaccacgcctggctaattattgtatttttagtagagacggggtttcaccatgttggccaggctggtctcgaattgctgaccttgtgatcctcctgcctcggcctcccaaagtgctgggattacaggtgtgagccactgtgcctggccaggagctccattcttaacagaaaacagaactagaagttaggtaggtcagtgctgaagcttaggatgcaggaaaacttctgtctgatgttttattaattacattttgtctcatgctctttgtatattcccatataacaggatagtaatgttcttttttgagagcccagcattgcattaagcattatatcatttatacctgataacaatcatgcataataggttctattattgttaatttacaaatgaggaaactaaagctttgagaggttaactaacttacctaaggtaagggatagacctggtatttgaacttgactatctgattctttgcttactttatggttattgttgcaaaagtggggattctgtgagacttgaatagtaaaatcagaatcatacttcgtaggtttcttatgcagcatgatggtacagattagaaccatacaagagtggactaaagtaataggaaggaatgaacaaacctctgtttactttgacttcagctgtcatgctgcagtcacctgctcttcttgtggaagcctgatgtaatttctgccttccctggatgtaacatgcttcctcccacttgctttcattcctgtgtaacatctttgtaatctggatgaccaagattagatacttcattcttcacaaaaccttcctgcatcctagaactctcccaatactattagtatcctcttgtggcagttacctattttgatattacagttgacctttgaacaacactggtttgaactgtgcaggtccatttatcttggattttttttcaataaatatatcctaaaattatttgaagatttgtgacaatttgaaaaagctttcagacaaactctatagcctcgaagtaccaaagaaagaaaaaggtatgtcatgaatacataaaatatatagagatactagtctgtttcatcatttgctattataaaatttacacaaatctattataaaagttaacatttatcaaaacttacacaaacagagaccatacctggtgccattcaaagcagagagaaatgtacacaaacagtaaagacgcagcatgaaatcataaccacattaagattcactgtagtacatactgtactactgtatagtttcatagccacctactgttgctattgcagtgagttcaagtgttgcgagtatctgcttaaaacaccatgtgatgctgatcaccgctgtgtgatcagttctctctccagtaaattgcatatggcagtaaaaagtcattgcttatggttctggaatatttttcatcatgtttagtgcaaaccataaactttgaataacaggacagaatccatacaaagtgctactagtaatgctggaggtcctcccaagaagcagagaaaagtcatgacattacgagaaaaagttgaattacttgataatatatggtagattgaggtctgcagatgtagtttcctgtcatttcaagataaatgaatcccatgtaaggaccattgtaaaaaaaaataaaatgaaatttatgaagcatttgctgcagctacaccagcaggtgtgaaaatcttgcacttttttgtgaaacacctttcatttcatattgaagatgcagcttttatgtgggtacaggattactataagaaaggcattcccatagactcgaatatgactgtctatgggaaaagtgaagttgttatatgacaacttaaagcaaaaggaaggtggaaggatataaagctggagaatgtattgccaaccaaggatggtttgataattttagaaagagatttggctttaaaatgtgaagacaaaatgtgaaggggaagctgtttctgccaactaagaggcagcattaagacaccattaagaaaatcattgaagagaaaggatatctgctgaacaggtttttaatgcagacgcaagtgccttattctgagggggaaaaaaaagccacaaggaacatttcttagtagggaaaagaagcaagcatgaggagttaagacagggaggaataggctaactctgtctgttgttctgtgcaaatgcaatcaggtttatgatctgcacttatctgtgaagctgctcatctcctagccttgaaggaaaatgataagcaccggctgccagtcttctggttgtacaacaagaaggcttggacaatgagaaccctttttctggattgactccattgatgctttgtccctaaagtctggaagtactttgccagtaaggggctgtcttctaaagttcttttgatatggacagagccccagccacccagaacacatgtgtttaacatcgaaggtgtcgaagtggcctgcttctccccaaacccaacaagtctaattcagtctctagctcagagtactgtaaggtcctttcaggctcattatacacagagctgtatggaaacgatcgttgacactgtggaagagaaaaagtctggaaagattacaccactgaagatgcattgttgtcatataaaaagctgtgaaagccatcaagcccaaaatttgtgctggagaaaactttgtctggatgttgtgcatgacttcacaggatttatgaaagaggcaaccaaggaaatcatgaaagagattgtggatttgacataaaaggtggagtgggggttgaagggttttaaggtacggatcttagaggaatccaagagcggatagacaccacacccgaggaattaacagaggatgacttgatgtagataaatgcttctgaattggtgccagaggatgaagaagaagacatagaagaagcagtgccagaaaacaggatcacatcagacaatgcggcagaaggattctgattattcaagactgctattgacttattttacgacatggacccttctgtgatactggcagtaaaactaaaacagtggaagaaggattgaaatcatatagaaacatttttagagaaatgaaaaagcaaaaaaggcagacaaaaattacaaagtatattcataaagttatacagagtgtgccgcctctcctgcctccccttccacctcctccacctctcctgcctctgcaacccctgagacagcaagaccagcccctcctcttcctccttctcctcagtctactcaacctgaagaggaggaggaagactgttatgatgatccacttccacttgatgaatagtaaatgtattttctcttatgatttgcttcataacattttctttagctttattgcaagactgcagtatttaatatatataatatataaaacttgtaattgactatgttttcagcaagggtttcagtcaacagtatgttattagtatttacttttttgtagcatcaaaagttatatatggatttctgtctgtgcaggaggcacccctaatcctcatgttattcagtcatcacctgtgctttgaaattgtcattgtgtactaggctcaatttttttctactagattacatgcatctttaaaaaaatgacttattgaggtatacttgacataataaatttctgatatttaaagtattcaatttcatgagttttgacatacgtatacacctgtgaaaccattaccacagccatggtgttgaacacttctttcacctctggaagtttccttatggtctttgacatttaccctccctctacccctttcccagtgtaaccacatgatctgctttctgtcactgtaggctcgtttgcatgtcctaaaattttatattaatggaattatacattattatgcattatttttggtcttgcttttttaactcagcataattatttttaggtttatccttgttatttaatgtgttattgactctgtgtgtgtatgtggaatagaattccattgtatggacaagcccagttttgttaattcatttgcctcttaatggagatttaaattgtttccaggttttgattatagtaaataaagctgctattaacctttgtatgtaagtctttgtatagacatatgtttttatttaacttgacttaatacgtaggagtgagttgtctgaatcagtgaatatatgtttaacttttccagaaactgccaaactgttccaaagtgtgtgtatcattttatattgccaccacagtgtgacaattcttgttccatatcctgactagcacttgctattatctgtcttttcactttggccatgtaaatcggtatattgacggcatctcattgtgtttctttaacaataatgatgttgaacaatttttcctatgcttagtggacattttgactgtgtttttttacttggtgtgttttttgtcttataattgtgttgtaagtgttctttatatgttggtagatacaactcccttgttcaatatatgtattgtgggccagacacggtggcttatgcctataatcctagtactttgggaggccaaggtgggtggatcacttgagcccaggagttcgagaccagcctgggcaacagcaaaaacgtgtctctacaaaaaatataaaaattagctgggtggccgggtgcagtggctcacgcctgtaatcctagcacttcgggaggccgaggcgggcagatcacgaggtcaggagatcgagaccaacctggccaacatgatgaaaccccgtctctagtaaaaatacaaaaattagctgggtgtggtggcgtgttcctgtaatcccagctacttaggagactgaggcaggagaatcgcttgaacctaggagacagaggttgcagtgagccgaggttgcaccactgcactctgacctgggcgatagagtgagaccctgtctcaaaaaatatataataataataataataataataataataataatgatgataataataatatattttatgtgaatatcttctctcaggctgtagtttgttattttattttcttagttgcctcttttgaggagcagacttaaattttgatgaagtacagtttgtcaatatttttatagttcatggtttctatgtactaagaatccgttgcctaccttaaggtaacagattttttcctccatattttctactgtagttatgaaaataggtttgtgattcatttggagttaattttttgtctatgttgttaggtgttagcgttgaggttaattttttttttttttttttttttgagatgttgtctagctccgtcgctgaggtgggagtgcagtggtgtgatcttggctcactgcaacctccacctcccaggttcaagcgattctcctgcctcagcctcccaagtagcggggattacaggtgcctgccaccacgcccagctaatttttgtatttttagtagagatggggtttcactgtgttggccaggctggtctcgaactccttacctcatgatctgcctgcctcggcctcccaaagtgctggaattacaagtgtgagccaccgcgcctggacttttttttttttttttttggtccaaatggttagctgtttgttctagtaccatttattgaaacgacatttattaggttggtgtaaacataattgcggtttttgcattgctgaaatttgctgtttgatattggaatacattcttaaataaatatggttatgttatacatcattttaatgtacatttctcgctttgtttttttgctaatgacttactactggctgtttaatttatatttagagtatggaaatgatgttagacaaaaagcaaatctgagcaattttcttatttgagtttaaaatgggatgtaaagcagcagagacaacttgcaacatcagcagcgcgtttggcccaggaactgctaatgaacgtaccgtgcagtgatggttcaagaagttttgcaaaggagatgagaaccttgaggatgaggagcttagtggccggccttcagaagttgataacaaccaattgagagcagtcatcgaagctgatccttttaaagctacatgagaagttgctgaagaactcagcgtcaaccattctacagtcgtttggcatttgaagcaaattggaaggatgaaaaagctccatgagtgggtgcctcatgagctgactgaaaataaaaaatattatcattttgaagtgttgtcttttcctgttctacaagacaatgaaccatttcttggattgtgatgtgtgatgaaaagtggattttatatgacaaccagcgatgatcagctcaatggctggaccaagaagaagctccaaagcacttcccaaagccaaacttgcaccaaaaaaaggtcatggtcactgtttagtggtctgttgctggtctgatccactacaggtttctgaatcctggtgaaaccattacatctgagaagtatgctcagcaaatcgatgggatacaccaaaaactgcaatgcttgcagctggcgttggtcaacgagaaatgtccaatttttctccataacaacacccaactgcacgtcacataaccaatgcttaaaatttgaatgagttgggctatgaagttttgcctcatccggcatattcacctgacctctcgccaaccaaccaccacttcaagcatctcaacaactttttgcggggaaaacacttccacaaccagcaggatgcaaaaaatgctctccaagagttcgtcaaatcccgaagcatggatttttatgctacaggaataaacaaacttatttctcattgagaaaaaggagctgatgtaatggtccctattttgattaataaagatgtgtttgagcctagttttaatgatttaaaattcacggcccaaaaccacaattacttttgcaccaccctaatacagcccgttgacttgacttggcaataccaagcttcttaaatttatatttagtgttttattgataccacaagttcagatattttttgttgttaatagaattcaaggaaataagtaatcttgaatggtttctgctaggtcatagaacagtgatgataaatttctccagattatcagaattcaatttttcactgattcattgttcttcaatttgatatcattttacttttaggtgttacacataatattgcattacttcgagaggtgataatcaactcacgctttgtaaaaggagacatcagcactaaatttctctccgatgtgtatcctgatggcttcaaaggtttgtatgcattaaaatattttagtgttttaaagttgttatttttatactttattgtaatacataatttcactctattttgaaattaaggccttttggcttatattatacttcatttttagaacatgcaagactgtttacattcatgattttgagtatttatggatgactcatgagtgtgataatctgcagtcttgtggagtgcagaattcaaccatgtgaattgttctatgagtccagtgttttggagcaaaacatgtagatagatcattagcctacctgacttcctggtttctgaaaatcaaatcagatttgtattttctactgaggtgagtatataaggaactcttctaaagtgatttttaagagatatattaatgaaaatagcactgaaaatttcagaaaaccagattctggtcctattaatgaaaatctaggaagatgatgattttattctgaaaaatgaagttttcaataaagtaatgagtggaatgtgaaatttaacacagcaaagttatcagcaagcatttccaggtagtagaaaaattgctcatcaaatgggagatagagaaaaccctttagtgagcattcaaaacatagttaacataagatattgagagataaacaagatttagactgagacttaatagaaatgttactcaggtgaaagcctctacctacatttttaatgagctagtgaggtatgaaggttagatagtctgtcccatatttcaagtgttctttgtatccattaaagtgttttaatgtaaaatgactcacattcatattaggagctatatatagattcaggtcaagttgatgtcgttgagttgttgggtgcatttataaagcagttttcagttcagaatttacaatacagagttttcataagactcaacagagataactgatttgaatattgttttaaaactttagtgttatagagttttatcattagtattaaggcaaatgaagaatggctctaagttgggatcttaaaacaaaaactaatgatttattaggttgtttttcataaacttttgaatttttaaaaatacaaaataaaatacaactaggatagtagttttatacttttgtgactattcttttaatatttgttggtttaatgaggctaagaaccccttacgtcattgcttttcattttatccctagcacaaaacatagtaggtactaagtatttgttgaattaatgaaaaaaaaaaaatcttagccataatattgatgagaaaggattactttggatttttttttttttttttttttttgagacagagttttgctcttttgcccaggctggagtgtagtggcacagtcttggcttactgcaactctgccttccggtttcaagcgattctcctgccgcagcgtcccaagtagttgggattacaggcatgtgccactacccccagctaatttttatatttttagtagaaacggggtttcaccatgttggccaggcttgaactcgaactcttgacctcgtgatctgcccgcctcggcctcccaaagcgctgggattacaggcgtgagctaccgtacctggccgctactttggatatttttaatcatttatacatgtatccagataaccagttcattctattttgatcctaacatttagtttcttgtccttcctaaaattttaattaaaagttgtagtacgttttgaagtggacttaggacttccatgtttttatgtctgcctggcaattcagtgatggtgataagataggaaacagtgggcagaaggagaaaacagggaaaaactacagagaacctttagaacaaacattatatgcatgtatgggtatttatatatatatacacacacacaaatacacatttatatataagtttgtctatatgtatgtatggtgaagtatcccagagaagaagaaaatggggcatttaaattttctaatcagagttgattagtatgtgctggacgtttagcaacaatagagaatatcccaaattctgtagagaagggatccccttcaaactcagaaatgtacttaaacctagatattgcagttttctgtgatgcatataatatattacatttctttttttgtaaggaattaacagcttggacaccacaattttgttttttatgcttagaccaatttttaaaattggcatacattgcttttagcaattatttagttgcagccttcattttacatgtgaggaaactagagctcagagatatcagtaaagctaaatgaccagtaagataataatgccaggaattgaacctaggcttattcaactcctatttgagtagtctttgagttatgctggggttcaaattcataaatcacaaatgttttcaatcagggtatgctacatgttgttatattgcctctaaatactttagaaacacactcctatatttgccattcttaatgtctccctcttgttttattttcttattttcatatcagttcattcttctttgagtggttactgtctgtcattcttcttcagattgctgtattttccccctaaatcaggtcttagatattttaaactgtatcgtcttttgactgtttgatatatgtgcccaagagactgaaggaagtggtaactacagttaatccaggatcctctccatatgtttggggccaggtcattttgcccctttggggtttcccatctgcttcccatctgttcagctatcctaggcactattcacaggcaagcacctatttttatgactgcattaaaattttctattgtatatgtttattatcccacatttatttgtatgtagactaagccagttttactagagattcttagagttaaactttgaaatgattgcttctaaaattaaaaaataggatacatgagaaattattcttgtcatctctttagatgtggatgttgaaaagcggtttcccttgattctgaaaaataaatggaacatgaggaagaagatattttaagaactataatttcatttggcctataatgaacattttgggcttatttctctgataccttcctatacttcaaccccaagccccatcgaaagaaattgtcagaattatctcattcttttaagaagttacagatcttctggtaaaaatttcactcaacacaaaaagtatataattaattatacttctcttttttccactgaatttagtcaagtatatctacactttaaaaaatactactatgatatttggactgaattcaatcattaaagtcattcaacaaataattgatataggctctagaagaaaatcaaagatgggtatattttacctgctcttagtgagctgacatcatgagagaaataataatgtaaagtacccactatactacaggacaggataaagtaagtgcctggtaaagatgtaagcaaagtatcttgacagaagagaaacaaaacaaaacaacaacaacaacaaaacaccggaaacccagttccatttgagggaataaagaaaggctttaaggatgaggtagcatttagactattggaatacctctccggggactctctccatgggagctgggctgcacttgtgagagccatgtgtgcacatctttataagccatcctctttgaagttggtagtttgtaatcagccatgaagaaagtatttactgtaaagaaattggttgtaccctgcggcttttctccttcccccacaccccagttgtttgttaagcatttaccagcaaaccactgcctaactctttggcctgcatattgagcagagtccctgatgtaaaaaggaaaagaattactcatctagggaggaagacctagaagactcactaaggacaggtggtgctcagttttagagctgctgttgtaggaggcagatgactgtgcttactgaaaaatgggaagaacacttaaaaatactgaattagaggagaaagacttaatgaactaaaaaactgtgatttttctaaataaaacaattcagcagtcaatgtggaaggtaggatggtcactactaagatccaaattagtgactcaaaggaataaatggaagtatctcaaaatatgcagcaaaaaggtaaagagaatgaaatcatgtggaaaatgatgagagatatggagggaagatccaaaagattttacacataagtgcatactaggagtttcatgaaaagaaaaatggaaatgaaggataactttgaaagaaataatagagatttttttctcactgttcttaagaaagccttaggtattcttggaaagactcactgagattcagactggattaatttaaaaagtaactccactaggcatataaaaaacaaatacttttttaaatcttctaaaagaaaagaaagaagatgcaaggaatgtacagtgagattatgttcatactctataaactggaagttagaaatcttagaatagtgtctgctacataggaaagaatttgactcaagagtactatacccagctaagatatcgtcatcaatataaacaaatttgttttcagttaaataaggattcagaactattttaccatatatactccttttgaggaaattgctaaagaaagtactttaaccagtttttaggtaagatgatagcttaaaaatatacatatttttccccctacccccaaatccactaacttgagttttttaaagacacaagcccactaggaagaagaaaggaaatagcatttggtaaaatgaacagctgaaagatgattcttaactgacttagtaacctaagaaagttgaatcctaagctgacaatgagagaaactgagaagtagctcattaccactgcagaacccttcagaagtctcaataattattagctccagataccctgggaaattcctaaaggtagcactactgacctaaaatatctgtaaaattttctccatatcacttccctcactcttcagagtaaggcgactctctttccctcatcctggtgtaagctttcagattcttctctgcagaggataaaaaccaggggacaccaggcacagttggacaaaggatcgagggaacatggacataataaatgtggtgacactctctgccccagctttgttcctcagttggttcccaggggactggcaggcagactggtactcacagacatgaaagtagacgatccttgaaaaatctaaccccctggtgagatgacctaaagattccccaacaaaacagtccagccagattaccctacagacaaagctgccagtggtcaacaaagccatagcccacgaagagagaacgggcctggattagaatcaggacctctatctgcattatttaatacaacactgtggccgggcacggtggctcatgcctgtaatcccagcactctgggaggccgagtggggcggatcgcctgaagtcaggagtttgagaccagcctgactaatgtggagaaaccccgtctctactaaaaatacaaaattagccgggcatggtggcatgtgcatgtaatcccagctattcaggaggctgaggcaggagaatcacttgaacccaggaggtaaaggttgtggtgagccgagatggtgccactgccctccagcctgggcagcaagagcaaaactctgtctcaagaaacaaaaacaaacaaacacacacccaaaaaacagaaaacactacatgtaatgggaaccagcgcgtagctgttaaaaataaatggtagacctaaaaccactcgggaaatacacaggtcaggcttcttgaaaactgcatcatgccaatgagggtggccagtagcatgagggtcatagtggcatgtcacaaagcttgtaggtgctgttacatggttttgaactccagtaattagtggcttaatgaacaaggagaggagataataaacattgtttaggggttgggacttttgcatgaaattatccccccaaaagtttaagaaggtaagagttagttgtgaggaggaaggtttttcttctttcagtcacaaatacttatagagcctgttgggtaaaagattgtgctctaggctctgggaatacagaggtaaaactgtcaaaaagcctaaggcttttagaaccaagagttgcagctttttccagccatgtcttcactgaagagcccactgtgcccagcctcgttgacttcgcagtagaggctctaagcttgaatgttgtgaacgttccaaggctgggtttaagaaagccttagaactccatctagacctgtaacaagtacaagtgacttgctcctctgaagagtgcttgaggctgcatgtgtcctgcatgtgaggctggagctctcagtccttctgcctcctcaccacctgtattccacatgcacccagcagcacctctcagtcttctctgtcggggttgggggagagggtaaaccaagtgtcagattacagcactcttggtttacgttcacactcgctaaaaggggtaggaagaattggagagcttttaaaatacttaccgcgcccccaagttttaggtgtgtaggattcatcagtaaacagaaaaaggagctgccctcatgggacttacattccagcaggttagcaggcagcatgcattcccagctcccctcatggcagccaggcagggtttacacattagaagctgctcagaaaagggaatgaggtacattcaccttagcttactagcccagaatgcagtgtcagtgtgtctgactcaacaccaagctggtctaccacccccagagggcaaacagtggagaccgttcaaagggagctcaaggtcagagccagggaagacatgccttacttagtatcaggccgcaggggaacttgcagaagtcaagtccactctggcctgtgatcaggagtagcattatgctaaaatcgttgtaagaataggtcagttatgatcagacttcttatacagagcctgttggaactgagtaccccccttttgaagtggaatatcagtaaaatgcttgaagttgatgtgcatcatatcagtttgcctgggagatgtgatgaatgatggtccattttatttgggagacctctctcaatattgcctgagtccatgcactaatagttggttagaccagatgaaatactgattgagcatcttgcagtgaatgggttcccctaatgcattgcctcctcccttgctgatggtatatacggtgcatatgtgtctaaagaactgacttgtaaaggactttgattgtgaaccaccatgagaaatacattttacatcctgacatagtatgcacatataaacacacacaacattttcatgtaaaatactgtgtttaaagtgctatgataatttgtcttcctgcacatgacacattaaactggcttcatgaactactaaacagtttctttacacagtttgataaatatcagtccagaacagttgtattcaaagtgagatctgctgactggcagcatcggcatcaccctggagcttgttagaaatgcagattattaccccttgccctcataccttctaccagtcagtctgctggtgaagtgcacacagcatctttaatccaggtgattctgatgtttggtgaagtttgagaagcactggttctttttacactccagagagcttttgtgattatatatattgatatttaccacattataaattaaaactgaggaacttgaaaatatttattcattcattctgaaagtaatggtaataaatccattacgtgttgacatgcatgagagcagtgatgtcatcacacaatatgtgtcccttggatctgggaacctctgcagtatactcttgagaaaatgagagttaaaaaagcaaatatattttagtagtactatgaaaatcatttgaccttgcaaggactcctggggactcccagttgttggcaggtcatgctatgagaactgttcttctcaactgtatgttttgacaagactgagagcaaatttttgtaatacttcttatatagagtaattatgtaatcatatgggatgttttcatcactgcttaggtgtcaggggaaaatgaggaactttccaatgcccataagagtatggtttattaggctgttgtgaggatctagtatggaattcccagaaccagttggtagatcccatatttgtattatgttttatgtaatgtctaggtttgtctcaaaagagggtggattacctgtgctctccctgcccttcagggagcagatagattacttccctgtggaaaattgtgctgtagatattggaagtatttgtatcttaattttgaatatttttagtcttatttgtattttgagtgattttttagacataatgtttaaattacttcatttcttccaaataagtttaggcaactagtttttttctttttttgaattgtacatttgtttcttggtatctgtgggtgattggttctaggaccctttcaggtacaaaaatccacagaagctcaattccccagtgtcgtatttacatataacttagacatatcctccctgcactttaaatcatctctaggttacttataatgcgtagtacaatgtaaatgctgtgtaaatcattgttatactgcattgctttgaggaaaatgacaagaaaaaaaagcctgtacatgttcagtacagacaacaatacattttttttctcaaatattttcaacctgcagttgtttgaatccatggagggtcgactgtaaaagtagcaccttatggctgacgagccagcattcaagttgctcatactgtcccatttaatactctactatctatatgtagtactctggtaaataaatagttttagatttgtggtgaagttacagagctgtcaaaggatgtgttaacctatagaccctggagtatttgaatcctaccttgactcacaaccttcttgaagaattacgcaaattcttcaatcagtcactcaccccaggcctttgcggccagccgactatcccaggtccagctgtgtaatggtaggaagatactgtgagtgagaggaggagagagattggttggttgattgggattcatgcagagaagcagaagaatcacggcgtgatattctttggatcttcgcaccagaaagcatggcctcatctgtgtccttgaccagccgctctccttttctccagggacaggggcttcttgcacgctatcctcacttccctcagcagggaagctgggctgggaaaggacagagagaagcagatgtgaggagcttatgcttttcctggagatctctgtgtggatggttttttctttttaattgtctttgttctgtgcatctgttgaatatcttctttcccaaattaaacttctttcccaatataaacttcccgtgagcaggattttgttgtcttatttgaatggtcttgcttcctcaatgtccgcacaccccagtgcctagtacaatcctagctgcataatagatgccctataaaatacttgtttgaatgactagtaattctataggagagaagcacagatgttaaaataaatgattgattgattgattggttgattgatttccctcaggacacatgctaaccaagagtgagaagaaccagttattggcaatagcatcatcattgtttgtggcattccagttaagagcacaacattttcaagaaaattcaaggtatggtagatcatttaaaacagaataaatgagcagaacaatattgataatccagtctacataggaaatactaataaaagatgtggctgatctcagttctagagatcttatgggtctttggagaagtataataaagtcacactgtataaatatgatattgcttacattttgtttaaacaagtttttttaagttcagaaaggataaaaggatcttggcccttttaatttggacataagaagatagtctgaaatccgatgggaaatccattcgagtagtttgtgtttatgatttctgttttatttacttatcttgaaaaacgtttggagaagtatatttaaatgtaggaatgaatctgggcagttaaaaaaatatatatcagaaactagtgaacacacaagaaggaattaacaccaggttgagttagtcatttgtgagacacaagtgtgccttttagcttcctagtgacccaggtaaaaggagaacatgctttatatcagggtaagtagaaacaaaacctcaatgccattggtgcttctagagagaggattgtttattatgaatgtgtgtttacttgctggagcaatccctttaaaggaatcatgctgttgataaattgttacttcagtttcttttcctttttactttttcacaagaggaagaacaaagtttaaaaaaaagaaaaaaaaagatggaaggtgatgaactagctttgaaaagcacaaatcagaaactgaaattacttctgaagaattaggtagaggagaaactaaattggatttaggctgtatcttagtggctaatgtggttttattcaggaaatctcagtgtagttggtactcttcacttgttctctttacctagaaagaataggaagcttacagtgtatctttttaaaagttatgatttggtagctaccagggagagatgagaagatatagaatatcagtaaatgactgaatgactggacggaggaggaaaatggtcaatagaaccgtgaatctgcttgtgcatctgtttaatatcttctttcccaaattaaacttctttcccaatataaacttcctgtgagcaggattttgttgtcttatttgaatggtctttgctcccccgatgtctgtacacctcagtgcttgttgtttggttgtttcccccccacatagttgtgcggtctagtatgggaggcactagccatgtatggcaattaagattaaagtgaatggaagaatccttttcaaagttaccggaaacgtggctacatttcaactgttccatagccacgcgtggttagcagctcctgcactgggcaactctaagaggctttccaccacagcaggtgtgtttccatcaagttctgttggacagcatttgtctggagggatatgtgtgtaggagagaatgttgcttttgttttaaaacctgaatttcatattttttattcttttgataaatgcagtattcagatcctaattcctttaccttcagatgttatttggaccttgattatttcagaagttctgagtgtagctaaatatgactggtttgatttttaagaaatgtatgcaagttattttcagagagtgctgccttactgtgtggaagaatctgaaaagggcttaaaaagatggagaataaaaattacctgtaatcccataattattcaataattacttttaatgttttggtagaacccttcaaagtatatatatatatatatatatatatgtatttatgtgtgtgtatatatatgtatttttatatacatacatgtagcatttatactttgcataattagagtcataaacctgggaatatggtttgaattacttgtgcaagataaacagcagtatattgaacacccatgcacacattatctagcttcaatgactgtaaaaaatctatcttccttgtttcatttttacctctacccactccacactttccccatttgttaattttttaaggtaaaatatacaaacacacatatacacttcttacctgtacagtttttgtttttgttttttgagacagagtcttgctctgtcgcccaggctggagtgcagtggtgcgatctcggctcactgcagccttcatctcccgggttcaagcgattctcctgcctcagcctcctgagtagttgggactacaggcatacactaccacatctggctaatttttttttgtattttcagtagagatggggtttcaccatgttggccaggctggtcttgaactcctgacctcaggtgatccacccacctgggcctcccaaagtgctgggattataggcatgagccaccgcgcccagccttacctgtacagttttaacaaagggatgcttgtgtgtaactcagacgactctatctttacatcgtctcttccagtgcactccctgcctccttttgcttgtggtgctacctgcggtgtgatttcttcagattgcttttttggtaaactttttttttttcttttctttttagagagatgaagtcttgcttttgtcgcccaggctgaagtgtagtggcacagtcataactccctgcagccttgaattcctgggctacagcgaccctcctgcctcagtgtccctggtagccaggattacaggaacataccaccacgcctggctaatttctgtattgtttgtaaagatggggtttcaccatgttgtccaggctagtctcgaactcctgggctcaagtgatccagtccaccagccttggcctcccaaagtgctggaattatagacctgagctgggcgaaaccttgtgtctgctaagtacaaaaattagcgggggcgtggtggcgggtgcctgtaatcccagctactagggaggctgaggcaggagaattgcttcaacccaggaggcggaggttgcagtgagccaagaatgcgccactgcactccagcctgggtgaaagagtgtgactccgtctcaaacaaacaaacaaataagctaaacaatctaataaaaaacgggcagtaggtttgacttagactttttatcagagaagataaatgaatggcacataagttcatgataagatgctcagcatcatcggtcagtggagaaacaaaatcacaaatctataccactacacacccactagaataatatgcatcaagtaatgagtgggtaaataaaaagtggcatatccatactatgagcttattcagcagtaacaaagaataaacagctacattcactaatgtgtgtaaatctcagaaataacatgtgaagagacagaaaccagataaagaagactatgtaatgtatgacttcatttatttgaaatttctagggaaggcaaaaagtataaagaacaaaagaaagatcagtggttgtctgggtctgggtatgggagcaagattgactgcacatgagttttattgttctaaaactggattggggtgatgggtgtacaactgtatgaatgtattacaatctcacttgatcttagccaaaaggccgagaagtgatataaatgtattacaatctcatcagactatacaattaagatgtatagatgttattggccaggtgcagtggctcatgcctgtagtcccacactttgggaggccaaggcggactgatcacatgaggccaggagttcgcgaccaacctggccaacatggcgaaaccctgtctgtactaaaaatacaaaaattagccaggcttggtggcgcatgcctgtagtcccatctactcaggaggctgaggcacgagaattgcttgagcctgggaggcataggttgcagtgagccgagatcacgccactgcactccagcccgggtaacagagcgagaccctgtctcaaagtaataaaaagtaaaatgtatagatgttatacaagtaaattatatcttaatgcaacttaaaaaactgtaaatgtggtaccaacaaagggcttgaaagaggtgggaagtattatgagaagtgttaagatgatggaagatacatgtaaaaataaattgtattcgaaacttgagtagaagcagatattaaggagtcaggttactgacttggaagacctggtggatggtggtaataacaaaagtgcaagagcagctttgaaaagaaaatatgagaagttccatttaggcagttgagtttgagatccttgacaggcataattgtagctcctaaagacttagcaatatgatatattcctatccctttgactgtttcttctttaataataatatatatgcccctttgagcccattaggaaatacttggggcatgcttttgtactcattagttccatgatttttttgtaataatcaaatgcacacagttttagacttcaacggtgttccttaatgtgtgctccatagagcgctagtttgggggagtattaaaatgcattacttaagaaaatgtttctgtgtttaaataaacgtggaaaatcccttgttaagttagaaacctcttagagactgtcatacaggcacacctcatttcattgtcctttgctttattgcacttctcagatattgcattttttacggattgaaggtttatggcaaccctgcattgagcaagtctttttgtgctgtttttccaacagcatgtgttcactgtctctgtgtcacattttggtaattctcattacatttcagacttcatcattattatcatatctgttttggtgatctgggattagtgacctttgatgttcccattgtaattgttttggggtgccacaaaccatgcacgtgtaaggtggtgaacttaattgacaaatgtgtgtgttctgattcactgacctggccattcccagtgtctctcactctccttgggtctccctattccctgagataaagtaatattgaagttagactaattaataacaaagcagtggcctctaagtgttcaagtgaaaggaataagtagcacatctttcactgtaaatcaaagggtagaaatgattaagcttagtggagaaggtatattcaaagccgaggcaggctaggcctcttgtgccaaatggttagccaagttgtgaatgcaaaggaaaagttcttgaaggaaattaaaagtgctattccagtgaacacacaaatgataagaaagtgaaacagccttattgctgatatggagaaagttttataggtctggatagaagatcaaaccagccacaacattcacttaagtgaaagcctaatctagagcaaggccctaactctcttcaattctgtgaagggtgagagaggtgaggaagctgcggaagaaaagcttaaagctatcagagcttagttcatgagatttaaggaaagaagctgtctccataacataaaagtggaggggaagctgcaagtgctgatgtagaagcttgcagcaagttatccagaagatctcactagcatcatcgatgaaggtggctacactgaacagcagattttcaatgtagataagacagccttctattgaaagaagatgccatctcatactttcatagctagaggggaaaagtcaatacctggcttcagagcttcaaagaaccagctgactctcttggtaggggctaatgcaactgatgacttgaagtagaagccagtgctcatttaccatttcataaaccctagggtctttaagaattatactaaatctattctccctgtgctctagaaatggaacaacaaagcctggatgacaaaatgtacatttacagcatcatttactgattattttgactccactgttgagacctacttctcaaaaaaaaaaaaatttttttttcaaatgattgctgctcattgacagtgcacctggtcacccaagagctctgatggagaagcacaaggagattaatgttgttttcacgcctgctaacacaacgttcattctgtagctcatggatcagggagtcattttgattttcaagtcttattatttaagaaatacatttcacaaggcgatagctgccataaatagtgattcctatgatggatctggacaaagcaaattgaaaactttctgggaaggattcaccattctagatccccttaagaacatttgtgcttcaatgggcaaaataaaagatcaacattaacaggagtttggaagaactggctttgaggtgttcaagatgtcattgaaggaaatagctacagttggggtggaaatagcaagaaaactagaagtggaacctgaagatgtgactcagttgctgcaatctcgtgatagaacttgaatggatgagagttgcttcttatggatgagcaaagaaattttgcttaaaaagcaaagtttttaagatggactctgcttctggtgaagatgctgtgaacattgttgaaaaggattttagaatattacattaacttagttgataaagcagcggcaagttttgagaggattgactctaattttgaaagaagttctactgtgggaaaaatggtatcaaacagcatcacatgctacagggaaacctttcatgagaggaagaatcaattggtttagcaaactttattgttgtcttattttaagaaactgccgcagcctccccagccttcagcatccatcagcctgatcagtcagcagctaccctctatcagcaaaaagattatgactcactaaaggctcagatgagggttagcatttttttagtaataaagtttttttttttggagatggagtctcgctctgtcgcccaggctggagggcagtggtgtgatcttggttcactgcaacctccgcctcctgtgttcaagcagttctcctgcctcagcctcccaagtagctgggactacaggcacatgccaccacaccccactaatttttttgtattttttagtagagacggggtttcaccgtgttagccaggatggtcacgatctcctgaccttgtgatccgcctgcctcggccatccaaagtgctgggtttacaggtgttagccaccacgccagcctaaactactttttaattaaggtttgtacattgtttttaagagctatcgcacacttaatagactacaacacagtgtaaacgtaacttttatacacattggaaaagtaacaaattcatgtgacttgctttattgaaatacttgcttcattgcagtggtctggaactgatctcacagtatctccaaggtattcctatatactaaaatgcattctgaaactcttaagagcaggatatagttggactcttacctacactctttttttcttgtgaaaacctttttcctaaaagctctttgaaaaattaatattccaatgaatgcttttgggaaacacagagtatgttatattgtgatttgtagtgttttagatagtttaaacacaacattccttagagattgttgaaatatttagggcaattgctttataaagtggaggttaagaagcaatctttatagtctttgctaatttctagctaaaattgtaaatgtgataattgctacattaaaaaatttaagtatcttattttttaactcattatcttttagaagttagaaacaaaatatgtatttatgaaatatgtagactgcaagttcacttatccagataattgcacatttattttctatacaacaagcaattgttcatttttggtgagtttattttctgttgaaaaaaaggtactatcacttatttagtattatcagtttattgtaaaattgctacaccctataacagtgtagagctgtaacatttagtaaatatagtgttcttcttcaggaagcataatcttgtgtagctaagtgaagctatgtttctggcttgcttactgaggaggtccttgacacctacatcatgaaagctgatgtacggtgtttgaaccttcacattttggctttagagtcatgttttcacaatcggcttgggaatggattctaagagtcaccctccaggtgtggctctgtattgctttgtcatgggtgtgtccgtgaaatgtttttccttccaaaccagtagcccacagcccttcctttgtgttgcttgttttggctgctgatcttattttcccaatttctctatgggcttcactctttcatcatttatgacttggaaaaacacattaataatacatacccctagtatttggatagtaaaacaatagtggttcattttagaaaaaaagaaaagttaatgtcagaaacaatagccattttttgggggatgactataaaatgaatttgatgagctcaatctttttctgacttaccatgaaggcttctttttaataattattcttaaacacttatattgacagaaatgaatcattaaaagctagttatattaaacaaccactttttttaaaagctaaaatgattttgttgacattgtagtttgatataataatttgtttcactaactggtaatgattggaagaaaaaatagtaaaggtaacattttaatcatttttagtaatctttatttttgctcaaaatgtctgttttttcttggatctggattcagctttcttgagaatcagcttttactttccgttttttttcctttctttctttctttctttctttctttctttctttctttctttctttctttctttctttcttccttccttccttccttccttccttcctttctttcttttctctctctttttctctttctctcttcctcccttcctccctttcctttctttcttttctttctttccttccttccttccttcctttcttttcttttcttttcttttctttcttttctttcttttctttctttctttcctcagtcttgctctctcatccgggctggagtacagtggtgtgatcttggctcactacagcctctgcccgctgggctcaagcagttctcctgcctcagcctcccaagtagctgggattacaggcatgcaccgccaggcccggctaatttttgtattttttgtttgtttgtttgttttgagacggagttttgctcttgttgcccaggctggagtgcgatggcgcaatctcagctcaccgcaacctccacctcccaggttcaagcagttctcctgcctcagcctcccaagtagctgggattacaggcgtgcaccaccatgcctggctaattttttttgtagttttagcagagactgggtttctccatgttggtcaggctggtctcgaactcctgacctcagataatccacccacctcggcctcccaaagtgctgggattacaggcgtgagccaccgtgcctggcctaatttttgtatttttcgtagagactgggttttgccctgctggccaggctggtctcaaaatcccaacctcaggtcatccacctgctttggcctcccaaagtgctgggattacaggcatgagccaccacgcccggccactttctggtttctactttatcctcataatttccctcttggtatttgagcaggggttaaagactcagaaaaagaaacaacttcactatggcctataatattaatggaaatacttcagcctgaaaggttaaaataaagcactccctttggtggaggatgactttggctgcatggaatcagtgtactttgtgctcaggcttaggagaacatatcaagtatcacggctggctacacagcctggtgtcagtttaactctttcagccacagtagcataacgggaaattacttcctcttgggttctttgtatgtgcagtcattgtgtctgcatttgtattgtattatctttcctcatctggcttcctgataaaatggagaatcgattttttagtgatttctgcctagcagagacaattatctgtttatttttctttgcctttcctggtttcagatatagaatttattcacctgttattaaattttcaattagatgataaaagtttaaggtttttgaaatatgatcttaaccactgaaagatgagtggggtgagaaacatagaaaaaagtaaccgtgtgaaaataattcccaaggaaaagccggtattgttgaacgggtacatactggctcttttactaagatgtcttctgaattaaaagagcatgtgaaattataacacatttatacgtcaatgaaaataaaacaacttatcataactcgtttcatactctcagataagccacttcactgtgacaatgaaggtgacgtgatacctaactatacaataaaaaaaaatagcactttaagtatatatttacaaacgtatgtatacactctttgtgtttggaaatagctacgttcatttgagcaaataaatcccctaaaagcaacaagatgggagaaaacattaactcaatcattatcacttaagcttgccttactttttactgtctctgttatgatattttcagttacttaatatgactgtgttgaagatggtttagaaatctatgtgagattaagtacaagatactaagtggataagaaagcacatttacatatttttgcttactattacattgtaaaatatttttattttgatcctactataagagctgagggaaaggcagaatagcctgattattgctggagaatttctctgttccctaccatgattccagaagctcttgcacacttcatcagtattattgtaattctttggctgcaggatatttggcagctgttgcaccccactggcaaatcctattcatacttctttcccattcaccattgccattggagaattgatttctctctcctctactctaacctttcccaattcattttggattgttcaatgtgaaacattttaatttcatatcatacagctattcagcttacaatcccttttttaacctgtcaccagggtaacagcatagcatgctttctttaggcaatcaagtttttatttcacatgcttaatgttgcattaaatgtttgcattttgtttaacccccttaaatagtttgaactctggatatgttttatagggtaatgaaatccttgatttttgaattgaaactaaatcaacaccatcagtgcatttataataaaatgtcaaaagattaatttccataatacaaagattattattaaaaacgcaagttagctgatctgtgtaaggcaattttctgtaggtaatggaggaatatttgtatatattatatttgtgttcagccttgttccaaaaaaagatttaaaagtggtttagagattgtcagtgagataagtaaaaaacttaaaaaaggaatagatttggtgcaaatgggaaaatatatcttttgaacccattatttgatttttcagtataatgcttttttctctgttcgtatatatgaagatttgattacttgatttttcagtataatgcttttttctctgtttgtatatatgaagatgtgattacttgatttttcagtataatgcttttttctatatttgtatatatgaagaccataatgatttatgcatgtggagatgggtgaagtaacgagatgtactagaatgagattagacatcttttctaggagaccagtgtgggcattgtgtgctttaatatctcttcatcagtttactttagaactaccttttccttaaaataagtaatttaataataatagattagtgaagataaaaatgcatatgtttagatattgattatttgacttgaattggatagacctcagtttccctttacagaactacctagtcatcttttcagccttatccccaataatatgttcaatgaaatttgttctgtgaataaatcctgtgatatttggaaaatactaagaaatgtgtaagacaaggtagagcagagactagcaaaccatgttgcttggaagcatggttcaaattgtaatgcccggggtaaccactaagaaaataactttaaaaaatagtattagtaaaagaaaagtcaagggaattaaaataagacaatagaaaacgttgatttaaaacaagacaataataaaggaatagagggagaaaaaagatatgacatatagaaagtaaaaagcaaaatggtagatgtaaatcctacctgatgggtaattaattatattaaatgcagatggcttaagcctatcaagagcagatactgacagaatagatttaaaaatatgatcaaaccatatgctttacaagagacacactttagagttaaaggcataaataggtcaattgtaaaaggatggaaaaaagtatcagacagacattgtattcgtaatattattatcagtattttattactaataatgctgatgtcaaacaaaatagccttttttttttttttttgagatagggtcttgctctatcacccagtctggagtgcagtggcatcacaggtcactgcaagtttgaactcctgggctcaggtgattctcctgcctcagcctcctgagtagctggtactagagtgcatgccctaacatttggctatatatatatttttaaatagagatgaggtcttgctatgttacccaggcaagtctcgaactcctgggctcaagtgatcctcccacctcagcctcctgaagtgctgggattataggcatgagtcaacacacccagcctttttttgtattttttttttcttccagagacagggtcttgctctgtcacccaggctagaatacagtggtgtgattatagctcattgctgcctctaattcctgagctcatgtgatccttctgccttagcctcccaaggaactaggactacagatgtactccaccatgcccagctaatttttaaaaatctctttagaggtaggtttttcctatattgcccaggctggtcttgaactcctgacctcaaatgcctggactcaagtaatccttacgcctcagccttccaagtagctgggattacaggcatgagctgccaagacaaaatattgttcaagacaaaattattgctagagacagaggggtattttataatgataaaagggtcaatccatcagaaagctataacaagtataaacatatatgtacctaataacacaattcccaaatatgtgaagcaaaactgagacaaagagagaaataggcaattccacaatacatcactttgaaaaatggatagaacaactagagagaatatcagcaaggaagtaaaagtgtcggacagccctatagaccaaatagatctaacagacatctctagaataatctctccaacaacagcagaatatacctgtctcaagtgcacgtataacattctccaggctagaccatatttaccataccatatactaggccataaaacaagcctcagtaaatttactagaattgaaatcatccaaagtatgtttctgacaaattaaatgaaattagaaagcaacaaggaaaatttgggaagttcatacatatgtggaattaagcaatgtactaccaaataaccaatagatttacaaaattacagaggaaactagaaaatattttgtggttaatataaacatcacaacatctaaaaacgtgtgggctgcacataagcagtgcttagagggaaatgagagctgtaagcacatgtattaaaaaaagaagaggccaggcaaagtggcttacatttgtaatcctagcactttgggaggctgagacgagcagattgtttgagcccactagttcgagaccagcctgggcaacatggtgaaaccctatctctataaaaaatacaagaatatgctgcgcatggtggcacgtgcctatagtccttgctacttgggaggctgaggttggggaattgtttgagcccgggaggcggaagttgcagtgagccaagatcgtactactgtactcctgcctgggtggcaaagtgagaccctatctcaaaataaaagaagaaataaagctgggtgtgggtttggtggctaacgcctgtaatcccaattctttgggagattgagactggaggatcacttcagcctagaagtttgagaccccatctctacaaataataataataataataataataataataataataataataataaaataattcgctgggtgtggtggcacacacttgtaatcccagctactaagaaggctgaggtgggaggatcggttgagcccaggaagtcagggctgtagcagtgagccaagatcatgccactgcactccagcctggctgacagagtgagaccctgttgaaagaaagaaggagagagagagagagagaaagaaagggagaaagaaagaaagagagggggcggtgggaggagggagggagggagggagggaaggaaggcagtcaggcaggcagggaagggagggagggagggagagaaggaaaggaaggatcaattaccttatcttccacttcaggaaacatggaaaaatagagcaaacaaaagcagagggaataaaatactgaaaactagagtacaaataaatgaaatagatactagaaagcaatagaggaaatcaataaaagcaaaatgtgtttgttggaaagatcacagaaatgacaaacctgtagataggctgaccaaaagaaaaaaaactgaaattgtaaaatcatgaataatagggggtatgcctactgaccttacagaaattaaaatggtcataagggaatattgtgaacaattgtttaccaataaacaagataacttagataaaatggagaaattcatagaaagatacagactgccaacactttctcaagagaaagtaggaaatccgaatagacttatcataagtaaagagatggaactaatcgttgcaaaacttcttagaaagaactcaggaccagatgacttcattggttaaaaaagttaaaggaaaattacttaatactaatcctcacaaactcttccaaaatcccaatttacaagaccaatatcatcatgattccaaaaccagataaagtcattgcaagacaaaaactaaaggctgatatccttcttaagtattaatgcaaaaattcccaaccaaatagtggcaaactgaatccaagaatatatacagtgatatacatcataaccaaatgaggtttctcctagagatacaaagttggtttaacatacaaaagtcaatcgatgtgatacatcatattaatagaataagagaaaaaaaccacaggattatctcaaatgcaaaaaaaaaatctgacaaaatccaacagcttttcattatgaaaaacactcagcctactcggaatagaaggcaacttcctcagactgatgaggagcatgtgtaataaacccacacctgaaaataagggcatctagattggagagaagtcaacttacctctttttgcagatgacatgattttagatgtagaaaatcttgaggaattgacaaacaaatctgttagaactaatgagtcctggaaggatacaggatacaagaatgatatgcaaatatcaatttttgtttttatacagtggcattgtacaagccaaaaatgaaattaacaaaacaactctatatagcaccaaaaaatatacaatacttaaatgtaaattttaaacaagaaatgcaatacttgaacactgaaaactataaaatgttgttgaaataaagatgacctaaatgaaaaacaccctatgttttgaatcagaagacctaatattgatcaccaaactgatctacagattcagcacaatccttactagaatcccagctgcattatttttggaaaaatagacatctgattccaaaattcatatgaaaatgcttttgcattgtaaaagaggaatgaagttcagaggctcctacttcccgatttcaaaacactacaaagctacaataatcaagacaaagtggtactggcgtaagcatagacatgttgatcaatggaatagaatcgagactccagaaataaattgttatatttacagtcaattgagttcagtaaggataggaagaaaattgaatgagttaagattaatcttttcagtaaattctgcttgggcaattggatatgcacatgtaaaagaatgaagttggtctccttcctcacaccatacataaaaatgaactttaagaatcatagacctaaatgtaacagtgcatacaacaaaattcttagagaaaaacataggagttaatctttgttacgtttggttaggtaataatttcttacataagatgtcaaaagtacacgcagcaaaagaaaaattagataaattggacttcagaatttaaaacttgtgctttaaaggacatgatgaagaaagtgaaaagacatccctcaaaatgggagacaatatttgcaaatcatatatatttaatagtcttttgtctagtatagggaattcttacaacttaataataggacaaatgatccagttaaaagataggcaaaggacatgaataaaaatttttcaaaaaagatatagaaatggccaataagcccataaaagatgctctgtatcattagttgataggaaaatgtaagtcataaccacaatgagataccacttcacacccatgaagtggtgaagatgtggaaacatgggaaccattacatgttcctggtgggaatttatgactacagtgatatgaacttgggaataatttgacagattcttaaaatattagacgattaccacatgacctagctattccacttcctggtatatacccaagggaaatgaaaccatgtgtgcacagaaatgttgtatacaaatgtttatagtggcatttttcataatagccagtggaaacaaccctaatgtccttcaaatgatgaatgagtatataatagtaaataaaatgtgatacgttcatagaatggattatttttcagcaataaaaataaatgagctattgatattttctgcaacatggatgaattttgcaaaaatgctagatgaaataattcagtcaaagtagatcacaaattttcccagaataagcaaagctatagaaatcgaaagtacataacagttgcttagggctgaggaggggaatgtagagtaactgctctcgtatctaatgtttcccttatgaggcaatgaaaacgttttaaagttgcttgtggggatggttgcataactctgtgactatactaaaaaccattaacttgtacacttcagatgggttaaatgtatgatatgtgaatttcatctcaaactgtttaaatgtatatagtctgttacacattttatatttaagaatttgttttcctaatggtataatagatgttcaaattttaggaattaaatgaggcatttcttccttctagtttgatggagtctttgagaatatttcttttcaaattgtaaaatatgtttctatgtctgctctcaatttagtgcaagagtagctcttgggggtagcaatatcaagtgttcctgggctaccacctggaaggtggaagtagtagatgtatgtgaacccgcgttcttccatcttttctttcctcttctgccttgaaatgcaagtgacataaaattaaaacaacacggaaaagtttcagttcctacaatggcagtgtagtgtattttcaatgaattcctttccagataaataattataaactctggacaaaatataaagcacaactatttgaaggctgtcgatgtacaaccaaatacgacccctaaaagaagaaaactacaccagtgagatgcacatttatgtggcttttcctctgaaagcagtcactattgcatgcattaaggcatggctgtaactcagttattggttttaggtctcagagaatgatgttcagtgttgtcagaactgctggaaattaagcagggatatcatggcagaaagggagcaacagagtgaagagttccatatgtgaattcaggttctctcaaattgttggttgaccctggaaatgtgcgtaacaaagaccccagggatcccagaagatcccagaactgctggaatgctgaatgaactgagctaaaatttcagttgcctaccatggttatgataatgttggaatctgaatctcatcaatttgaggtacttgtaaacaccttgagctttccattaaaaccctggaaggaccatgccttgggagaaaagactgtttctggaataaatggtttggactttttatttattgagagcaaaaccaaatagttcctagtacaacataaaagtgagcctccacaacttcaggactggtaactagcaatgtaactgcctgctgtaataaaaatcagtacttttcagagggagataacatgatgagtgaagtctgacaacatctccacaatacagtttacttggcatgcaatctaagaataaagacaactataatccagaggaaaagcagtcaacagaaatcaaccgtgagattactaaaatgtttgtttcatgggcaagagctttaaagtagctattaaaatcattttcaagtattaaagatgaaaatgagggaaaaatgggaactatcagcatagaaatggaaattaaaacacactactaagtggaaattccatatctaaaatgtcctatatctgcaatggataatttgctggataggctgaaaagcatactggtgatggcagaagaaggaataggtaaccttgaagatagaagaatagagattatgcaatctgaaaaaagagaaagaaaaatgtgtttaaaaaattgaagagacacaaaaggacaaaggaaacttttggaggtaaaacatgtttattaccttgattgtggtgataatgtaatgaccgtatgcatatgtccaaactaatcaacttgtgtgcattaaacatgctgttttttaaaatgtcaaatacacctcactaaaggtgtttagccgaggtgggcagatcacctgaggtcaggagtttgagaccagcctggccaacatggtgaaaccctgtctctactaaaaatacaaaaaattagccaggtgtggtggtgcacgcctgtaatcccagctactagggaggctgaggcaggagaatcacttgaacctgggagctggaggagcttgcagtgagctgagatcgtgccactgcactccagcctgggcaacagagcaagactcctcaaaaaaaaaaaaaaagaaaaagaaaagaaaaaagctgtttaaaaaaaaatggaagacagcctcggtgacttgtgggcactataagttatcaggaagcatgtattaggaaggacaaaaagaaaggcaagagagtgaagaaacttcagaaaaaatatttaatgttgtcttcttaagattgggaacaagacaaagttgtctgtttttatcgtgtttatacagtattatcctggagatcctagccagtgcagttggaaagaaaagaataaaaggcatagaaatcagaaaggaagaagtaaagtcatttctatttacagaggtcataattgtttgcatagaaagccttataagaatctataaaacaattgctggaactaacaaatttagcaagattacaggataaaaaggcaatcaaatgcaagttgtatttgaataaactagcaacaatgggaaagtgaaaattaaagttccacttaacatagcataaaaataggcaaagcagacaccgtcactagttagagtatgaaggcatgcaagaaataacggagcctaatgattgcaaaggaagctttccacaccttaattggttacctaagaaaactctaaggagtctgccatacaatgaataaaactaaggcaaaaataggcataaagttaacaaaagagattcatgactaccacactttatgaaataaattaaaaatcagaagaagtaagagttatatcctgctcatggactggaagagaaaatattaagatgtcacttctctctacagtaatacagattcaatgcaggcccgatagtaattctattgggattgtatctcagggaggatgtggaagaaattggcacattgattttgaaatttctatggaaatgcaaagggacttgtattagtccattttcaccctgctgataaagacatacctgagactggacagtttacaaaagaaagaggtttaattgaacttacagttccacatggctgaggaggcctcagaatcatggacgaggaggggcaagtcacatcttaagtggatggcagcaggcaaaaagagttttgtgcagggaaaccccccccttttttttttctttaaccatcagatctcgtgagactccttcactatcatgagaacagcataggaaagacctgcccccatattcagtcacctcttactgcatccctcccataacacgtgggaattcaagatgagatttaggtggggacacagccaaaccatatcagacctagaatagctaataggaacaaagttgcagtacttggtctacaaattttcctgaaatgggctcacccctgtctcctaccacacaggaaagttagagatgcatcatagacagatctacatgtaaaacatctaaaacatgtgagtatatcttctgaaactttgtatgtaggcaaaaaacttcttagcaaggacacaaagcactaaacataaaaggaaaaattagtgagttagattttgttaatattaaaaacttccattaaaactgtaaaaagataccactacatacctattagaatgtctaaaatccagaacaccgaacaccacgtgctgctgaggatgtggagcgacaggagctctcatgcattgctggtgggagtgcaaaatggtaagccactttagaagacagtttggcagtttcttacacagcataaccttaccatataatcaaggagttgtgctccttggtatttaccaaaatgagctggaaacataggcacacactaaaacctgcacgtgaatgcttacagcagttttattcataattgccaaaactgagaagcaatgtccttcagtaggcgagtggataaactggtatgtccgtacaatggaatattatttagcaataaaaagaaatgagctactaaggcatgaaaagacagtggaaacaaatacatattggtatggggaaaaagctaatctgaaaaggcagcattctgtatgattccagcgctaagtgacattctgaaaaaggcaaacctatggagatggtagagatcagtgattgccaagcattcgggggagggaggggaaataaataggtggaacaggggacttgtaggcagtgaagctactctgtatcatactgtaattctggacacatttcattagatatttgtcaaaacccacagaatgtataacacagtgaaccttaatgtatggacttcagttaacagtaacattgatattggcttatcaattgtaacaaatacaccatacaaatgcaagatgttcataatagaggaattcatgtgggggaggatgtatgggaaattgaaattctgttgagtttttgtcaacctaaaactgctttaaaaaataatgtctttttttttttttttaaatctgctgaaggaaagacattgttaagaaaattcataagcaaaccacagaagagaatacttgcaatacataaatctgacaaaggccttgtatccaaaataaagaactttcacaaatcaataaaaataaggccaatgacctaataaaaatgggcaaaaacttgaatataaatggccactgagcaccataaggtcctcagcattactagtcatgggggaaatatacatgaaactatgataagatgcggtttcccagcctctagcctggctagaattagaaagactgacaatgccaaatggtggcaaggatgtagagtaactcattgcagtggaaacatggaaatgttgtaatcttttggaaaacaatttagcaactcatataaaattaaacctacatttagcctacgacctctactccctagattttttaccccccaagaaatgaagacatacctctttaaggggggaaaaagcaatcaagtacaaagaatatctacagtggctttgtttataacagccccaaactggaaaccaccaaaaatgtccatccacagaaggatgaacttattttggtgtgttggtacagtaaaatacttctcagcaagaaaaaaaggatgaactattcaacaacatggatggatgcacctcaaaaacattatattggtcaaaaaagccacagttttttttggagtctgttcttgtgaagctcagaacaggcaagcataatctctggttgactgttagtggcaggcagagccaagcgactggaagggtgaatgacagaacttaagatcttggaatttgactgtatgttagttgtatgcgagtaaaatttaaaaaaaaataacagttgctgaaacaaaagagagggatttcagatatttctgcacccaattatggtaacaataataactaatttagcatttatgtgccaaacactactctaagcattttacaccttttatctcatgtaagcagcatatgggttaggcattcttattatctttgtcttgctgatgaggaaactgaggcacaaggaggctaagtaagttgtggatggaggtcacacagcttttgtaggtctgcacttggtcagtgagacatggggtctgctggggtgacagctgtgccacagtgcctttcctggctaatcatgcccagtgtctaaattgagaaccttaagcccttatcggtggaagaaggaaagggagtatgcataatatttaaatatatgagattatgagtaacattacgtattctatcctagattcagatgtcatttgtgtaattatttgtaatgctaataacaccaaacttgggggtgttccctgtttctcagcatgattatgtgatacagactcttccacacagtctcatgtatttgaacatacacattttcaattgcatgtaggcagaattctaatcctcctctatgccaattcctagctttgaagaggttctctgaaaatgctgcttttatctttcttctgcagtgatgaactttaatgttggagtgttgtaagttctcacataataaggctcagatttttgtttggtttggcagtagacttctgtttaaaattcctttaatctgttcattctatgctttttatattcattttaataactgatggctctgtaaagaattttttttgaatttattgcactagttaaaaaactactaaaacttgtacttaactattcctccatctcaacgttctaaaagtgagttttccagtgaattgctgaatttttatcttccctgggagttgttcctccccttccccaaccctggggaaataagaaacaattcatatactagatctaaagtttcattaaaattgcttatgccctgtctcaggcattttaagtgggccatctgtctaaacatctctctctccttttttttttctgatcatttcctcgacttattcatgagccatgggagggctcctttgtagtctccatgtagctggttctgtctacccccactgaatacatctatgtgcttgcataacatatcttttcaccgtgctggaaattctctgaacttggttcagatgaatggcccactttctgaaggcctttttcttcctgcaaagatttgtatgcagaaactgacctcagtggccatggaatgcagcatattattctcgatcattttacagcccacccactgtgaaagttatgatgaagcatttcttaatgattccttgaccattagcattgttttaactcagtattttacttctaaagaggtgatggcacaacaaaaaccagcttttttgagtgtctgataattatggtttaaaatgcttataatcctttctaactgaagatgctgagagtttttatgtttatacagtcttcttttagcaaatgacttgtaatagcaaagtatttactcaaaagcacccttttgagtaaaatattccagtaagttaaatgtattagtattaatagtgactatcagctgacagttcttcaccatcaaatataaaaaatttagttatgtcgagcatattcatcctggctggctgatgataaagtggacagacctgggttagagctattattttatttgctttgtgagtcactgtttatgtgagttcttttttactggggtttttggtttttgtttgtttgttgaagaaataacttaattggtatcagctttgcaggtgactaataagttgcacagattaaatttttggtcagatgacagcatctttcactagaaatgtacttcgttaaaggaaactgtatcattactatggtgagttgaagttctaagaccttttccttattgtcagagagttgttcataaaaatcttctttgagactattttgaatttaatggatctgtgtaattcttttctaaacatttagcacataattgtaggtaattgttactatcataaatctgtctgtgctggttaaattaataagaatgtttcaaagtaagtattataaatgtattttcagtgattttgcagaaatagagcatgcattctttcaggtttgtattttttaaaatttatagcttatttctattgcagagcatatttatatctgccagttaactggcatatatgcccaacccatccattttatttaaaaacccaaacaaaactagtttcaaacttatgtcaagccagaaggaatctttgcaaattttgtttgtagaagagtgaacttacaaatagatttcacagtttcgactctgttttggtatttagaggtcttgcacagtgaagcctttttcctatatcctgttaacatatcaccctgaaagaaattgttagaaaaaggctgggtactgtgactcacacctgtaatcccatactttgggaggacaaagcaggaggatcccttgaggccaggaattcaagaccagtctgggcgtcatagcgagatccaccccatctcttaaaaaaaaagccagacctggtggtggcgcacacctgtaatcccagccactcaggaggctgatgcagaaggatcatttgagcccaggagttccagactgcagtgagctatgattgggccactgcactccagccattgtgacacagtgagatcatgtttcttaaaagaaaaggaaaaaattgttagaaaagtgccactgcaggagttaagtttgtagaagaagcagtagcttcctatcacttgcctaactctgatacacttttacaggtgtagaaatattggttcaaacagattgaataagttctcaggtacattgctagtagaacaggctgagatttagacctggatgttttaactcgaaaccctgtactctttccataaggcccctcctgggacaaattataatatatatgaaacagatgtgaatcaaaataaaacaatggaaaaataaatagtacttaggttttggagagtggcaactgtatctcatcaccatctataaggtccctttctgtgggaaaatgggttctgggttggaacaggatgtcaggatcagcaatgttccaatgcctctggaagcagagacttgttacgtgatagaagaaattctcaatccctactccatcaggctgctacagtttgaaaaatattacagcatatgacatagattaaatggaagaaagatctcttgagtttatgctataattaaggaacaatttgtgagggaggcaatattttccttgaaggatctgttagtgtgagaagcagagagatgagatgagaatccaaagtttctataaagaaagaggtttcagttataggggaaagtaagaatataggccgagagccgggacaactactcataataaaagctatagcatgtatacacctaatttaatcaacacctccctatcaatgcagatattgttacaatcttttatacatacataaggaaactgagacagacagtttgctccgggttttgtgtcagcttctgtgactcatcaaggcctgagttcaaaaccactgtcttgctctctgcctcatggtagcttggtttaagagtctgtcctaaccaaatagacaaatcagagaataagcagaaataaaattgaatgcaaaaggtgggttcttacttttaaggcattgaatggtagttaggttaataaagatgtaacttggtgtggggtagaaaacgatcaaatgatcatgagcaagatagtgacataattcttgaggaaagcacagattcaagaaagccaagttgcacggtcatctagatgtgaggctgtttctgcaatcacaatacccctgtgaaattggagtattgaccccattcgaagtgagcaaaatgaagtcttagtgagatgataggcgtagtccagggacacccagggagtatccaggagcttggggcacacagtcctgtcacacctgtgctcttgctctcctgggcaagtcagcctccccttctacacgtgcttggtgcatagtagacactcctcacagtcttttctacttatccctcatctctttgtctccatcctgtgccaggagctggagatacaaaaataaggaatgattttggtcttttaggagcccacaggacactgggagacaaacatataaacaaataaatgccctgtagaataaaggtgctaagaaaaaaaagaggaatactggcacagaagccctttcttcccttcttcctttctgctcagacctccttttctttccctctcctcctcccctccccactgtgtgttgtctccctcaactcccctgcacccccattcattcatactcttctgtgtgaggctctatcccctgaaacagttcttttcacactgccagaaagaatcgtcaaggcctgtgtgtacagtgtgcattattgttgatgcattttttttttacttttatttttacttccatggtatttaaaacatatccttatcttcagaataatgcagatcaagaagtggtaggtcaaatacaaatatgtatttaaattaataatattaatcagatattgaatctagaggtgattggattagaagcatagtttttgtgactctgatttttttaatgctgaatacacagagacttcttttgaaaatttggtgggtttaaatgaaaacataacttggaacattttttcagaactgtggtttaagctggagcccagatactacaaaatgctgatgtttagtacttggtaaatattacttcacaagtataaatatgcaatacctaaattaggttaattctgaaatcattaaattttgttactttaaaaagtcgtgggaaacatttatattctaaaaacacttttgtctttggctgcttgatacggattttctgaaccatgtaatactgataatatgcaagaaaagacccgtatgataagactaacattgttcatagatatggagtcctttctggggggttttaggtgatggggaaaaccagggctagaaaagaaataatgtgtaagtttccaagatgaggactgtgttttatttctctgtggtgccccacaatttagagccaagtgcttagtgtttgttgaactcataagtcatttagggttttgtgtgtgtgtgtgtgtgtgaatgtgctttattttagcaaaatttagatgttgtcctattatataataacataataagtgggtatctgagtaatgtttaaattcgttttttaaatttcgtgaatttttagtaataacattataaaataagtatagttttttttttgtttttttttttttgcaaaaaataattatatcggccaggcgcggtggctcatgcctgtaatcccagcactttgggaagccgaggcgggtggatcatgaggtcaggagttcaagaccagcctgaccaaaatagtgaaaccccatctctactaaaaatactaaaaattagccgcgtgtggtggtgggcgcctgtaatcccagcctctcgggaggctgaggcagaagaatcacttgaacccaggaggcagaggttgcagtgagccgaaatcgcaccattgcactccagcccgggcgacagtgcaagattccgtctcaaaaataataataataattaaaaaaaattatatcctagctaatgtactaagatatttctcttctaattgacatcatgaagaaacattctataagtagaataatgtagagaggttcattgtttaatacatttttagtctcatcaccagtaaagaacaaaatgattctctaggccacatcatgctaactcagtaattcattttatgtctctgaagtttaaggcatggcatacttacttatttcattgtaatttttttttaaaaaaaccattttgaatagtaaccaaatattgaaaaaaactaatactgcttcaggcagatgaatttgtgaatgactgtaacaattaggcaattcaaattcatagatacatgatgattcttagagtaggtgtttaaaatgttcgcaaatacattcaatggcagttttagcctgtgcattttatatcaaagggaaattagtttattgagaaataataatataaaattattaactctttttcttttcattctacttcagaatgcctgttattaaaccagacatagccaactgggagctctcagtaaaattgcatgataaagttcataccgtagtagcatcaaacaatgggtcagtgttctcggtgagttttctttctttattttcttggtaatcttgatgttatctatgaatatttaaagccatttttaacctgttcagtgactctcgtcttttgaatttgtagtacctctatgtatttttcatcttctttaggaagctgaatggaaatggaaatttttgttctcttatgcttattaggaaatacatttctagatttagccacatcctaaactcactttctgatacttgattcatttttcttttatgctgtgagaagtaatacttttgcctttgttacagagaagagcattttgaattacagttccaaatgtatgatagtggtggtaggtaaccatccttttaaaacaaataatctgaagcctcacataacattatctttaaatctcatgctgcaagacactcttgaggctaaatttaccttgtggtgacactctttttgttttgaagaacttaaaccccttggatatagggtccaagatagaactgccacagttggaattctagtctatagtgaacaagattacagtaagatttcagtgtttatactgtagtatgagtgatatgtttaaaactgtgatccgagtgtgccagaaaaataccattaagagttgctgttttaagtcgtatgccttcgtgttttcagcctgaactcaaggaggttgctattaatatatagttagtataatgaatattctgtttatctacatttctcttcttacggctaaattgcattgaaatgtcattttgttttggggaaacaagtgaatttttatcagaatattgaaataggatatgaacatcaaaacaatataatttcacacaaataagacctggtgtggcttgagaggggtacggcagtttcttgatctcagtgagaaaatatcacaagttgaagattcatgagaattcattcattccacaaataattgttgcatgcctactgtgcaccagatcagttccaagctgttgccctggagaagctgacattcttgtgtggtgtcagactcacagatcaatgatgtcagtccatgaactaagggtagtctccttggttttctttaaatgttgtgattcactgtatacgccaaaattgctgaaacgttagatactgaaagatacttcactcagctctcttaaaatgaaagctatgatggagttaaacagctgtctcatgagatcttgtgtgactctctacattccacctattgacatggtcatttcagaaaaacagctttgtaagtgcacatttaaccagagatcaggttgagtagcaaattataggaattgaatagtaaagagtatcaatattacaatgtagcatttttttttctgggggaagattaactttacaaaaatgtagagtttagcataattttcagttctatattgagtcaccactgaagccttactgtaatctgatattctgatacaatgttcttttaagtagtgccttaccttaataaagaaaactgtctagattacttttcagagctgttacttctttttttttttttttttttttttttgagacagagtcttgctctgtcgcccagaggctggagtgcagtggcatgatctcggctcactgcagcctcttcctcccaggttcaagtgatttctcctgcctcagcctcccgagtagctgggactacaggtgcatgccaccacacccaactaatttttgtatttttagtagagatggggtttcaccatgttggccaggctggtctcgaacacctgagctcaagtgatcctcctgtctcagcctcccaaagtgctgggatcacaggcgagcgttgcttctttatgtttgttttagattccatgttgaaaagtagagacctctggcctgactgcatacgtggtatctttcaaatttttttctgtagaattatctccagcttcactttttagcttatgaggaaaacagggctgtttttaaaacacatcaaaattagtgcattaaaaacttccctggaaaatatccaccttagtatataatatcagaaatgatttcctatatttattggcttagctactgtcagagcatcaatagcccaatgaaaggcatgtgcacatgatagtgtagccctttttcctaggcatatttaaatttagctactttcatttgacatcagtattatgaaaggaggcaggttgaacagcgtggcgaagtaaaggctcattggtagaaatatttcaatagtatggcactattgtctgcttttagggtcatagacgggagaactgtgattgttaacttagtttcccagatcacccactgtcacatcaagaaaaaaattagcctacaggtgacaagccaggtctgggttaatgactctggagatagtgcaggcaaaggctttactgagcacacagtaaagctttaggtgccctacatttccagagttcttctgtttaatttttaggagtttaaattataagatatttctaataaggaaagtacagcagatgttgcagattttccatacaggtctcctatttaaaaagaaaaatatatagattaaactaagtcctttctttacatcatcctgttccactttctcccaagtggtggcagctaacctgatgatgctgtgtgtcctttctgtatgtgttgttaagacttttggtacagatgtatacaccacaataatggtaaaaaggaaagttgcaacaatatacatacttaatggcaccatttatgtaaattttaggcaaagcaatttcatttacaatagaatgaaaaggactaaaatacttaggaatatatttgaccaaggaggcgaaaggcttacacactgaaaactataaaatgttgctgaaagagcttaaaaaagacacaaatatatggaagggtatcttgtgtcagggactagaagacttaatatggttaaaatatcagtacctctcagctacttggaaggctgagacagtaggttcacttgagcccaggagtttgtgcccagcctgggcaacacagcaagactccatctctggtgaacaaaagaaaaatgaaagaaggaaatgtcagtactacctgaagtgatctacagatacaacgccatccctatcagaacccccaaatacattttgttgcagatatagacaaatttattctgaaattcatgcaatttcaagggggtcccaaatagtcaaaacaatcctgaaatagaagaagaaagttgaaagccttatacctcctcatctcaaaacttattacaaaaccacagttttcaaaacagtgtggtactgcacatatatagaccaatggactaggatagagagcccataagtaaacccttgtatgtatggtcaaatggcttttgacaagagtttctaaaatattcagtggagaaaagacagccttttcaacatgaataaatttgggtccttttcttactctgtatacaaaactaaccaaaatggatcaaagacctaaatgtaagagctaatgctataaaattcttagaagaaaacacaggggaaggctgcgcacagtggctcatgcctgtaatctcagcactttgggaggccaaggcaggtggatcacttgagctcaggagttcaagagcagcctgggcaacatggtgaaaccccatctctactaaaaatacaaacattagctgggcttggtggtgcatggcacacacctgtaatcccagctactcaggatgctgaggcaggagaagctcttcaactcagtgggcaaaggttgcagtaagctgagatcgtgccactgcactccattctaggtgacagagtgagaccctgtctcaaaaacaaaacaaaacaaaacaaaacaaaaaaaccagtagataacataggggaaaagcttcaaggtattggatttggcaatggtttcttagacatgacaccaaaagcacaggcacaaaagataaattggactatgtgagagttaaacacttctatatatgaaaggagaatattttcccagaattttcatccctcctttaaaattttccattctaaacactataaatatataaatgtttcatgcaaatattttctcccattctgtgggttgccttcttactctgtttttttcccaaagtaaccactctgtcagagtacaatcaacagagtgagaaggcaacccacagaacgggagaaaatatttacaaatcacatagatgataagagtttgtttgtttgtttgttttttgagacagtctcgctctgtcacccaggctaaagtgcagtggcacaatcttggctcactgtagcctctgcctcccaggttcaagtgattcttctgcctcagcctcccaagtagctgggattacaggtgcatgccaccacacttggctaatttttttttgtatttttagtagagatggtgtttcaccatgttggccaggctggtctcgaactcctgacttcaggtgatccacccacttcggcctcccaaagtgctgggattacgggtgtgagtcaccacgcccagccctcccgataagagtttaatatctggaatatataaagaaatttttcaactcaataacaaaaaacaattaaaaatgggcaaaggactttcatagacacctctccaaagaagatatacgcatggccaataagcacatgacaagatgctcaatatcactaatcattagagaaatccaaatcaaacctgcagtgagatactacctcccacccgttagaatggctagtatcaaataaacagaaaataagtaccggtgagggtgtggagaagctggaacccttgtgcacagttggtaggaatataaaatgatgtggttactttggaaaaaacagtatgatggtccctcaaaaacttaaaagtagaattacatagtaaccttagaaagttggtaattctgatatgtgctatataacacagatgaatcttgaggacattatgctaggttataagccaggcgcaaaaggacaaatactgtacgattccacttatatgaggtacctggagtagtcagactgatagagacagaaactagattggtggttgccaggggcagagaggaaggggaatgaggagttattgcttcaagaatacaaagtttcactttttaagatgaaaggttttctggaggtagatggtggtgatggtagcaggaaaatgcaaatgtatttaataccactgaactgtacatttaaaaatggttaagatggtaaattttatacgcgttttaccacaagtaaaacatacacaaaacaaatcagtatttataatgaaaaacttaaaaggagggttgtggccaggtgcagtggctcacacctgtaatcccagcactttgggatgctgaggtgggtggatcacctgaggtcaggagttcgagaccagcctggccaacatagtgaaaccccgtctctactaaaaatacaaaaattagccaagtgtggtagcacgcgcctgtaatcccagctacttgagaggctgaggcaggagaatcacttgaacacaggagatggaggttgcagtgagctgagatcacgccactgcactctagcctgggtgacagagtgagactctctctcaaaaataaataaataaataaataaaataaaaaaggaggtatgaaaattctgggaaatgaatgcatggtaaaaatgaaagttaagtgaagtgttaatcgtaggagaagtgaagtattttatgtattttaggtctttattctgatttctgaatacagctgtctgaatgaatgacagaattaattaatagtataaaacctgctagacacaaagtagaaatattattcagcttgtcatggtgataagccgaaaagtacccaataacaaactgatttttattataattattttcatgattcccttctggattcccaggatgttttccatttctgtcttgctcaatataacacaaaactggtcaaaatagtttttggccaggtacagtggtgcgcacctatagtccatccactcaggagaaaataagtttatgatgaattaaaatattaacacagttaatatcttaaagatggtgaaaaactaaattcatattgaatgtgattcacttgaaagaaagagttgaaagaagagtgtcagagtagtcctaatgtataagaaaattagttagaaatttggccttcctagcgatggaaaaaggagcactatacatgcactttttgaaaaattttgcctgatgtttcatgtttactactaataaactagaaagcaattgtatatgatcctgtatattgaattgttacagtgggccaatgatagaaaattttgtaaggacctaagggtttttcgtgtctctgtctccttcagttcggctctgatcttagttatttcttgtcttctgctaggttttgaatttgtttgctcttgcttctctagttcttttaattgtgatgttagggtgtcgattttagatctttcctcctttctcctgtgggcatttagtgctataaatttccctttaaacactactttagctgtatcccagagattctggtacattgtgtctttgttctcattggtttcaaagaacttatttatttgtgccttaattttgttatttacccagtagtcattcaggagcaggttgttcagtttccatgtagttgtgcggtttcgaatgagtttcttaatcctgagttctaatttgattgcattgtggtctgagagactgtttgttacgatttccattcttttgcatttgctgaggagtgttttacttccaattaggtggtcaatttttgaataagttccatgtggtgctgagaagaatgtatattctgttgatttggggtgtagagttctgtagatgtctgttaggtctgcttggtccagagttgagttcaagtcctgaatatccttgttaattttctgtctcattgatctaatattgacagtggggttgttaaaatctcccactattattgtatgggagtctaagtctctttttaggtctctaagaacttgctttatgaatctgtgtgctcctgtattgggttcatatatatttaggatagttagcccttcttgttgcattgatccctttactaccaggcctgccttacaagagctcctgaaggaagcactaaatatggaaaggaaaaaccagtaccagccactgcaaaaacataccaaattgtaaagtccatcaacactatgaagaaactgcatcaactaatgggcaaaataaccagctagcattataatgacaggatcaaattcacacataacaatattaaccttaaatgtaaacgggctaaatgccccaattaaaagacacagactggcaaattggatagagtgaagagccaacagtgtgctgtattcaggagacccatctcacatgcaaagacacacataggctaaaaataaagggatggaggaagatgcactggtttttcctcatctttatggatttatctaccttttgtctttgatgttggtgaccttcggatggggtttttgtgtggacctcctttttattgatgttgatgctgatgctgttcctttctgtttgttagttttccttctaacagtcaggcccctctgctgtaggtctgctggagtttgctggaggtccactccagatcctgtttgactgggtatcactagcagaggctgcagaacagcaaagattgctgcctgttccttcctctgaaagcttcgtcccagaggggcacctgccagatgccagctggagctctcctgtgtgatgtgtctgtcaatccctgcgggggggtgtctcccagtcaggaggcattggggtaagggacccacttgaggaggcagtctgtccgttaacagagctggagtgctgtgctaggagatctgctgctctcttcagagccagcaggcaggaacgcttaagtctgctgaagctgcgcccacagctgccccttcccccaggtactctgtcccagggagataggagttttatctagaagcccctgagtggggctgctgcctttctttcagagatgccttgcctagagaggaggaatctagagagacagtctggcgacagcggctttaccaagctgccatggctttgtttattctctgaggggaaaaccacctactcaagcctcaataatggtggatgaccctccctgccaggttgacttcagactgctgtgctggcagtgagaatttcaagccagtggatcttagcttgctgggctccgtggggctgggatccgctgagcaagaccacttggctccttggcttcagccccgtttccaggggagtgaatggttctgtttcgctggtgttccaggcaccactggggtatgaaaaaaaactcctgcagctagcttggtgtctgcccaaacagccgcccagttttgtgcttgaaacccagggccctggtggtgtaggcttccaagggaatcttctggtctgcggggttgtgaagaccgtgggaaacgcttagtatctgggctgaatagcactgcccctccctcatggcacagtccttcacggcttcccttggctaggggagggagttccctgaccccttgtgctgcccgggtgaggcaatgccccaccatgctttagcttgccctttgtgggctgcacccactgtctaaccagtcccagtgagatgagccgggtacctcagttggaaatgcagaaatcacccaccttctgtgctgatctcgcggggagctacagaccggagctgttcctgtttggccatcttgccagccacttgagaaaaatgtctttttactgtttttgacttaaagctgttttatgtgataacagtatagctactcctgcttatttttggtttccatttggatggaacaattttttccatccctttactttcagactatttgtgtctttaagggtgaagtgtgtttcttgcaggcagcatatatttgggtcatatgtttattcagtcagccagcctccatctttttattttattttattttatttttttgagacagagtctcgctctgtcacccaggctggagtgcagtggcgtgatctaagctcactgcaagctctacctcccaggttcacgccattctcctgcctcagcctctcgagtagctgggactacaggcgcctgccaccacgcccggctaattttttatatttttagtagagacagggtttcaccgtgttagccaggatggtctcgatctcctgaccttgtgatccacccgcctcagcctcccaaagtgttgggattacaggggtgagccactgcacctggccaccagcttccatcttttaagtggagcatttaatccatttacattcagggttattattgatatatgaggttttgttcctgtcatatcattaattgctttctgtttgttttatatgttccttgttccttcctattttatattgtttatctttgtggttggtgttttccttcagtggcaacattagagtcttttctgttcctcatttgtgtgtttgccttaccagtaggttttatacttgcacgtgttttcatgatggtgtatattgtccttttgcttccaggtttaggactcccttgaacatttcttatagggcggatatggtggtaatgcattccactggtcaaattcggcgtttgcttgtctgggaaagactttatttctccttcattaatgaaggatattattactgggtatagtaccactgagtggcagtgtttttctttcagccctttgaaaatacgattccattctctcctggtatgtgtggtttctgctaagatgtcgactgttagtctgatgggacttcctttatagatgactagatacttttctcttacagtttttaaaactctgtatttggctttagatagtttgactataatgtatcatggaagagatactgttttgcattgaatctggttgaggatttctggaccttctgtatctggatgtctgtatctctcactagacttggggagttttcagttattatgtccttaaatagagtttcaaatcctttcattatttctttgccttttgggatactgataatcttgatttttggttactttattgtgtcccatatatcatgaaagctttctttatgttttaaaattactgaaaaatttttttgtgtgactgcattatttcaaaagacttctcttcatgctttgagattctttcttctgcttgatctagtctgttgaagcttttgaatgcattttgcatttcattcagtgaattcttcattccagaatgtgtctgattcttttttatgatacccatctttttggtaaatttctcatttatatccttaattgtctttctgatttttttgtgttgtttttcagatcactcttgtgtctcactattattagtatcaaaatttttagttatttttctggaatgtgaatttcttttggatgggatctgttgctgcagacttattgtattcctttggaggtatcatattcccttgctttttcatgtttcctgtgtccttacgttgatatttgaacatgtagggtaatattcgcttcttccaattttagaatttgttttcataggggaagactttttcctgaagatgtatccatgctgttggttgggtaggaccctttggctttgattctgggtgcatgtggtagtcactgtatagtgtagtcactgtatgatttctttggctgtaaacagtatcggtggtatctgtgatttctttagtggcttagggtactgttattagtagaggctgtaatgaggttttctggggacaaggatgccacatgggccactctttgggcctaatggtggtagtggtgggctgagtatgtctgtccttgggccccggggttgcatgtgctgacactgatgttagtgggtccaggtgagtaaatttaacaaaagaagtataaaacttgtattgtgaaacaaaccattgaaaaaagaaattaaggaaaatccaaataaatggaaagtttctaatatttgtgaattgaaaaacttaagatggcactgcttgcctgtattagtctgttctcacgctgctaatgaagacatatccaagactgggtagtttataaatgaaacagctttaatgaactcacagttccatatggctggggaggcctcataatcatggcagaagatgaaggaagagcagagggacatcttacatgcagcaggcaggagagcgctcttgcaggggaactcccctttataaaaccatcagacctcctgagacttattcactatcacaggaaccacacggggaagacccacccccgtgattcaatttcctcccactgggtccttcccacacatgtgggaattatgggagctacaattcaagatgcaatttgggtggggacacacccaaatcatgtaattcccaaattagtctaaagatgcaacacaattcctgccgaagtccaagctgtatttttatcagaaattgacaagctgatcctaaaatttggaaaatatggaaacttaagggacccagaatagccaaagtaatctaaacacacacacacacacacacagacacacacgaaaaaacaaaaaaacacgccagtcacattggctcagacctgtaatcccagcactttgggaggccaaggcaggaggatgacttgagcccaagagttcgagaccagcctgagaaatatagtgaggcccccatctctacaaaaaagttttttttagctgatggtggtagcatgtgcctctagtcccagctacctagaaggctggggttggaggatagcttaagcccaggaggtggaggttgcagtgagctctgatcacaccactgcactccagcctgggatacagagcaaaactctgtctcaaaaccaaccaaacaaacaaacccacaaaaatccagaattggataaatcatatttccatctttcagaagttactacaaacagccttgtaatcaaatacagtgtagtacttgcaaaatgattgtcatataaatcaacagaatagaattgagaatccagaaataagcccaaaaatatatggtcaattgatctttgacaaaggtgccaaaataattcaatggtaaaaagaataatctcttcaacaaatggtgtcgaaacacctgggttcacatgtaaaggaatgaagtagaaaccctacctcatattgattagtatacaaaaattaatccaaaatggattgaagacctaaatataagaggcaaaacatctttaaaaatagatgaattgttcaacatcaagattaaaatgtttgcttcaaaggacactaacaggaaattgaagacaaaccagagaatgggaaaaaatatttgcaaatgaaattttcagtaaagcacttgtgtttaaaatacataaagaacacttacaacttaacaataaaaaacagcccactctaaaaataggcaaaagatctgaatagacgtttctccaaagaatatatgcaattgccggtaagcacatatagagatgttctgcatcataaggcatggagggatccagatgcaaatcaaaaccacagtgagattgtcctttgtacccactacatagctctactttaaaaagtcaggtaataacaagtgttggtaggccaggtgcggtggctcacgcctgtaatcccagcactttgggaggctgaggcaggtggatcacgaggtcaggagatggagactgtcttggctaacacagtgaaaccccgtctctactaaaaatacaaaaacaaaattagctggggcatggtgatgggcgcctgtagtcccagctccttgggaggctgaggcaggagaatggcatgaacccgggaggtggagcttgcagtgagccgagatcgccacactgcactccagcctgggcgatagagcgagactccgtctcaaaaaaaaaaaaaaaaaagtgttggcaaagaggtggagaaattgaaaccttcaaatgctattggtgggaacgtaaaagggtgcagctgctttggaaaacaggatggcatttcctcaaatggttaaatatctgggttattcagaaccttggctctgttgtatcaggagtatttaatcttgaatatttatataagtatttatgtatttctttattactatggtgaatatatcttacctttcaaataatattgaagcaagttatttccctgacccctttgcgggaccgctttgccacggggtgcctcctttaatcagcctatagctctcaactccttgtgggagggagcacacgagcgaaggaggcgggaactgtagtgcaggagcactggaactgaccagccgttttggcgccagtgggatcaaactccactcatttgcacctgttgccttccacacctcgtaggagggagtgcacaggtgagtgggtgcaggaaccagagcaagtgcttttgggcgccagcaggagcgaactctgtgcaggccccatggcagcatccaggaggggtgcctgtgactcccaaagccccagagggcatgttacagtgctcttttagctctgctctccacaggcggcttaagtgttaacagctcagttggcctgctgctgccctccaccagcgagggcaaagggccagcgtaacaaccttttgtatccacacacatggctcctgaactcttgtctggtgtccaggaaaaatgaggtcacacgaactaattgaaggatggtaaatgcaggaatgattttattgccgatgaaagtggctctcagtgggaagagaggggagctgaaaaggggacagaggaggggtaggtgatcttcccctgaagtccggctggattttctccggttactccatcaagctgtccctctgaagtcaagtcccttctctccaacattcagctgcttctcctctctgctgattgagtctggggtctttataggcacaggatgaggtggggtggggccatgggtagtttaggaaaaggcaacatttgagctggaaaacagggagagaagttctcactttgggccacggtctcaggcttttcagcttgagggtggaacttcaccagggacccacacctgtctgcctagaatttctctgcctcctgtctctatcattgtatcaatatcaaacaatagttgttggcctacatgtcagtaatttaaagatgaattaaatggttatatatgataacatttatcagagacctttagaaacattcatattctttggtctactatttttacttctagaacatattccaagcaagcaatgaaaaatcgctaattcaacatataatattttgtcagggaaaaaataaattaaaggcagttgggcttggagatatccatgtaaacaatctgtacttataagggaaggcagagttggaagtaattaaaataatgtaataaatgcattaatagaggtgtcatcaaccagttaaatctatgagaaagaaagaaaggcactcaactgcttgggggaagggaaggatctgggggaagatgaaagaagttcctcttgggggagatgactgatgagtcacagcttagaacatattttttagtatatataagccagaacttgcctcaaaattattgtataaataaatgaggaaaaacattagaatgtggtagcatgggggagagcacctcagtcccccaagtagctgagactacaggggcatgctaccatgtctggctaatttttatattttttgtagtgacagggttttcgccatgttgcctaggctggtcttgaactcctgggttcaagccatctgcccaccttggcctctcaaagtgctgggattacaggcatgagccaccgtgcccagcctgtgatttcaagttttatccaagcaatattttttgagagcaatataagatttgagactgggtgcgtggctcacgcctgtaatcccagcacattgagaggctaaggcgggaggatcacttgagcccaggaggtctagaccagccctggcaacaaaaaaaattttatatgattagccggtcatggtgatacacgcctgtagcctcagctactcaggaggcccaagggggaagatgctttgagcctgggagattgaggctgcagtgagccatgattgcaccactgcactctagcctgggtgagagtgaaatcctggaccccgtgtcgaaaaaaaaaaataaagatttgagataggtaagcttttgtgtacaagagagtttgtgctacattttgttttctttataatgtttgttttggttgatgcaaaattgtttcatcttagatgcttgaggtggaaggagggaattgttttgtagtattcatataattgaaattaccaccctatatttttctcctcaaagaaagaatatggtgatgaactaagaatagaaaataataactacatatggatgcataataagaaataattatatacgcattgtttgacgttttccttctctgctataactcaccctttttcctttgttctaccaccatatgttttgttctggatttcttgactaagaaaacattccaccatagtttattttaatatttaaagagcactttgaaagtttgatttttttttttttttttgagacagagctcactctgttgcccaggcaggagtgcagaggcacaatcttggctcactgcaacttccacctcccaagttcaagttattctcatggctcagcttcccgagtagctgggattacaggcacgtgccaccacgcctggttaatttttgtagtttaagtagagacggggtttcaccctgttggccaggctgatctcgaactcctcacctcaggtgatctgcccgcttcagcctcccaaagttttgggattacaggcgtgaaccactgtgcctggccaaaaattcaattttaagtaaatctgtttaaatgtttttgtgtaacgttttcataaaaatgaaaaattcgatgaacttagaatatgccaagaatcttctgcacaaaataataactttgtgttctcaaatagtaatataaagaatctgtaatgtatcttcattaagaatttatacatgcattttacatcataatctcttttattctatgaatagagcataatactaaattatgaagttactggaatttttataggaacatgataagaatcatgtggttcttttaaagagttaattttggaacatcttttgttcaaaaaatagaacattattatatgtattcttttgcctctattgtcagtttttaggataggcttttaatcttgaacatgaaaaggacatcagtaaacaaggtgagttaactattacatttatgcctattataggcttttagtttaaaaattacctatggcttaaatacagagaaggcagacagaaaaagaacctttttttccctgagcattttaaagagaatactacagtaccattaggggtttataataaaggactataattctatttagaaaactgacttacagtacatgacaaatgatagaaaattgaggtaagttttttgaagtcatattttatatttattttttatttttcattaatttgtcttttgccagaattaaatgttatgatcattaaactacttctcttcttaggtaattttttcacttagtctttctacccctctacctttaaaaagtatactgaacaaagcagcaaaagatattctctttgaggaaaataccttattttctgtgaatagttttttaaaattaaaacataatgcataaacatagaaattcttttacattggcaagaactttttccttgataaaattatttttccatttgaaaaattattaggataataagtcaagataatgcttaaaaatgtaaaaattttctgcaaagaatgtaaaactgtcgtaagtgaagccaacaggtaagccaaaaaaccagagagaaaatttgcagttcattttagtcacaaaataagggatgcccttcatatatgcagaactcttacaaatcaatatgaaaatgaacaaaagccctggtaaaaaaatattcagagacagtttacagcaaaggacatgtggctcctgcacatatgataaaaagtgctaaaagccacacacacattcaagtgaaaatcatgatgagatacgattttccatgcacattttggcaaaaatgaaaaatgtgttaattccgttttgttttgattttatttatttattttttttgagaccaggtcttgctctgttgcccaggccggagtgcagtggcatgatcacggctgactgcaacgtcggcctcctaggctccagtgatcctcccacctcaggctcctgaatagctgaatagtcagcatgcccagctcctttttgtattttttatagagacagggtttcaccatgttgcccaggctggtctcgaactcctgggctgaaacaatccacctgccttggccttccaaagtgctgcaattataggcatgagccactgcacctggcctcttcctaagattgtagaaacgtaagctctcaaacgctggtgggagtataaatggatataacaacctccatggagagcaatttgacaaaatgaatttatactgtgtgttatgtccacctgtaggagatgtgcaagaatagtcatgttagtattatttcttagagcagaagactggaaagaactagcaaaaggtagtgaaaaggtagctcactccaaaagttttgcttagggttccagagttcatagtaatttcatttgtcctaaaacatcacaggactattttaaagaatactatgtttctccctgctattggtttaaggaagaatgtctaaaagtaacttactgtaccagtgtaacatggtatcaaactgcctgtcagactggaatagttaaataaatatgatacattcataacattgaaatactgtgcagcctttaaaaagttgagagtgtcttctatgtgctgctttctttttttttaagacggaatctcgctctgtagcccaggttggggtgctggggtgcagtggcgcgatctcagctcactgcaagctctgcctcccaggttcacaccattctcctgcctcagcctcctgagtagctgggactacagatgcctgccaccatgcctggctaattttttgtatttttagtacagacgtggtttcactgtgttagccaggatggtctccatctcctgacgtcgtgatccacccgcctcggcttcccaaggtgctgggattacaggcgtgagccaccgcgcccagccctgtgtgctgctttatcaagtgacagaggcaaacgacattcattggcataaaaaagaatgtgtgtgtttgtgcttgtgatatccacagaatatctttggaaggagccacaagaaactgggacccatggttgcctgtgagttggggagctggagggctgactccataacaagtgagaaggatacatctcttagatcatatctttttagtattttttgaattttgaaccctacatgtgtattacctattttttttaaaaaacatttcaaaattgtgcagtggaagggtctgtaagatggagcagtgttgaaataatggagccttaattacctttcaagaaacttctgcagtgacttggccatccggggaagcaatcagaaaagcagctggctcattaaatggagagtgctggtcccacaggtgtaagtacacaaaacgcaatcactgaaattctttggctagcacttccaactcggagacagttgctggagatcacttaataggctctggttacaggttgatctaatctgaattaagaaattggaaaaagcaaagaaagagcagtaacataggtcagagtaaggaagctgagtccgaacagttcctccacagcctcctgtttccccttctgtaggtgtatgaactacccagagagattactgtgaatgtagaatagttggagagatgtgtttcccaatagcaaaaggcagtgtaaaggtagttcactccaaaagttttgcttagggttccagagctcatagtaatttcactcgtcctaagacatcacaaggctattttagagaacagtatgtttttccttactcttggttcaagcaagaacatccaaaagtaacctgatgtaccaatgtgactccttatcccaagctaaagaatatcctttcaaggcaaattcatccaaatcagcttgacatctgatgggagggggttggataaacaaggttgtagagaaatcaagtctgaagagtaaccttgcacagcttgatctgtttactttttaaatgcaggtttgttcagtgggtatcgcactctacttttgaaacataggactaaattttcacaaaaatgtgaagatcctgcccgtgtactctggaaaattgcttgtctaattgggtgcacagctgcacctgtaccctcttgaatgactcagtcatggtgtgctcaagggccaagtaacttgttatggtgctaagtgaagaacaaaaatatataaaattcagttactttggcaatgaaaaacactgaatggtattggttgttatattacagttggcaaatactgtaattaagacttcaagtgatttttagtattagccctggattcactttctgaagaattttatttagaataaaactttcagcgttgataccagatagtcacctttagttcagttcagtttcataaatctttataaaatatttatagtagtcaaggagcctattacgggtgctagtcaggtttctgcaacaacaaaaagtaaattaaagttggctgggtacagtggctcacgcctataagcccaacagtttaagaggctgaggcaggaggatcgcttgagcctgggagttggagaccagcctgggcaacatagtgagaccctgtctctacaaaaaaaaattagccaggcatggtggcacatgtctgtggtcccagctactcagggggctaaggtgggaggatcaagtgagcctgggaggtcaaggctgcagtgagctgtgatcgtgccactgcactttagcctgggcaacagagtgagaccccatctcaaaacaaacaaacaaaaaatgtaaaactcacaaatttaaaaaagttttaagaccaggcgcaatggctcacgcctgtaatcccagcactttgggaggccgaggtgggcagatcacctgagatcaggagttggagaccaatctggccaacatggtgaaacccagtctctactaaagatgcaaaaattagccaggtgtggtggtggtcacctgtagtcccagctacttgggaggctgaggcggagaatcgtttgaacctgggaggtagaagttgcagtgagccaagattgcaacattggactccagcctgggtgacaagagtgaaactccgtcttaaaaaataaaaataattaaaaagttttaaaattcactttggtatgatattttgacccctcaaagttgtttataaatagaatgaacagtggagccatctgttaaaatgccttggctgagtgactcagctagtagatgaattttgacatatttatagcaccatgcattgatcattttagttgtaatataacagctgtttattgagtaccttttatgacataggtcctggagaaccagtggtaatcaaaagagatgatacatctgacttctcacagtgtcatctgttgagggggacaaggatgaaagctgtgtcagtgaaggaggaaaattgagtggtaacagggagggcaggtgctgtggtgagcatgtatgtagcggaggccccgaactgaacacggaggtggttaggggaggcttaggaaggaaatactggccaggctgagacctacacaggaggtttgggggagggtaggggaaggagtcagagtttgaaggcctacataaaaagtagatacagctataaagaacgagatcatgtcctttttagggacatggatggagctggaagtcattatccttaggaaactaatgcaggaacagaaaaccaaatgccgcatgttcacatttataagtgggagctaaataacaagaacacatggacacaagggaacaacacactggcgcctaccaaagggtggagggagaagatcaggaaaaataatggatactaggcttaatacctaggtgatgaaataatctgtacaagaaaccctcatgacacaagtgtacctatgtaacaaacctgcacatgtatccctgaatgtaaaatagaagttaaagaaaagaaaaacacacacacaccaaaaaaaagcagaaagagaactaagaaagttaattgtgtctgaagcaagagagaagttgtgtatgactgcagcacagaaagcttgaagtgtgggacctggtggcaggcagggagggggaaacgagtggtgagatgggaggggcaggccccaggggaagcagctgggacccggccatgtgaaagtgccagccctgaacctggtctggatgtgtgtggagtgcagtggagagccacagaaggcttgcctgcagggagtcggacagagttgcctgtttgggagatcactctgccttcatgatggagaataggtttggagaggcaagactggaggaagagggcctgctagaagcagtcatgcaggtgggcgctgtgagcctcagctgcaagtattttggagaaaaaatggatcaacatggaagagatttaagatgtagaattaaccgtgcatttattgagcagtaataatattagctaatatatattgcatatttaatatgtgtcaagcactgttctaagtgatccacatgcaatatgttatttaacaacaattgtagtcaacatgtacaatctactttcatttctattccaatcctataaagcataagtactattattagtcctatttttaagtataaggaaattgaagcatagagaggttacgtctagagaaataggaagacaattttagacataattttgaagggatctgtgagatacacaagtggagatgtttcctgggtcattgcatgtgaggttctgtggcccaggagagagtttgggggagattcggtctccagtagtataaatggcagttgaacacgggttgaattgaggagaaagtagaaaagggaagaggaccaagaaagatgaaaccttgaggtatgctaaagatttaaaggatgggcagaggaagaagaatcagcaaaggatactgaagaggagcattgaaagagactgtgtcagaaaacccaagaagttgtgttgtttcagaatttaaaggaagaggctgttttaagaagatgaggtcattgatgccagtgaatgtaagaagtcatgttaaaacaaaaaaaacaactaaggctgagatttatccattggatttagtgaaaataattgagaacaatttcagtgttgtaatggggccagaaatgaaattgtggtgagttcagacattgagatatgcggacaagtggagtgaatgactcttctaaaggcatggtcgttaagagtgggccatggtgttgaggggattgactttttaaaggtttaataaattcttaagtgctgataacaggtgccagaagaagggaatttttgatgattaaagaataaggagaaaaagaagaactaggagaagggcctctgtgcttttttttttttgaaatggagtcttgctctgtcacccaggctggagtgcagtggcacgatcttggctcactgcaacctccacctcccgagttcaagtgaatctcctgcctcagcctcccaagtagctgggactacaggcgcacgccaccacgcccagctaatttttgtatttttagtagagacggagtttcaccatgttggccaggatagtcttgatttcttgaccttatgaaccaccacacccagcctctgttccatttttatatgaaaggacaaaggagcgggtggagatgaagggagagttggtgacttattcacctgtgatggctgctgtgggggaagaggtgaggtgagactgggaggagttgattatggcattagaaattggaagtacgtggaatgttgttgaggctgggagcaagaattgacttaaacacaacagaagggctaggctaaccaagcttccatttgaagtcgtggagcaggagttgatggggtatcaatccatgtggtcagatagtgcaaggcagctctgcatgtccaggaggccaggacacagggaggctaggcggagaggtgccagtgagggaggtggagataggcagatcctgaagggcctttaaactatgggtttcgattttattgtgacattattcattatctagccagcttttataggagcagtttataaagtatgttctagggaatactattgatcaacacgtttttcaaaagtctaaattgtgttcaaattggtgtcttgtgagaattaatagaatacatatttagatcactttcataaataaatacattaacatcatattttcagtaagctcatatttgatatctaatcaaattcttttagtcatgaatttgaatgagaggttttttgggttattgttactgtttgttttgtcttctgtgtttttatatttggaagcagaattagcttttggtctcttaagtgaccccttagtcacttaagatggtgttcatttccatcattgtgcttatcatgcacttgagttctcgtgtttatttctttgtccacttgtttaatttcagcctcttcacactaaaataggagctttgtaaaggcaaggacctagtcttgttcactgtcacacttcttgtacttctcaggaaatattcattgggggcagggtagaggagttggggaaggaaggaaggaaggaagagagagaacagtgaagcgggaaggaaggagttccaaaaactgcttccctagtggtcatggaaactctttaataaattagaatgttgtctccaaaaaatacaggcagatatgcgttgacaattgcctttcatacaccttaacaaactagttacataatgggatatcaaaattcagtcaatgtgtttgctagtttaatttgttgtgattaaagaaaacaatgattttatttataaatttagcacctaggaaatgtgatttcaaatatcaaagcataggcattttttactctttttaaaattgaagggtcaacaaaatctgccttattcttcacagttttttctctgtcagtaatgtagcagtgtgttaatttccagaaatttaatctcttctataaaatttcctgtgacctgaaaacttttgaattggagttaatttaccaaactgtcatggaatgcctgaaatttccttggggcagaggaggtagcagagaggtggtaagttaccatgtttccattgtgtgaataactgataagtgggattccaaacagaatccatgtagcgttttaatgaattcacatttggagaaaaaagtcacagactttcaaaacttacaggaatttggctgtcctagggcaactcctcacttaacagcaagaggggatgagaaggttgagtgactcacccagggaagtgactcacccagggaaggtcaagtgactcacccaaggttacttggtaagtaaagagagaagccagaagcctggggcctcctgacggctcctgcttctctttttactaaggtcttctgccatgggaagaaactctgaatgttagcaaccatctggatggtgttagttgtatgtctctctatgtatgttgaaaagaaaatgttgaagaattgaatttctcctgcttatgggttgtgtcacatttaatagcgttctttaagaaaaaaacacgattgctcaatatgattatatgagctcaccataaccaatgacaggcagaaaatcctgggaggatagacactaacaccacattatcctgttgggataatatcccaaattctgaatataactttcttttaccactttaaaggccaaaaaatggctgttaaatggagtatttttgtcaaaccaagtttttaaagttttcagcagctgcttctgctggcttttattaactactgaagagtctttttttttttttttttttgagatggagtcacgctctgtcacccaggctggattgcaatggcgtgatctcagcccactgcaacctctgcctcccgggttcaagcgattctcctgcctcagcctccctagtagctgggtttacaggcgcccgccaccgtgcctggctaatttttgtatttttagaagagatgcggtttcaccatgttggtcaggctggtcttgaactcttgatctcatgatctgtacacctcgggctcccaaagtgttgggattacaggcatgagttaccggaccctgcctactcaagagtcttaattgaacatcaaaatcctggttttgtttataaggaaaaaaagttaatggtgcaactaggactaattctttgattaattttttaaccacttctacttagcaagtatatgaaacacattaaagactgatgcatctgttttgtttttgttttgagatcaggtagaagatctacaaaactagttggaggctggaaagaaatttcagatagtgatacatagaaatgttctgccttaactctgaatttttagtcatgaaatagtgcaaactcttaacattacttttgtggagctttgtagtccataaaaataacattgttgtagagcctctgtatgcgtcagctgtgactgagtgttttgatgtcttagcaaaaggcagaggagtgctttcctttgaaatgtgtgaggcggtttgagatgcagcttctcagatggatttaattagtccttcgtagaactggatgtccgtttgttgcaactgaattctcatttcattcatccataactagaaacacctcgcttcaaacgggtttcttcaaagaaagaggggtttagggttctatgttgtactgctttttgatgttggtttccctttaactgagaagaccttatgtttatacaactgttattattaagaaaacacagctttcttcagcgaggttccttttgcatcagcgctggttcttggtggcagtcagaggtctgtggaatggatctctgtcagactatcacagcagctgtgtgtttgcagattttgcttatgagaggcatgaactgaaaataggcgtaaacttgagtaattccctaaacccaaaatataagatagaaaccagtaactgaatctggtaacagggtagttgtttgtttcagaagcttatattaaccacaaaaacaaagtgaatcaactaacaagggttaccatgacccaaatagtaattgcattttgattcactttgcctacagtgcacaggtcaggtctgcttctcaataaatatgttgaaagaatgaaatatatccttcatagtaaaattatgttttttaaaaaatatgtcctactactaatattttttaaattatccctaaaccttcacatttcattagaatagctacttcaatttactctgaaaaaactgctttcttgtctttccagtttgtgtgtccagggtctgacgtgctccatcatcaaggcagcttttatcttctgtgtccgtgattctaattacatttcagggggttgtgatctctcccagaatcccgttcatgcattgtgtttaggatgaaatgcttgagggggtttggggctgtacactcatgggcacaggtttgcatatctaaaactttctttgctctaacatcctgatttgtataaaaatcctaaaagcaaatttcagacttctaattattctttgcctttaaggaaagacaaaattaatttagactgttcaagcttaaaattatcccaaagccacagatcacactgaaaacacatagtaatatagcccacaaattattttggtgtcttgtttccatattccatccaagagtctgtagaatctgtaggcttatatttctgtcttgtttcttagccataactgatcttttccatcttattcaccagactcagcactgcgtaactgtggcaatttctgaaactcagtggcaagggatataccaccattgaagagattaaaaataatcaacaaaggctttaaaaagtttaaaaaatgtatttggagcaataatagcaataggtcagaaaaagttttcacggaaagggccaatatacaattaggtttccatctctgtattcttgattgtgtgttttatgtcttgtgactatcttgtggagttcctaattttaaaagaattatgggtgtggctcaggaatattttattacatttgtgtaaattaaataattttttaaaattatggatgtgatttaaatattcttttagtggttctgcctttggtacagtgttccatgattttgtaatgtttttatttgttgaaaaagctctaaaaatcttggtagaaatatagaatctcagaaggcagaacatttggtaattatcttttatatcaatttgcaagacaacttgttagggagccctatttctagtagttgaagttaataagtaacaaatcacagcaatcacgttttttatcatgcagagtgggcagtcttataaaaaagaaacgtcagtctttttggatatagggacacaagcaatcatagttttcctctgttatctttagtttgtaaaaatcaacctatctaccatcagcatttacccacaaggtttagtttggagttacctaaggggatggtagagaaacaataatttaacgttatgctgaaaacaatagtctctgaagatagagaaacctctgtcacttaccagttgtgtaaagttggaaaagttacttagcctccctgaaccactgcagcagtggtgtttacctgaatgttggcatagaggaaaaccaagggtcacgaggcaggtggacttgagtttaaataccaatcctgaacctgctggctgtggaatccagcagaagttagttatcttttcttagccttagttttccttatctgtagaatagggatagtattctccagggtttttgtaaaaattaaatgagattttatataaaggctctagtacagtggctgatgtaataagcaccccagaaatgatttctcttccctctaaaacacggatattttgctttttaaaagaagctaaagtagcttttactttgcaagcagttcttttccattgtatgaaaaattcttggaaagttttaaaaataagacaaaagggagccacagtggcccaggcctgtggtcctggcacataagcagccgaggctaggcgttcgaggttagcctgggcaatatagaaacctcttatctatataataaaaataagacaaaaaataaaatgtgccaacatatattagcaaggtttgtcagtactgattaatatttttacattctaatattctttgttagaattgtatttattttatgaagccccttttgaatctacagcagactacctgggaagtagttatagaggtcatcatcgtgtcttggtgattcactttgggaaattttgttgagtgaggctggtgaacctagaaagctgcttcttctgcctccccatttctgtccccaaggccctgctgtggttcaaaagcccatataaacctgcagtttccctttcttccacgatagggcgcgcacctacactgttagggtatggggccgactggctcctgccctgtgggaggtttgatccttgtccatttagaggcccttccttattcatggacactctactgagtgtctgttgcaaactccctggtataaaccccagacgtcatggatttaccacactaattattagagtggccattatttgcaataaaatagtgacccttgccactgtgttttcctaccaaataaacttactgacaagtatctgcattggctgggtcgaggtgtcatcaaatcagcctaggtttggatgtgctgttttgctagctgtagacccttgagcaattatgtaacttctctgagtgtcagatttgtcatctataaaatgtggttagtaacgtctccattgtaggatcgttcctaggattctgtgagtgtgatgtatattaaaatacctgattgatattagggcctcagtcatgttcctttctttgctttagactcatttctctgaaaaagtaatacgatgtttatagttggggaaaaaaacccaaagagcgttcataatctggatattaccactattgaaatttctattttgattcagtgttttttttgaaggtattcttatttttaagagagggaattataaaatatgccattttctaactcagtgtttaaaccttaaaaaaagagacatttcttgaaatgttaaacctatggctttgagcatggctgtgtgtggctgtatttgctcttggccatatttattgtggcagcgtggtaatgggtttatgcttgttttatcgcttgtggtttttataaaataaaaactgtgtttggctgtgtgactgtcgttcagaacaagattaaggaaactagatggagattaaacatagcacaatcttctgttgtaaataaccatagacaaacttgtgagcagctaccaaattccccagttggacaaaaagtgcttctttttagctttgaaaacctagtgatgatgatttgagaactggcataagtctctttaatcattcaggttcagcgtgattagaagaagagttgttttaaatgtttttgtgattagatttgaaacaaagcttagaaggatttatgattttgtttacaaccagctacgaaaaacaccaaggaaatgtgaaagctggtagtaattggtgagcttgctgggagtggatgttgtttccagtagtgtaacttaacaaagattgaaggaagctccgtgccattttatttcataccactggtttaggtgcattaattgatattttaaccaaaattttaatctaaatcaagtcttttaggttcaacctattccactgggttttaaatgatcatatatgcataccacagcacatctcacattgagaacgttacctcagtgggaaggttgtttcattcttggttgagtatagcattccagcttgtaattaagctgcaatacaaaaaatatacgcacttgctagaaggatattcttgctagcattctgtatgtatcatttgcttattcaagcatataaaacttcaacaagaggaggtaattttgcttagatctcttgatttgaattgttccgctatttggcactgggtggaaaagggaaaaaaatcatattgaaagcattgttctgttaatgaagttgcttgtccttttttgtgccaaatttggcaggtaaaattaccatttattctacttgctagagctggagaatagactgttgaggaaaagtagcaatttaagtaatgacactagatagaatgtgctacattatatacatctcccatacttttagatattgacatgcaatttttatttctctttagtaatgcactttgtctttaaccactacattacttcccgtaagctccatcaactacatgcaatttgcttcagttgtgaaatttaaaaatttactattaattataataaagtgaagcattttgattcaagaagaaattaaagattgctgtattttgttctggatatttcagaagtattgtattctttttaattctgaatatttaacataaaaaagatgaaatagacgcattggttaatttgaagaaatacaatcaaatttgaggtattcatggttttttccatgttaaatatgctttgcctatttatatttgccttaatttttgttttgtagagtataaaagagaaactttaaactcgtatacaaaaatgggaaaatatctaaaaatatgactaggtagttttaaaaattactcacgtattcaaatgaaatgcataagtttagcatttgctaaatttgagatattttatttcatattatttgtaaatatatttttgtttggcgtgaatttgtaattcactaagtttcttgtagattaaatttttcttagttgtaaaacttcaggcttaaaaaaagtattattattgttacaatttacactataatggctaaacttgcccctcctccttaaaagaaatataaactaatttgcaaaaatatattttttgaaaagccaattggtgaatttgtagacttgtaaatgttaattcaggaacagagttgagtattgctggaccttctaaccatcactcatttctttctgcccactaaactaactggtaggcaggtgcagatgttacaaaatctagcatcgcaattgacactaattggcatagttgttggcagtcttatcagaaagcaaagggctgaatggttgaatgggtttagagaacttgaatggtaataagcatttttatatgcatcttgaattacttttgtgacccagactaacaggaacactttattctgacctcattcttcaatgaatagaaattgtagaaagcataatatgcagtgtatgtgatgactgattgtttttcaggtaaccttttacagctatctgctctgttgcctacttcctccccccactacctcccttcccagtgctcagagaaaccaaagtactgtaaatgtgtggaataaaaaggagataacaatcattaatgaatattgaattaatttatttgagtggtttgttgccaaaagcttgaggatgtcataagagttaggctaaacttaagaaaaagtattcattgaatttatggatgaaacaaaaggacgactgggacttgcttcttaatagtcttggagcaggtgggtgaatcagtggggatatggataaaacaggattggctttgagtggataagttttgaacttgggtgatggatatatagaggtttattaaaccattctttctgtttctatatatgtttgcaattttccagaacagaaaggttgtttgtttagtatgcggggtgacttcaccctctgctgttgtcaggttttttcaatacctgccagttcctttccaggatctgccttttctcccccagttccttttatcaaaaagtacccatctaaagtgagaactacatcacctgacaagctgttctgtgcgcttatgtataaatgagttattttctaggcagtgtggattttaataggagttttctaaagacactgccttaattaaaggaatggctcttgggttgggaattatagtgttggggtgggtctttgtgtctatatgtgactatatgtagaccactcttcacacttacagaagtgttaggtgataattttaggtgtaatatgatgattgatcttagttctttttagttctttttttttttttttttgagagttttgctcttttgcccagtctggagtgaagtggcgtgatctcagctcactgcaacctccacccactgggttcaagcgattcttctgcctcagccccctgagtagctgggattgtaggtgcccgccaccatgcttggctaatttgtgtatttttagtagagacggggtttcaccatgttggccaggatggtttcgaactcctgatctcaggtgatccacctaccttggactcccaaagtgttaggattacaggcgtgagccaccggcatggcctcatcttagttctctatgttagaggtaatgatgtctttttcttctgtagaaagactttccaaaaagaaagtgcttttctttaggactttttagaatatgttcaaaatactgatctttgactaaggagaggaagagaaaccaagatcatatttcagactattgtttcttttcccatggttttggcttatcccgagaattgacttgacgtgttcccttttttatttcaaagtagcattgcttgaaatattttagattttttatagctttctaaggaattaaactctaaaaacactttaactgtttttttgttgttgttgcttgtttgtttgtttgttttgatacagagtctcactctgttgcccaggctagagtgaagtggcgtgatcttgactcaccacaacctctgcctcctgggttcaagcgattctcctgcttcagcctcccgagtagctgggactacaggcgtgcaccaccatgcctggctaatttttgtatttttagtagagatggggtttcactatgttggtcaggctgctttcgaactcgtgaccttgtgatccacccaccttggcctcccaaagtgctggaattacaggcgtgagccaccgtgcccagccaactgtttttttgtgttttttttatttttttttaattgtatcttgggaggccttcatgagtgaatgtagcttgctcattattttttgtaccattcccagtcattttctactcattcctttccttactagttttcagtttggccatgttctgtgtacaatttctggtaagtgctaccaaaaccaatatatattagacatgctgtttttcaagactcctgaaaaagtgccaatcttattctcctttcagtttgggagcacagtttcacaaataatagaatagtcttactttgtttgcagaattagaaggatttatctaacaacttgaatagataattttttttttgtagacgtgaaagtgaaaccttagtattgggatagaattttaagtagcattttaaatttgtttcaaaatcttttcttattgcctgcctttcattaaatgagctatggtaagtatgctggggtgtatacgtgtgcgtggtgatgagatgtttacctctgtgtggatcccttgtagattttgtattgtaaaagtgcataatagagtcctttatatagctggaataactgtaatctgctattgtaagcatatatggatttttaaatacaaccattataatactttataggacattacaactgaaaatattttgacttaaaagttgctttattagtcttacaaaagctatgttgaagagttttttgttttttgttttttgttttttttttaaagaaccatgttgtcagtggtcaacaatcaaatgtaaaaaacacttagctggaaaacatccattaagataatgaaagtgagccacgatgcttgtgtcagtttttatattttagtttaaaacatagttttttagcaatcctataattataaatataagttagattttctctctaatttaattagataatttttattttaatacaatagatacttatcaaggatctgtcgttcttcaagatcagggcactgtgctgagttcttcatgagggccatgaaggaataatgcccaccctcacgaacttccagcctagtttggaggtgttgagattaatacagtaatgattgtaatataaggcttactctgataagtacattgagatataaagtgttacagagattcagagcaaggaaagacccagccctatttagcagtgggcaaggggtggtatgggtgggtggtattggtaggggcaggggggatgaggcagaaaatcaagagcaaactgaacaaaatgaatagaataggtgtcaggtcatggaagatggatggtagaattctgttaggctgaattggctagtccaaatttaaaaaatagtaggactaaagtttaggatatagtgcctgtgcacatttgctgaatgtaagagaaagtgggaagaaaaattgaaatgatagttagattgtgaccattagtacagaagacccagaggaccatgtggagaacttaattttttttttttttttaattaagcaaccagaagccaagaaggattttgaactgagaaaacttgtaagacacagtaaagccacatttgtaactggtctatcgaagtgaatacaactgtagcaggttggagatggggctttgggaaggttttcttgtttgatgggattgtcagtagtaaaagaaatgggaaggaaaagagttcacattcagcttagaagttgagaacaaaatttggggagatagatgagagagatgtcaggtaatagttgggggttgggaagggccaaacaaacaacactcagttattggcatgtgtgttaggccgtttctcacactgctgtaaagacatacctgagactgagtaatttataagaaaagaggttttagttggcacatggttctgcaggctgtgtaggaagcatagcagcatctgcttctggggaggtctcagggagcttccaatcacggtggaaggccaaagaggagcaggtgcatcacatggtgagaaccacagtgagcgggggtggggatgtgccacacacttttaaatgaccagatttcactaaggagatggcccaagtcattcatgaggaatccacccccattgttgcaggactttttcttggtttagctaaggatggggttctttgtcccatggccatgaaaattcaggcccacagacaatttgaatggtgagtaagacagggttttattgggtgaaaaggaaaaaaaacgggggaacagggactcttcaaggccagagtcctgctacagtgcttcctgcctgcagcttgaatgtttggttccacacaggaagaggaggggccaggttcctccctgctgcaaacactgcgaacttcctgaggccccaccccagtgcgcagctggttggaatttttccaagaaccccctccctcccacctggctgtctcattctcccctctaaagaagtacatctaactgccattagaatacggataaggacaaagaccgatcttaactgcttcctgctgacaggggatgctgttttggggaaacagcagtcagagatccctcaaaggcctatctaagcgttcccggcagaaggggccgttgtcagagtctccagttgcatgaccatttggagtttgatggcctgaaggcaagaacagacaaaccgggttgttagaaaacatgtatcaaaaggaaaccagaggacgggtaaagatagctaaaaaattaggccttttaccagtttgcacagggagaaggaggccaaaagcccgactggtcaggaaaacttcacacttttgctggcatgttgggcttctgggttcccttcccctgagcccagtcctaagccaacccgtttaaggtttgggaaattaactctttccagcttggaggatgcatctgaggtgagtgtatcatagtatagagacacaattacctatttgcaaagagagaactgaggaggagaaagaagaaaagaaggcgttttttttcaaaggagtcctgggggtcccggatgcattcaaaaggcgtacaaactgaagatgaatggctacctatctagaaagaggggagcaggtgtccctggttcccttctcttcctagcagatactcagggttagtgagggagagaagagagagcatcctctttcctttcttctatccttgcatccctgaatcccagcaaccttggtaggtgctgccatggctgtcaaatcaacttgcaccggtgaagcagggggcctagggggtgagaatcatccactcttacccacgtaacgccctatctcccctgctgtcagtagctttgaattctgtatgccatggatactaatgtggcctttatccatgaaacaggaagccttggggttggcttaatcagcaggaatcagccactctcacctgtgctgtgccttttaaccttggtgttgtcatctgcctctggatcccttacatccagttttctttctagggctttgacccgaagcttggaattgagtcgggaacacaaatgtgtctcgaggggagttgtgtggactccttaccataagtggaatactaaggtgaaactgtggaactgagtcctcctccaacaagggagaggaaagcatgtcttgtgacacacccagataactggtgactgtagttatgcttgctaggatttgggtgcatggtgcttggctttggttcactcccttggtcttactttacccaaaggaaacctcggagtgatgggcatcctatttattcccatcccctggcaggatttacaggataattgctcagaactagaatattgatccagacttttacattacccatccctcttgttctttctgagctgcagccagagattgctggttggtttacaggaacaagcagggttagtctaaaatgtaggtgaaaacttaaaaacaactagtgagtttagaatttaatgacaaatgtatgataagttttggaacataatttctctccagtcctcatttttgttaaacaaaaaaaaattatgataggactgagtggtttgcaaagtagactttagtcttattctttgcctgaatatttgcataaaatgcaacaagaataattatttctacataggccttttggattggctttgatggatgtctattccacaaggaatctcagataagaccttttaagccgagcccagccatggctttctatcctcaaatacttgcgagttgggtggtcctctccttttaaggtcccaagctaaacttggagctcctggacctgttaggaagtgacattcttttttttttttttttttttgagatggagtcttgctctgttgccaggcaggagtgcagtaaatctcggcttactgcaacctccaactcctgggttcaagtgattctcctgcctcagcctcccgagtagctggaattaaaggtgtgcgccaccatgcccagctaatttttgtacttttagtagagacaagatttcaccatgttggccaggatggtctcgatctcttgacctcgtgatccacccgcctcggcctcccaaagtgctgggattacaggcatgagccactgcgccccaccagaaagtgacattacttactgaccacaggtcagtaaccctttacagggactgcgtagacaggggtatgaggccattttccccactgggctcttactggctctgcaagtcaagattcactcctttcacagtgaaagccttggtaaaataaccactttctccaattgtgtcctgttgcaaaagaaaaatggattcttactacactgatgcaaacaactattttgtcataagttaagaacactcacagatagtttccaaattctagaggaagcaggaagagagaaacaaacatgctccaaaccttcatcacagtagtgtataccttacttaattattaaagtccgtaaacagttcaaaattggccgggtgcggccgctcacgcctgtaatcccagcactttgggaggccaaggtgggcagatcacctgaggtcaggagttcgagaccagcctgaccaacacggagaaaccccatctctactaaaaatacaaaattagctgggtgtggtggcacatgcctataatcccagctactcaggaggctgaggtaggagaatcgcttgaaccgggaaggtggaggttgcagtgagctgagatcatgccattgcactccagcctggctgggcaacaagagtgaaactgtctccccacccaaaaaaagagaaaaatagttcaaaataagtttccttgactctgaaaaactaaacaaggatcagcaatattccaagcaaaagtcaaaaaggttgcttcaggtttctgagttcactccattaagttctcttgttttgcttgatatttgtgaacacttcagctctttatgagtcttgtactttttcctttattttaatgttacaatcttcaaagttattagaagcctgtatttgagaggacctgttaaaattctatagcttattataaaccatcttttgaaaaggattaaaacaagacaacaattgctgtgaatagctaaatatccagggtagttacagttagaaacacaactgacaaagaagttcggttatctccatggtttacaataacttaacataacaaccttaattatgattaatagcatatacttggacattagaattttagaaatcccatacaatttgggaacacatattagcattattcacaaaaatataacctaaagaagattgaacatcattttggcaatcccatgtaaactaaacatgttaaataatcctgtttacctctctttctggacattccaggggccctctggactatccgaaaagccagttgtcaggaaagacaattttgaaactgaagtttgattttgagaaggccgttaaacgttcaaggtttaaatactttgtgttataaaatagaattccagattaccataaattatttattttgccaaagtaatgactcagaagttttaaataagtaaaaaccttttatagccctttacgaattttgccaaagagcagattagcgccttacaaaaaccttgttgtgtttttatttcaatgctcaatctacagaaaaaccatattataccttttggaatttagtcaatatgttcacatagagaacctcttctgcaagattcatttccacaattcttccaccacttgtttgaaccttcagctttttcctaatttaaaactgtcctttaacctagacaaaaatttatatttccatgcctccttgtaaccttttgctaaaaaacacattttactgttcttacataccttgcatgtaaatctatttccagtagtcttaattacatgttataatagtaactcctagcaatttttaacttttttaaaacttggggctgggcatggtggttcatgcctgtaattccagcactttgggaggctgaggtgggtggattacctgaggtcaggaggtcaagaccagcctgaccaacatggtgagaccctgtctctactaaaaatacaaaaaattatctgggcatggtggcgggcgcctgttatcccagctactgtggaggctgaggcaggagaatttcttgaacccaggaggcaaagcttgcagtgagctaagattgcacgactgcactccagcctgggtgacagagtgagactccgtcttaaacaaacaaacaaacttgataagttgttttaattgtttaattgtgtgctaagtgctgccaaggtttgccttcttaattaagagcatggttatatgtccccagcccttaccagttgtgaagccagcaagtcaaatagttcttaaaactcaaaaagcagcttgtaacctcaaaatacttagcaaactttgtatctgacctgcattgtttagtccacctatttacattttgacaacatctgctctttaccaataatccttaaggctgtttttgtttctcaatgattaaagtcacgtgaactgaaaggtatcacagtttttatcttccctttaaaaaatattagatccaagtgcttgtctttgtttaggccaaattaattagagctctttttacagataccacacacagtatatacacagacaggcaaaagaaaacccagtcactgggtggggccctttaagagacagggctaggaagacatgcagatatggaaccagagagggctcatcccctaaggcaggattgctaaacaaagccttgccactggagttagaagccatgccctcaggatgtaaaacaagatggaagcctgatttcacaaccaacaccttgcagagaatacaaacagtgatagttccggggtgggggtctggcctagtaaagtgttttctaaaagagaaaaaacttaaaagttaactgttgacagggtaaagtaggaaaaaaacaacaacaaaacaacagcaggttaaaaaatgcctaggaaagaaccttttattctcatgcaagtggttctttcaccgaggagagaagcttaagcttaattactgtccgatggagttgaaacccttggctggggaaggggaaggctccagtggctcgtggcagaaaatgccagccagccaccccgggtgcccttggaccatgtgtccaagcctcagcagtggaggagggaggtagggagctgctgctctctggtccctcccaaaaaaggaagaaaagggctatggaaaggtcgggttggttctcaacccctgggagcagcaggcggtgggggcacagtttcctccaccctcagaaatctcaggataaaaaggcttaggagccacagtgaaaggttttgagtccccatttcactcactgcttcttgagccccacattgggcgccaaaaatggttcctggacttttccttagttcggctaaagatgaggttctttgtcccatggccagaagaattcaggcttgcagtttgaatgggagtaaggcagggttttatagggtgaaaagggaaaaaaagggggaacagggactcagcgaggccagagttcctgctagagtgcttctcacccacagcttaaattcctacttccacataggaagaggaggggccaaacggtgcagatggtgaggacttcctgaggctccaccccagtgcacaggccagttggagtttttccaggggccccttcccgcctggctatctcaccatgatcggaacacctcccactggtccctacctccagcagtggagattacagttcaacatgagatttgaacagggacaactgtccaaactatatcagtgtgtcttttagagttggccatttttgtcacccccactcgtttatttatttttttgagatggagtctcattctgtcgcccaggatggagtgcaatgacatgatctcagctcactgcaacctctgcctcctaggttcaagcaactgaacctgttgagtagctgttgggattacaggcatgccaccatgcccagctaatttttgtatttttagtagagacggggtttcaccatgttggtcaggctggtcttgaactcctgacctcaagtgatccacccacctcagcctcccaaagtgctgggattacaggcgtgagcaaccatgcccagcctgtcacccgtacttgtgatatgattcaacaaacccgtttctatggccaaattggtttgctaattaatgtactatatggactgggattctttggtacaaaacgtgactgtccaaatagcctgactaattatctattttccttaattttttgccagggaaattttttttgtttttgttgttgttttgttttgttttgtttttttgagacggagtctcgctctgtccccaggctggagtgcattggcatgatctgagctcactgcaacctccacctcctgggttcaagcaattctcctgccttagccctctgagtagctgcgactacaggtacatgccgtgatgcccagctaatttttgtatttttattagagacagggtttcactgtgttggccaggatagtcttgatcacttgacctcgtgatccacctgccttggcctcccaaagtgctgggattacaggcttgagccaccacgcccagcctgccaggaaaattgtaaagtctacacacagtggagctactagtgtagtgagcaccatgtgcagttcttgcggacctctccttgcacaccactgtttttattctgaagtattttatagcacgtattgcagtcctgtaaattgatgctattttttttaaagtttgttgaattgcagtatcctaaattcccaaacccatgtccactgacaacctagcacactcttttttttccccaagagaaactcgtttcttattaaattttgcattagtgtcaaatcggttgactgttttttttgttaaagcactgtcatatttttttctataatatatactctttgacctactgtgaaatatatttaaagtagaagatttatgtgtatgtcagacaaattgtgaaagaaaatagtagcaaacttgttagttagccagataatgtgaggcagtttctcactgtctgtctttgaagggagttgcaaatatagaataggggaaagttaaaataaatcctacattgttgaaatgtttggaatcagaggtatcaatgtgaagtcattttttttttaatcagtagacacagaaacagatttagatgtatttgcttagggcttaactttacaaacttggcagaaaccatcttaaccagtaataaagtaaccttactggtaatgggacaggtgtgcctcttgattttttttttttttttttgagacatggtcttgctctgttgcccaggctggagtgcagtggcacgatcttgactcactgttacctctgcctcccaggttcaagtgattctcatgcctcagcctcccaagtagctgggattgcaggtgtccaagccatgctaattttttgtatttttaatagagacagggttttgctatgttgaccaggctgtgcctcctgatttgatgctgaaaaaagcacaacattacttctgtggtattccagataaaaatacattaatcaagaggaaacattttcccaaattaactggtctatgccctgcaagtctggaaagtgtcttagtcaatttggactgctataataaatataccgtagaatgggtggcttaaacaacagtcatttattcctccagttctgtaggctgataagtccaaaatcaaggtgctggcagatccggtgtttggtaaggacccacttcctggtttgcagatggccatctttcttgctgtgttcattcatggctgagagcagagggagaggaagcagctcttgtgtctcttcttataagggcactgatgccatcaggagggctccacccccaccacctcattacctcccaaaggtcctgtctcctcatactgtcatattgagagttaggcttttatcatatgaattttgaggggacacaaccattcagtccatagcacaaggaaaatcatgaaggacaagcaaagttaaggaactattcaggttgagagagacaccaaagagacatgaaaactaaatgtatgaacctaaattagatcttagacataccataaaggacattattagggctattagaatttgaatagagtttgtggattagttggtaatattgggttaatagtaaattcctgttttgttgactgcactgtgctgtcgacaaaatgttagtgacagcaaaatgttgttgatagcacagtgcagtcaacaacatcaggaagttactattactccagtattgccatctagttcacagactctgttcacattcactaaggagagggtccttgtacttgggaataaatgcggaagtattaaagggtaatgggacatcataaaatgtattctttactgctcagaaatgttagcagctagggaatctgggtgaagggtgtaagggaactccgtgtactattgctataacttttatgtatatctgaaattgttttacaagaaacaaacaagatacaaagaaatacctccccaggatgtttattagaacaatagaggctaactataccatttttctatttcttattaggtgcaataaaaggacactggtaactgtaaatttaacagttaaaagtaaggtcatggcggtggcttacagctgatagtgccctgtatactctgtacaagtgcatgctttattatgatcaacctaatggatagttagttttgtttttttttaaaccagggtcttccttgagatgtaatgggcacagagtaaacggctgattgttagcttattctgtggatgtatgtgatgagtgggtctggggcatcagtttctatatctcacctttacctatcaaagaaattggacaaaccatgatagcaaacaaatgaaaagaaaaaggagttttattgttcatgcttacaaaagaatcctgttaatcaatttgtaatccaccaattattttgggaataaaattgtagcaaataaatttaagatagaaacataaaactattaaacatgttatttgtattataatgtaaaatataattaatattttagtatgtacatattaggaataatgtcactggtggccccagaggctaaaaaacagaatgcaaacctgctggaaaatccttggtagataggagcatagaaaacagaatatcaaatgcatttattgttggccaggagacatggactactaggggaaattctgagtgtctaaggatagtactagaatgctaaacagtcacagataataatataaagtaggtaggattaacaagaaacagcacatcacagtcacaatgtgtgggaattaggcaaaggaaatacgtagccatttttatggacgtcttatagtccacttagacaatagatgtattctgtggtggtaaaccaccagcttaggtaatgggatttattggaggacatcagtggtagcaaaatacatatgaaaagcaaaagcatactaataggaatctgatgaaattaagagaataaataatggaggagatattagtgaagaacaagaaaaattgaagaacagtaaaagtaggcatgcttggaaaaggagaaaaatagatctctaataatcatttttggggaggagtatagagcgtcactaagttgaactaccaccaacagccagcattcattgagggcttattatgtactaggtgctgttctaagggcttgacttcattcctcacaaccactccttgaatatgcattttacatatgagaaaatggacacatgaacaattaggttacttgtggaactgaggttcaaacacaagcattgcgaccattcacggcaatactgcatagaaacacaggattccaccataatcaggtaggggagcgaaaggcagtttcaattgttctttatgtaaagaactcatctacctggagttattcattaagctgatataatttacagtgtgatctgcagagaatgaccttatcacaccaatccaaaagaaactactactataattaaactgtgggcaaaataatgtaggatatttttgtagaccgtaaaactgaaattaaagttgttactgatcaattaatgaggtgataattaaacagaaactagccaacctgactgattgtagaccaatacctaaaatttgtttttgcaattcacatcctttgagatatatttaattacatttataacacatggatatttaatataatcttttgtgacagattgacagatcttcactatcattatgtgtaattcctcttgatgtttttgtcattattacatatatatttgggagagaaataaaaggctgtttccaaggtgatggtgataaagagcaaacttataaaaatggttgcctccttttgtttgtataaaacaaccatctcatttccctctgggaggtcactagaggtatgatagctctgttttgaaataatattttagtaaataggaaagcagggtaaagaaagcctcccctttttgtgttatgttaaggtttaaaactgtgttacagtttatactaaaacattaagaatcaattattataagagcattaaattgtttgagttttgtcatgctttgcctagaaatcagcactgaagcgagtgacttagcaacgttattagatctattaaataattggaaatttatgtgcttattgtcagcatcttggctttttagaattttaaagtatgtttgtgcttcacatctctagttgcagtttatgtagaatttagtgaactataataacgttggatggtggtaatgtcacagtgtaattaactgcatagcatacaaagttctttgttaatggggaatgggatatacatcatctatttgatatataagttaataatcatactttttgttagcagtagttaaatgataagaactaaaaagaagcaataaacatctccatctctaaaacagtcttgcaaatatgcagtgagcatctactgtatacaagcactatatcttcatatttagattacatttgctattttgcttttcacatgtgaacttaagtgaaatactctaaggagtattgcaaggtaattgcccctataaattacataatttatatggctctttaacttttttagatgtaaaatgggaggaggagagcgttgagttggagtgtattatttctaggattctttctagcccacaagtcgaatcagaaaacagtggctcatgcctgtaatctcagcactttggaaggctcaggtgagaggattgcttgaggccaggagatcgagaccagcctgggcacatagtgagaccacacctctacaaaaaaaaaaaaaaaaaattagccaggcatgatggcaaacatctgtaaccccagctactcaacccgctgatgtgggcaaattgcttgagcccagggggttgaggctgcagtgagctggatcccaccactgctttccagcctgggtgacagagtgagaccctgtctccaaaacaaaacaaagcaatcagaaatgtacagatctttttccacagtttgtgcagaacagtcacttctaagatatactatgaaagtctattacaggagcaggaactagttattcctttctgagaattagatataacttgaccaacaaatcggttttttatccttcatatcatcttcagaagtagaagcaagatatatgatcaaagtctttttaaaaatagcagaataccggggtttttattttatattttcactctgcacaatgctaatctccttaacatttgatgacaaagaaaaaacttggaatttgtgtatgacaaaaagaatgacttatgaggtgaatcgaaaacactttttacagcctctgtcttcctaaagtttattgtttttggaaatagttttttggcaaatattttgttttgtaagttttacatttctaaagttgaataaaattaaatgtttagcaggtgcttgttgtaatagaagctataatattttaactatgtcatgaggtatctctgaggaagtgtttcttttttgttttttaatggtaaaggatgtcagtaatatctctcaaatgtcaaattaatttagggtgtgtactttctttttccctatgatgacgtagataggaaaatcgaatgttccaaacaactcatggaaaatgttccacttcagcgttatttgtaccacaaatgcagtgaaatgcttttaatggaatccagagtgataggtggattatgacatgtggggagatgccttcttgaaataggacataaatcatggttttttttttttttctgagacggagtctcgctctgtcgcccaggctggagtgcagtggcatgatctcagctcactgcaacctccacctcccaggttcaagcagttctcagcctcttgagtagctgggattacaggtgcccacgaccatgcccatctaatttttatatttttagtagagagaaagtttcaccatgttggccaggctagtctcgaactgttgacctcaagtactccgcccgcctcggcctcccaaaattctgggattagaggcgtgagccaccgtgcccagccaaatcatgtttttgaacttgttttaaatatctgtgtgtgtgtgtgtgtgtgtgtgtatgtatttttttttttatggagtcttgctctgttgcccagggtagagtgcaatggcacgatctcagctcactgcaacctccacctgccgggttccagtgacctcagccgcctgagtaactgggattacagacactcgccaccacgcccaactaatttttgtatttttagtagagacggggtttcaccatcttggccaggctggtctcaaactcctggccccataatctacccgccttggccttccaaagtgctgggattacaggtgcgtgagccaccgcgcccgaccagtattatgtatattctttttgtttgtttgttttttgagatggagttttgctcttgttgtccaggctgcagtgcaatggcgcgatctcggctcactgcaacctctgcctcccaggttcaagcaattctcctgcttcagcctcccgagtagctgggattacaggcatgtgccaccacgcctggctaattttgtatttttagtagagacggggtttctccattttgggcaggctagtctcgaactcccaacctcaggtgatccccccgccttggcctcccaaagtgctgggattacaggcgtgagccaccgtgcccggcctgtcatgtgtattctaattataaataattttcaaccaaactgatatgtttggttaagctggggaaagttttcagaaaatagagtacactgagatgaatttcatgaactgtacccaccaaagccttgtcctggttaattcaaatttataatgccaatagtttaaattagcatttagcctttaagtgacggtggaatggtgaggcatatgatgtttttataccaaacactccgtgctccatgtcttttttggagtttacacttttcaaaaacaggcggcacttccatgtgtttatttccccttcatctctgtttagtgaatgattggtttcatctttacaaagattattctggctgtagtggggagaaccagttggagatatggaagatgtatgtggggaggccagagtatcgtggcagtctgcctgagagatgcagtggccggggtttggtctaagatgttattggtggagacggagagaatttgcggtatttgagagccactccagcctccattatttctaattctatgtcctctacccttctctgtcatctctccactgcctcccagccccttccactgtgccccctgtattgcccactttcagaccaacagccttttgtatcagccttttctggaatgttccactaattacttaccctaactaaaaccttagggtagttttgttctcataccacacgcacctccaagacaggaggtgggattactttcctccttgtgtcattcaggacgactgctccgctctttcttgtaagccctttcttttttgaaatcacatcatcagtcttcactacctcatcttcctcttggcaaccttcagctccccttccctgtatccctctccctgcacgtgaagaccagcagccagttcctggtctgtctgtctgtctccatacaatcattattccctgtattttctctccatccacagacaccactcctgtttttacatcctttatccaatccctggcctggcattatagtcactcactcatgaatacccttaactgctcactccttcattcttccatcagtctcaaacttagaggaactctgcctccaccttccctatgcctgcgcatgagcaccttaccatggctggtgaacgtcccataccaagggcacagttaacatgcgtctgctggtcagggccagctgagcatcctacactgggcagaagggttgctgtttctctgataacttctcctcccttatcctcagtgattccttcctgtcttcaccactgtattcacatgtcccacgctcctgctgcagctgacactacttctgaatgtccctcttctctataccaccagggctctagatctgatcaccatgacttttagttttatttcctctaattcattgtccaagctatagcctgcatgatctttcaaaaatggacagtgtggctcacacctgtaatcgcagcactttgggaggccgaggtgggcagagatcaggagttcgagaccagcctggccaacatggtgaaaccccgtctctactaaaaatacaaaatattagccgggcatggtggtgtacacctgtaatcccaactactcgggaggctgaggtgggagaatcattggaacccaggcagtggaggttgtagtgagccaagatcatgccatcgtacttcagcctgggcaagagagtgagactccacctcaaaaaaaaaaaagaaaaaagaagaaaaaaaaggacagcagacaatggcactctgcaggtggaactgcttcatgtttcccactcctgtccctgttcttcaagagccggcctccccttctctctgctccatccacatgggtttcaaagaagcttagctctttctcaccccagggtttttttctttctttttttttttaaatatgatattccttctagaatattcccacacacccatcactagcatacttaattcctactcacccttccagtctttgctcaagatcacctcctcagagaggtccttcttcctgctgacaagtaaagaataatgagaattcagaagaggctatagaaattggctgggtgtgatggctcacgcctgtaatcccagcactttgggaggccgaggtgggtggatcacttgaggtcagaagttcgagaccagcctggccaacatggtgaaaccccatctctactaaaaatacaaaaattagccaggtgtggtggtgggcgcctgtaatcccagctacttgggaggctgaggtaggagaattgcgtgaacctgggaggcggaggctgcagtgggccaagattgtaccactgtactctagcctgggcaacagagcgagactttgtctcaaaaaaaaaaaaaagaaaagaaaagaaattgctgaagatttgtgatttttcacaatacagttttagtagtcagattatagaaggttatggggaaaggtgtatggtaagaaaatagctgcagagaacttgttttagaacctgtcagagaaaggaagagacacagttagggagctatggagtcgtgcatgtgtttgaaagcagaggcgagacgccagtgtagactgaaagctggagaacagcgaagttaaaaggattaactaagaagcagagagggcatgagatgggagtgaaggaaagagcatggctggttaggcgagaaaataaggacttgggcctatggcttcgattttggtaaagagaagaagtcatctgctgagagtagggggcagggttataattaatgtaagtttggtgcacttgagtccttggtcaatttcagggcaaattatataatctttgtttacattagcatggctgctaaacacctctagcgttgtgtctttggatagtttatgaaatacagagttttttgcataatttaaactactccagtgttttcacagtgctaagacattttgataatattgtctgccttgaaaggagcagattttacttgtgcctcaggatattatgtcatttatcacttcacttttggcttatttttctttttatccccacactgaatttgatttaatttgttagcttttattgtcaattaaaggcaaaatgtcaaaaagttctaacctcaaacagaggtatgtgagcaaaacactcactttataatattggaaatagccatattagaaattaaatgtctgaggtcagatatggtggctcacgtctgtaatctcagcactttgggagaccaaggtgggaggactgcttgagcccaggaattcgggaccagccctggcaacacagtgagaacctgtctctccaaaataaattaataaatatataaatctggaggtggtagctcgtgcctgtagtcccagctacacgggaggctgaggtgggaggattacttgagcctgggaggtcaaggctcagtgagccatgatcatgccactgcactccagcctgggtgatggagtgatgccctatctcaaaaaaacaaagacattaaccatctaaatacatctgaaataaaagggctttgtaaccacagaattatagatgtagcagagatatttgaccttgttagttcaggtctctttcagatgaggaagagagattatctgaaacacattgtaaaatttggtgttgtagttgaagtctgtaaatctacaaccagagaaatagaaattagtatccacctgttaactcaaatgcagtttaaaaaaaacagctacgatttattgtgtgcctactagtgaaaggtctgaagtggttgttgattgcatattgtaatgacagagaaaatgagcacacttcacttgaaaaaaaaactttagagtggatgtagtggctcatgcctgtaatcccagtactttgggaggccgtggcgggccaatcatctgaggtcaggagtttgcaaccagcctggccaacatggtgaaacaccgtctctactaacaatgcaaaaattagccgggcctggtggcaggcgcctgtaattccagctactcaggaggctgagacaggagaatcgcttgaacccgggaggtggacggaggttgcagtgagctgagattgcgagactgtgctgcagcctggtccacagagtgaggcttaaaaaaaaaaaaaattaatgtactgtatgtatatatggtacaaagttcaaaaagtccaaatggatttgtggggaaaaacaagcctccctttcatacctgttcctcagctattctgtcgctcttaagcatttgtccagagatactctttgcatttaaaaacacacatgtatagttatttttttcttaaaaaatgatagcacactgtatacactattctgtattttcttgaaaatggtttcaaatcaatatgtatagagatgactcatttttttaaagaaggggcactaagtttttacattctacagaatatgtatttatttgatatactttaaggaaatctttgctgggtgtaaaattgggggacaacatttccttttttttttagtacttagactatattgctgtgtggtcttctgtatctgtgttgcttttgagaaattagactgacctgagtttttttcctttcttgtacatgatttcttattttttattttttttgagatggagtcccgctctgtcgtgcaggctggagtgtggtggcgcgatctcagctcactgcaacctctgcctcccaggttcaagcgattctcctgcctcagcctcccgagtagctgggactacaggcacccactaccatgcccggctaatttttgtctttttagttgagacgaggtttcaccatgttggtcaggctggtctcaatctcctgaccttaggtgatccgcccgcctcggcctcccaaagtgctgggattacaggcgtgagccactgcacccaacccatgattttttatttctaacttaatacctccatactttctttttattctcttcttttctttcttttccttttctcttctcttttcttttctttctttctttctttctttctttctttctttctttctttctttcttttctttctttctttctttttttttttttttttgacagcattttgctctgtcgtccagcctggagtgcagtggcaaaatcatggttcagtgtagcttggaaggcctgggctcaagcaatctcccctgcctcagactcctgagtagctgagactacgggcactggccatcatgcctggctaagtaaaaaaaattttttttgtagagatggggtctcactttgttgcccaggctggtttcaaactcctggcttcaagcagtcctcctgcctgggcctcccaaagtgctgggcttacaggcgtgagccaccatgcctggccataattctttctctagccttaaagttctataaacataatcaatccacaaattccaggttttacttattttgacaagttttatcctgttatgtatctttgaatgtacatttgttctttttgctttgtgagcctctttggacagttacatattctttctaacccccttcctcctccatatctgttgtcttctcagtaaattggttttatattgttagtcttatctatttcattttatatgatttcttcagtccttatctttcttttagtcacatttattctatttttggttgcttcttaatgtggcttttatctcaataatgttatttttctctccattttttttctgagttctatcagcttgactttcatttccttctgttgttgtataatctcttctttgaacctttgtttttcttctttgagctctttttttatttttatttttttaagaggggtcacgtttcctatggttgcctttgagactttggagaactatttatctgaactcttcctgtgtttctttgagtagttcttgtgttatatgctactaatttacctttttctctgagttttttttttttttccaaattgtatgcagacatcgagtattggttgttttctgagtgttgtttatgttgaaataggccgggagggtaggtgaagcaggctacagccttttttttggacatgttacttagtcatttctcaccaaatctgttatttagtttgaaagggtaggctggttcttcgtgtcggagtctatcacgaaatgccacctccactccacatctgccccttcagtgacccttgactgaagggttgcatgtacacagtggatctggcatggtaacaaggattcttcggttcagccagcccacctttctctggtattaacccgtggttcaaagagacattctctacttctcctttggcctatacttccatctagattccctccttggatgctagcatcattagaatcactgtacctcttattcgggattatgtatctgtgtattgctagaagcctgagaaggcctgtgatggctttccacacatcccttgccccgcttatactggcagataggtttcagtttatgatttggagtcatgatagcttccttgtttcagttgtgtagggaagttgcaaatttctactcatgactcattgtgtagatgatgaaatgtagtgtattttctatcacctatcatctttgtcagaggccctctacctttagtagtggatggtgggaagaaaaatttgtgagtaaacaggatcttggcctctgttggtttaaacagtctctttggggtaatgtgtttcagttttcttctatccccagcttctgctgaggtgaggtctgggagcagtgagagaggcctttgggaatgatgcttagatctgcctcgcggcgctggcatggggagaacgtagactcacacgcagtcttcctgaggctttgctacgagggcctgggtgggtaaccactgagtaacatctctcgctgttgaggctttgaaagccttgaggaggcttctcctgtccttagacctactacagtcggcccatgggctctgcatctgtggatccaaccaactgcagatatttgggggagcggggaggaaaagatttggatctgtactgaataggtactgccttttttccccccatctttattccctaaacaatagaggataacaactatttagatagcatttacattgtattaggtattataattcaaaggtattataggtaatctagagatgattcaatatatggaagaatgtgcctgggttagatgcaaatactacaccattttatatcagggacttggagcatccccggattttggtatctgcagggcggggcgggggtggtgctcctggaacccgcctcccatggattccaaggatcacctgtatttgcctgcagtcatcatggagttccccatactgtgtggtcttcatcctgacccagaccttcactggtcagaacttcaggattcctatcacgatgtacttgggttatttgcccagcccctccctccagccatgctgcgctgttgctgccacgccatattcagaatgccacaaaactgagccctgggcttcactgcaagcctgcagcctcccctacactgtgtcccagaagcagacctcttgcctggatatttttagggcaccttatacttgtcagaatgttttcagcaatctttgtccactgccacccccgccctatccccaagggtccagcagaagaggaaatagtgaagtctctgataatctgattttaatgagtatcttttaagagaaataagtgatagtgggggaattgttagggatcatatatcatagttctgctgcaggtttatctggaaacttgagcaagattaagtatcaccttgttaggttgtctaccatataataataatgtcatctgtaagcctctcatattaaagagttagggaataagcatcagtgagtgaaaggaagaaaaccaatagttctttcattttaaattagctatgatttttaaatttccattacttttatatttatttggaaattattttttttcttttacgagtatccctgttttgaaagattatgggtctttttttgcatattcatgaaggatgactggatgaaatcagtcatttatgattgacagaaatatgacagaactttgcaaagtttgaatggacttttgatattcaacaccaaagaattttgtctaattaaagcttctgtttaattaagataacaatgcatagtccttcattaaaattaacacagaaaaagttcttccttggtccttggagaggatattatatgcaagccctgttgtgtgggttgcaagatgtcactggaatttatatgcattacttgtctaattgcagtaaatgtagcatgtccagataggtttcgagttagaaggctgtttgttacttacggaaatcacttgaagcctcagtacccggaggcagctgttcacaggtccttcacctctccccagagatgactgggaagacgctgttgttggaccctgtctttcttggctggagcagtaaacatgacaggttgtttgggagccatctgtttaaaatggctgctgctttgtatgcagcaatgaacttgagatcagttttctgtctttcttcatggtaatggtcttatttggtgtcacaacaggtggaagttgatgggtcgaaactaaatgtgaccagcacgtggaacctggcttcgcccttattgtctgtcagcgttgatggcactcagaggactgtccaggtgagtgttgtaaggatttccttagagggcctcctcaagtccagaatccttgtcagcacctgtgtggctaatacttagagctataggagggaaaagctgtattttattcaccttatactttttacagtcgaaaactttttcttttcttattttagaggatcttaagttttaacctgagcatttaatgttttcttttttcagacaatccaagaaggttcatgtattgtactttgttgtaaacaaggaattctgcaggcttttctaaaaatgctagattagctgtttttttttttcctctgtgggtttttagttgtaaaatacaacttactttgttacctttcttttctgtgcagttgaaattacgtagtgttaggctagtaaaacttgtgttattcaggttgactttccacagctcactgatgtcctttaaaaatttagtaatcttaacttattaatctttcttttcgcctcaatataaaatgtcctgccttgaggagatgccttggaacccagagtcgatagaacattttttgtaacctgtgacttccattttaaagtagaaagttatgaaaagagattctgccaaaattcttcaccttacctcatatttgaggtttagcgttttaggaaaaaaaaaaaaatcatggaacatgtggctatcacaggctaataaaaatctagccccacccatagcattaaatgctcattctttgttcttttttatgaaaatcatcttaacttgattttacacaggaaactggttttaaaaaccttgagaaatcaggataatcacagattaagactacttactccatacctgattcttatctacctctatgagagaccgggatagtggacatcagaatccacaaaaactatgtgatgactgaactgatttctaagtcagtttcaattgatatattatctctatggttccaagtaaccttgaactcttggtaataagccctatattttgactttggttttgtgacttgtcccagtatattttttctcatttttttaattttctaactcctgtcttttctcatattttataacttaactcatattatataactttatataatattatatcagtataaattatgagttgaaatagtttaagactcttgaaaaaaatatcactacataatttcacattacttagatccatgtattattatgtctttaaaaactgtggtgtctgggcacggtggctcacgcctgtaatcccagcactttgggaggccaaggcaggcggatcacctgaggtgaagcgttccagaccagcctggccaaagacagtgaaaccctgtctccactacaaatacaaaaattagccgggtgtggtggcgggcgcctgtattcctagctacttgggaggccagggcaggagaatcacttgaatctgggaagcagaggttgcagtgagccaggatcacgccattgcactgcagcctgggcaacagaacaagactctgtctccaaaacaaacaaacaaaacaaacaaacaaaaaactgtggttttgttatactggtttatgttcgatagactgtacagtgcatcgaatatgttatggctcaagtgtttgtcagagggacatagtgttaactctcagtagtcagaagaaagaggtacaaactcctattatgcaaattttttgtattgtgttactttcatcatccttttcagtgagtgcgcagatagttgtcttgatggcacttttacatgtagaatttatagctagattaatagggatacatatgtagaataatcaaaaatattttccctagtgtagggatcatgttcggtaaatccctttttaatcctgtaagtactttgctactaaaagaattaatgtgtctgaaataagtgaccccttaaagagagatcccttgactcttaggaagaggtcgttgcatcaagttaagtactctctaattggaaggaaataaactcagagaggtaaatggtgtactaggaaaaacagtcgtttacctaaaaaaaaaaaaaaggtaaggagagtttttccttgtgaaaggggatggattttatttactttctgtaggcattagcattatatcgactctttccaaaaatgtaatgtggcccctatgaagataataacaattgtagtaataataaataacacacagtgcttactgtgttatcaggtgtagttttaagcatagtacagatatgaacttctttgatcttcacaattgtatgaagtaggtgctatttatagttttataaatgagacaactgaggctcagagaaaagtaagtgacttactcaaggtcaccagctagtaagaggtaaagccatgattttttttttttctttttaaatgagacaggatctcgctctgtcacctaggctagagtgcaatggcacaatctgggttcaccgcagctttgacctcccaggctccagcgatcctcccacctgagccccccaggtagctgggactacaggtgtgcctgccaccacacccagctaattttgtttattttgtagagatgaggcctcactatgttgcccaggctggtttggaactcctgggctcaagcaaccctgcctcctccccgaccccccctaccccccacccccacccccaccccccccacaccctcagcctagatccatgatttaaatccgagcagtcttgctgtaggtaggatccttgccatcaagcattgcaggatgctgaggcaagctatgtaacttcctgggcatcacaaagctaggaagaagcagagcaaaaacttggtccgtggcagtcatgtgtgctttcccccactatgctatagtactttgcgatttttcctatcacattcttcttcaaattataattacctgtcattcatgctttaaaccagagatgcttaaactttaatatgcttcagaatcaactagaagccttgtggaaactcaagttgttggacccacccatagcttactctgatttagcaggtctgggctaggtctgcatttctggcaagcccccaggtaatgctgctggtctgggccacatttggacaccctctgctttaaacctttgtagtcagagaatgagctgaggagtggtgtgccccagcaaggtgggtaggaaccgagtcacatgagccttattaaggacataggagaggctctactttatccctaggtcagtagggacccgtggaagagctttcagtaaggaagtgatgattgaacagaattgtagcttacgaggtttttttggtttttggctgctttgtggagagtggcttgaagaagcatgaggtgaagattggaggcaaagagagaagtcagcagatgttagggattcggaggtaagaagtctcagcagctgtggggatgagggcactgtgtgcagaagggatctgcaagcgtgacaggagaaagaactggtggctttacagtcatctgctgatttctcttctgaccactgttagcatgggcaaacctccaaattctattcctgactcccccttttctctctctgcttgcttcctgggctgcattgctccaagagttccagcttaacacctccaagcagatagctacgaaatgcaattataagtgtttgtgtgtctctttgcaattgtttattctgagaaataagggatgaatattaccaaaggcatttttcaagtgattttacagtaatcacttgaaattgattactgtagtaattgattactatagtaactgtaggtactttaaagtaataactacaattcttttttctctggatttttgagcatacatataaactttatattcttaaatagtattaaatattactatttatcattaacttgtatcattaaattttattattaaacctcatttaatataaaataatatgtattattattattttgagacacagcctccctctgttgcccaggctggagtgcagtggtacgatcttggctcactgcaacctctgtctttcgggttcaagcgattctcttgcctcagcctctggagtagctgggattacagacacgcactaccatgcctcgctaatttttgtatttttagtagagatgaggtttcgccatgttggccaggctggtctcgaactcctgacctcaggtcatccacctgcctcagcctcctaaagtgctgggattacaggtgtgagccatcacacccagccaaaaatatttattatatctatataaaagctaaagaatgacccaatgaaaacctgtttacccactatctagattaaaaaaaagaaaacaggctggtcactgtggctcacgcctgtaatcctagcctttgggaggccgaagcaggcagatcacctgaggttcggagttcgagaccagcctgaccaacgtggagaaaccccgtctctactaaaaatacaaaattagccaggcatggtggcgcatgcctgtaatcccagctactcaggaggctgaggcaggagaatcccttgaacccgggttgtggtgagctgagatcgcgccattgcactccagcctgggcaacaagagtgaaactccgtctcaaaaacaaacaaacaaacaaaaaaccaaaacattatcagtgctatttgtatcattcttccttgattaaatcctcctttccagtgtccctgaagaacaccattatgagttttaaattgatcactaccttgcttttctttagggatatttatgaatacaccaacactgtgagcagtatcttgttgagctgctcttgtttttgaaccttgtaattgcccccatcctctctgtgttcctccaggagttgtcttctccccaccagcatgatgtttgtgagcctggcccatgttgctgcctatagctgcagtttatctacttccatacatcatattaatattaccaccaattacttattctcctctaaatagacatctgtgttattttccttattttgttgtcacagtgatgcttgtatgaacaccctacttcctgtttcctcttgacataggaggttctccaggtcatgtgccggtataacagccatgctgtggggcctgtgctttctcattcctgcatggcaaggccaggtgggtttctctgtgtggctgtaccagcttatgtgcccatcagtagtgaagatgatagtcacaatgagaacaatgaactaaccttattctgtacttattatgcccggcactgactgttctaagcactttgtatgtatgaatgcccccaaaaacccaataaagtacgtactagtgttatccctcattttgtatttgggaaaacagaagcttgtagaggctaaattgctttcccatctggtagtaaatgggagtgccagaatttgaaccaaggaatctgtgcccttaacattttttttcacatcctggtgaacccttggccttcccagactacttaggtttttcctgactggtgggtttagatggcatctcattatggttttaatgtatacttccctgattagtatgacaatgaacattgaaaatatatatttattggctctcttgttttctcttctgtaaaatatctgctcatgacttttgcccactttttaaattggattatctttttcttattgactcataaaagttcttcctgcgttatggctcctttttgtcgtatgtgttgataaagtagcttctgtttttattgttttaagttatccaagttaagttttaaggcaagatttaatgtcagaattttcaatattttcctttatggtttgtgtgttttgcgtttgtgtagataatcttgttctactcctaagctcacaaagatacctatattttcttttaaacctttttaaattgtgcttttcaaagttaactacttaatcctcatgggattgatttttgtacacggtatgagtggctcacgcctgtaatcccagcactttgagaggccgaggtgggtggatcacgaggtcaggagatcgagaccatcctggctaacacagtgaaaccccatctccactaaaaatacaaaaaattagctgggtgtggtggcgggcgcctgtagtcccagctgcgtgggaggctgaggcaggagaatggtgtgaacccaggaggcagaacttgcagtgagctgagatcgcgccactgcactccagcctgggtgacagagtgagactccatctcaaaaaaaataataataataaataaaataaaatacagataccaggccgggtgtggtggcttaagcctgtaatcccagcactttgggaggccgaggcgggtggatcacctgaggtaaggcgtttgataccagaccagtctgacctgtaacatggtgaaaccctgtctttactgaaaatacaaaatattaaccggggatggtggtgcacacctgcagtcccagctgctcaagaggctggacccctgcactccagcctgggcaacaaagcaagactccatctcaaaaataaataaataaataaataaataaacaaacaaacagataactcgttatgccagcacaatttaatgatagtcgtgcttctcttcccttactaccttgccaccacctcacctttccaaccccgaaattctttaaaagcggtttctgtgattctcaattaattgtaaataaaaagatgatttttcgcttaatacgatcctcagtatatttgcttctgtgagctctcagtcagttgcactcttttattttttgttaatcttctggaaacccttagccaagggcatcagatgatatttgagatacaccttagaaaaacgtgtttgtgaatcaacaggcaaattgggaagtattcatttagggaagtaatgagagctaaacatggaaaaataggttggaggaccagatagtgaatgagagcctgaagaatctatgcttttcagtcagcagtggagatattacaactttttgcagagtacagtaacgtccatcaaaatgccattgtagaatattaatgtgtcctcataatagaggaggggttaagggattgaagggtgaagtggagatggagttcatttagaagacaatcctattactgccttcatcctccactagggtgcaagcagtgtagagaaaaagggggttgagtttgagagaaacctatgtttccatgcatagaaaccactttctgtttctatgaatttgactactgtgggtatgggtaccgcctataaatgaaatggtatagtatttgtcttttgtgactggcttatttcacttagcatactgtcttcaaggttcatccaggttatagcatgtgacaggatgtctttcctttttatggctgaataatattccattgtgtgaatatactacatgttgtttatccattcctctgtcaacggacatttgggttgtttctaccttttggctgctgtgaattatgcttccatgagcatgggtgtacaaatatctgtttgagtaccccattcttttgggcatatgcccagaagtggaattgctggatcacgtggtaattgtatgtttaattttttgaggaacctccatagttgctgcaccattttacattcccattagcagtgcacaataatttcagtttcgtgccatctttgttaacacttgttattttctgttttgttttgttttttaataatagccatcctattgggggtgaagtggtatctcattgtggagcaggacttatctagatagtaactgaagaaaaagcattccgaatacttctaggatgtgtccttcctatattggtattactctgtaaccagttcactgcacaagtggcacttttttcagtccaagtagaagcaagtttcttagagctgtttttttttttaaaccctttatttcaacttctttccttcccatatataaaaccacataccattctaacagtctgtaatgttgctaccaggtaataaacaagccatactgtatttgggagaggagggtgtgtttcaaagtctagttcattgtaatatcaaaactggtaaaacctctcctctctaaactcagtttgacctcacactgagaaacctttactagtgcagaggagaatgttgctttcttcttgcttgctttatattgtaggggcaaaagggtgtgatcccactcctccccatcataagggtgtccatggcagacactcctataacaaaagacaggttaacaagagaaaagtataactgatttatttaatcaaagttttatgtgacatgagagtcttcagaacagagatccaaagatacaaggaaagctgtccattttaatgcttaggtttaatgaagaatgggcagccgtgtaaaactgatgggacaaagaatgtaagtgaatgctagtaggctgagaggaacccagcaaggcctatgttcagatcttcctggcctctcttgtactatttcttcctcccaggtatgggacaagacccatctgggatgacggtcttatgacctgctactgttgtagagaagggtaggccagagaatttctttatgagcagctcttagaaaggcagggaggggttagagtcctctttctggtttcatagttgtctttgcgggagaggaattctgatgtctgtgactcatctcaggagagaatgaggggtgagagacaggaaggcagaaggtcagagatcttagttctgaggttacttctgaggccttctctttggggtatcattttctgagcctcaacaatacccttttctacttcagagctgctatattgggtctctcagaatttgcagtatggggtaaagatgagaagagcatggcaggaagaaccaggttttctggggcagaggcaacctggcattcactctcttggggcatggcagatgtccaaagctggccggtagccctgggatactttcatgtggatttgggggaacttctcacctgcagaacacttaatgcctcctgtcttttccagttgcctttggtctcctgagcaactactgtgttgactctgaatgttctcactgggcatggtccctcataatgaccccgcctgcttttctcctgcacaatccacgtctggccacaggaaatagtaataagtccttgcctcaccaaaccaacaaagtacaagcttctcttcttggtctgtctctaagaattcgcatgaataagtgattctcatgaagtcgctttcacgtagcttaagcagagttcagccttaaattctaagcttaagaattcgacctcctcaaattaattttcctcttttattcttttaaggtgggagatggacagtcactggtcccacagcttcctagcacattctaccaggtagccttggctagcatctgacttaaagatgtatgggtacttggcgtctacttctttttgttgctgaacccctgtgattccatgaaaagtagtgcgttcatctgttcttatattgctataaagaaaaacctgagactgcataatttatcaagaaaacgggtttaaatggctcatggttctgccagctgtacaggaagtatggtgccagcatctgctcagcttctggggagggaggcctcagggagctttcagtcatggtggaggcaaagcaggaggaggagcatcacagggcaagagcaggaatgagggtgagagagaacggggaggtgccccactcttttaaacaaccaagatctacctctgtgatccaaacacctcccaccaggccccacctgccatgtcgagaatcacatttcagcaagagatttggagcggacacatccaaaccatattaaggagcatttaacttctttatctgattagatgagtaagtagttgggaaggcaacttacctttgcttcaggaattagctcccgattcatccagtccgatcacgtgtattcatgttcctggttttcattggtaaacttcataagtttaatattacccattaaattcctttaaaagtaagttgtattttggtgtatactgtcactggtagagggtcatgattgcaagttatccaggttcttggcgttttgaacaaagaattggacaacatgtccagcaaagcaaacaatgaagcaacaacagaacaaaaacagggatttattgaaaacaaaagtataggcggccaggtgtggtggctcatgcctgtaatcccagcactttgggaggccgaggcaggtggatcacctaaggtcaggagtttgaaaccagtctggccaacatcgtgaaaccccgtctctactaaaaatacaaaattagcctagtgtggtggtgcatgcctgtaatcccatctacttgggaggcaaagacaggagaattgcttgaacccaggaggtggaggttgcagtgagctgagatcgagccattgcactccagcttaggcaacaagagcgaaactctgtctcaaataaaaaaaaaaagagagagagagaaagaaaatgaaactgtactccacagtgtgggagcgagcctgagcagtggctcaagggcccggataccgaatcttcttggttccaaatacctgctagaagttttccattgattactttatactcacctcatgtaaatgaagttgcagcctataaggttgcagaaagcagccaaccagaggctgaagtgaagttacaaaggtcacactcctgtgcaaacatgttgcaaagttatactcttatgcaaatgaagacttggctggcaatcagtctgattggttttggacagcaaccattcagagactggagtgaagttacaaagttgcaaagactggacccacagtcaatctgattttctgatttgttattggatgggaaattgactgtccgatttcccatctgccacacagaaaaggtgggtggtttgcaaagggagtagcccctggtccttttattacttaggtgtggaaagctaggattttcctttcaatttagttctaggaagttggcgtgaaacagccttgggttccctgcctccagaccctattctcctgcctcagtgctatcattagaataataaatttcataggttattaacctcttttaattgatctaaatcacctgtttccttttggatttgacttttaattcccactgccctgctgacttctcggcgcatataaatgctcaataattggatgaataggtgtgggtgggtgaatgggtaagtggacagtcatcttacattatagaatgttttgctgattctttttagttcctgacctcccaacatttgcgaaatccatactccattagtgtggctggtggacctctcttgatacagaataaccatggtttctgtgagagcaaaaagaaacaagagggctcccaaggacttgcccacagaggcgctttgctcaccaagcatggttctttcctgttggcctctgtttgctctgggtagcacctcggctgttttaggcccacagtatcacctattgacaagtgtagatagctattgatagtatcaataggtgtaggaaagggtctgcctcctgctattcctggttttctctttctcaaaggcttgtgcatgccctaggctttctcactgtccgttgctgggtgaggtcatatcagctcttactcccacagaaccacccgcacctgctttaagtacgctgcctttctgacttcaagaaaatcatactctcggaaaaagtctaatcattgtggataactttgaatatggagctagtgatatattacctaagggaggaggaaatcacatattttgaaatgataaagaaccaggggcataaacattgagaactcttgaaaataattaaaagttctcttcagaattttaaagtctttttctattaatttctctaataatttagccaacttttcttcaaatatcatcatttaaggaaaatgaaataactattttatatttatttgtttatttgtttttttttttaccagtgtttctgttttcattgccgaagtagtcagttggtaatgacgtttattaaatagccttatctaatagaaggctaacacaagccatatttaaaatttctttgttttaattaattagctctttgttttgttttgtgtttgagacggagtccgttgcccaggctggagttcagtggcacaatctcagttcactgcaacctccgcctcccagactcaagcaattcttctgccccagcctcccaagtagctgggactacaggcacctgccaccatgcccagctaattttttgtatttttagtagagagggggttttaccatgttggccaggctggtcttgaactcccgacttcaagttatctgcccgcctcagcctcccaaagtgctgcaattacaggtgtgagccattgttcccaactgtcatttaaaatttcttagtagtcatattaaaaaagatgaaacaagtggaattaattttactaatacattttatttaaaccagtgtacctgtggagacaaaagtgattccatcttaattgctaatgcaccatgttgttttttttttcttgaaggcaaaccttgttgttttaatgtaatttattttttattttactttttttttaatgatagggtcttgctctgttgcccaggctagagtgcagtggtgcagtatggctcactgcagcctcaacctcccagactcaactgatcctcctgcctctgccttctgagtaggtgggactgcaggcctgtgccaccacatgcaattaattttgttgattttttgtagagatgagggcacactatgttgcccagaactcctggactccagtgatcatcccgcctctgcttcccaaagtgctgggattataggcctgagccaccactcccagcaaagccatgttgatttctcattagccccagtctcgtgaatgcctcctgattctgattttatttactgtttttagtgtaagaacaaagcagccttgatcttaccacacaaattataggcagtgacgcacatagcattcccacctgttctggaggatgcctttaattgcctctgtagagcacgtacaccctttccctgtggcatataagctctgggtctggccagtaacagagtgggttatacctgtcttgcagccatccgagatcacgcttctgtctgtaagttcccccaagaaaacaccctttaccaacaaattgagtttctttgccttattctttggtttcttggctccctccgcatttgggggctgctttgcatttatggccctttcacagaataataccccaaatgttgtcatttcaacatgaaagacttttaaaaattactaatgtgataccagaaacaacatagacattggcattaatacaacagtatcttaaacaatggaacggtcagagtggaatgtagtcctaccaaaacaatggagttgggtttaacagaaaattacactgcttcagttttaaaattaacattaaatacaattgaaaatttaactcctcagtcacaccagtcatatttcaagttctcagtagctacgtgtagctagtggttactgggttagaccactcacaggcaaaattttttgtaaaccagagagtgtttacagatagagaaaactctacataatggtttttaaagtattcccccttaatgtcaaccacagttttggtttttatctcttaaaatttggaatagatgagttgaatttatttttaaacagaagatgaatttatcatctagctgacaaactttttaaatttcccattagaagatttaaaaaattacaaccatttttaaaacgtggaatgatttcctgcctgtggcatataattaaagtgatgaaacaaacagaagattcgctgtgtcctggccatggtgagctcactctctgttttcctcacaaaccccagaacctttgtagtgtggaacctgctggatgaatagaagttttttattttattttatttttttactatgtctatattcctgtgaagtaatttttttgaccttgaaagaagttcttcaattttgctgttctctatttcttacagtgtagtttgtgtaccgggatttaatgtattgtttgtcgttagcgttttacatactagattttcatcgtgcatagtcacgttgtttgaacatttgcaagcagagccgactaactgctgttggcctgtttctttgtatggcgtgatttcttctatccacctgctcacagcaggttgccttcaggcctgaggagtagctaaatacttttgaaaatatcttgagatcctgctaaggtctaacaatttctgcatttgtgtgatgtgaagctattcatgctgtacctttgaagacttttttctttctatttctcatattcttgctcaaatattttcaaaagaagataaatttattataaataacagtgcagagctgattgtagcaccactgcattctatattgaataggtctttgatattcagctaagtggaactaattttctatgttaaagcagacaaatttggaatagtgtcacatgaatctcatgttatttactgaagaataccagattaaatggattagttgtgaaatgactagagtattaaattatatatatatatatatatatatatatatatatatatatatatatatatatataaaacgtgataacttaaaatgcccagtgggcctatgtaatataaaatattacacaagcacatgaatatgatggacgagatgttattctgtttgcagattgtgaaactatctgtagtatatatacaaatggttgtccacacagaatttgaatcaattttaaaattgtaaccttaaatttcagttttgaagaaaataaattgttgattttcatatctacttgagaggaagttaaaaatgttattttcttttcagttttttttagattaaaatagctcccacaccctccaagaataaactttagttttaatcctaataactgtttatagatagtaaaattaatattttaattagaaaaataaagcggcatacatttttgcctgtactttgctggtacacaaatgaattgggaagtaattgtcttatgttttcagtcctaaagtgttttacaggttttaaaaatgttccccccacccccatctgtttgaagtcattattattttgtactttacacatgtgatttctctagaatcattgcatgtgacatgacactctcaggatatataggatatataaatatataacttagaataagtagaggttggtatttttcgaatgaagtaggaaatgaaagagtaattattaaccatatcctttttacattcctgacatatcaatacagctacacatcttagaaacaagctcaccagtagaacagaaataactctgttgactctgctttaaaatatttcaaggcagtttaacagctgggatgtatttacagctatggtataaagtattaattttgatgcaaggctacctgcttttgtaatgtagtcctagaagcttagcagttttctgggttttataatttggagttgcttttaaaatttaaccgaatgggaaaatgtctttctgaacttccccttcccacacccccacacatacaagcttttctcctcttctgttaactagaaaattatattttcgttgctgcctgaggaagagaattttgagtagtataaacactgattgtagtaaatgtggaaaataatacaaacagctgcactgcagaccgataagacaaatcccacagtaatggcctttaaaacatattaccaagttggaaatcagtgaggggaaaaagaaaactattactatttcttcctcttactgttcagtgacattatttttaaaggtgaaattacctctggttttattatcctaggaaggtatttttggaacatttgatttattgttttgcaaatgtttttgcctttgtgtgaataactttgctaattttgtatgaatttgattctaacaaatgttgaagtcattttgttaacaaaatcttctaaagtattttttaaagaaataaaaaggaatatattatgtaaacattggagcagactatcaaaataagaaaaggagaacatttttatctggctttggagtgccatttaaaataggaaaagggatgaaatatttgcagaaaatattttaataagcgtggatatgtttcatcaaatacaagtcttaatttttatgaagaattttgctattagcatatcaagtggtcagttcatatttgttttggcatgcattagactcatgataggcattgaatactttgttttttgtggattctaaaactgaattatcttaatcctaggctctaggaaaagtatatcttactgctagggaagattgaaataaattccagttctgagtgaaattttatttctgtttttctttacatcaatcttttctttttccttttttcttttttttttttttttatttttgagacagagtcttgctctgtcactcaggctgtagtgcaatggcatgatctcagctcactgcaacctccgcctcccaggtttaagcgattctcctgccttagcctcctgagtggctgggattacaggcgcgtgccaccatgcccggccaatttttgtatttttagtagaggcaggatttcaccatgttggccaggctggcctcaaactcctgggctcaagtgatccgccttccttgacctcccaaagtgttgggattacaggcgtgagccaccacgcctggcctgtccttccttccttccttcctttacaaactgtgggagagtggtgaaaaaaaggtgacagtcattatatatgtaattgtgacctgctttaaattgaatgcaatgttaaggacagcttattggtacttatacctatggtcacacattcattgatacagtttgtttttaatgtgaaaatttgtttccattttacataatacaaaattacttctatttgcctgggaatgaatctaacctttgtagtgtcagccaaaggaatgataatattgttttagtgtctcctacatagaagggaacgcccagtatggcctaggcagtgttctagactctgcagatagaacaaggaacaagacttaccttccagcagggggaagtagatactaaacatgtaaatacctaaataaggtgattttagtactaagaagttggatgaagactatgaaattgatagaaagtcactagagaaggcagctttagcaaggatggctaggaagtcctctctgaatagctaacactgagctgagacctacgaagaggagggggcaaacgtgcagaagtctgggggaaggaagtcccaggtagcagaaggggcaaagcagaggctctgaaacgggacaagcttgttttgtgtgaaggccagttggggagagtggaacgaggaagacagaaccagatcatctaggggccaaagaactgttttgttttgtgttgtttctttctattcatgttgtggagcgtttggagggtttgggtaggagagtgatgtgatgtgattttttaaatcattgcaggccttggggtagagacagagaaatcattgatttgaccattgcagacctcaggtgagaggtactggtggcttagaccaggaggcaccgtctgtttctatggggctcacaacttgagtggttattacatttttaaatagttgggggaaaaaattaaagaagaatgtttcatccagcctgggcaacatagtgagaccttgtctctacaaataatttttttaaaaattggctgggtacaatggtgcatgcctgtgggtccagctgcttgggaggttgaggtgggagaatcgctggagtccaggcagttgctgtggagagctgtgaccatgccactgcactccagcctgggtgacagcatgagacactgtcaaaaaaaaaaaaaatcaataatgtttcatgacccatgagaagtatgatgtcacattcagatcttattgatgataagcagttaactagaacatagccacattcattcatttttgtctgccatgtatagctgcttttgcagtttttgtcgtatgaagctgaatgcacagactttcttgccacgcagcagttcagtgggttattgtgatttttttttttttaatctcaggaccaagattaaagttttttgtgcagagttgcaggtagccaaattactttttgtattcctgtgccttagattcctcatctgtagagcaaaattgagatcgtctttcaggtctgtttgctctccacatcctaaggtcctaggtctgaatcagacttagttcttctgttgtggctgcttagcacatcaggctcctaactgaatgattgtagtggtgttttactcggtctcctagcctcgtccttccccattctatgtatcttcagcatgacctcagaccaccgtctttctaaaacatgagcatgtcacactccagttcttaactgtaagaactttgtcaggtatgagctctctttgtacaagatctgacctgggtttataattccttcctggtttcctttcttgccacttccaccttcatccaaccctatttctggccacgctgaactgcttaacattccctaaacttgccatgccatcgtgccatcccttaatctgaaatttttgttaactgtctcatcagcccacaatttttttttttttttttgagacggtgtctcgctctgtctcccaggctgaagtgcagtggtggtgcaatcttggctcactgcaacctccacctcccaggttcaagtgattctcctgcctcagcctcttgagtagctcggattacaggtgccaccaccacgcccggctaatttttatatttttagaagagacgggatttcaccatgttggccaggctggttttgaacaacctttttttttttttttttttttttttttttgagacggagtctcgccctgtcacccaggctggagtgcagtgatgcaatcttggctcactgcaagctctgcctcccgggttcacgccattctcctgcctcagcctcccgagtagctgggactacaggtgcccgccaccatgcccagctaatttttgtatttttagtagagatggagtttcaccatgttagccaggatggtctcaatctcctgacctggtgatccgcccaccttggcctcccaaagtgctgggattacaggcgtgagccactgcacccggtggttttgaacttctgacctcaagcaatctgcccgcctcggtctcccaaagtgctgggattataggtgtgagccaccgttcccagctgtttttcagttttcttttggaaaattcctgctcatttttaaaatttgtaattggtttttaattgataaattaaagttgcatatatttgtcatcctgtcttagtagtgtcttttgtgttgctacaaaggaatacccgagactggataatttataaagagaaaaagtttatttggctcgtgattctgatgtctggaaaagttgaggattaggcatctgatgaggacctcaggctgcttttattcatggtagaaggcaaaggggagctggtgtgtgtggaggtcacagagtgagagagaagggagggaggtgccaggctcttttaaacaaccagctttctcaggaactaagagcttgaactcgccctcaaagagggcattaatctattcatgagggatccttcccaatgatccacacacccccattatgccccacctccaacactggggatcacatttcaacatgaggtttggaggagataaactttcaaactttcacacatgtacaacatgttttgaagtacacacttcaaacagtggatacactgtggaatggctacattgagctaattaacatatatgtattacctcatatacttattctgtatgtgaggtacacttaaatatactcagaaaatttcaagaatatattaataatacgtcgtcattaactgtggtttctatattgtataatagctttctcgtacctatttctcctttataactgaaattttgtgggttttgattaatatttcctcaacaccccctccccaaccaccattctattttctactctatgagtttgacgtttccagattcttcatgtaagtgaggtcatatggtatgtctttctgtatgtacctggcttattttacttaatgtaatgtcttccgggttcatccatgttgttgcaaatggtaggattttcttttttaagtctaaataatattccattttgcatattataccacattctctgtatccgttggtccatggatggacacttaggctgattccctgtcttggccatcatgaatagtgctgcaagaaacatggggatgccagtatctccttgacataactgatttctttcctttggatatatatgcagtagtgggattgttggatcatatggtagttctatttttaatgttttgagaaacctccgtactgttttccataatggctgaatcttgttcatgttttttttctttcttttcttttctttgtttttttgaaacagagtcacgctgtggtgcccaggctggagtgctttggcacagtcggctcactgcaacctccaactcccaggttcaagtgattctcctgcctcaggctcctgagtagctgggactgcaggcacctgccaccacgcccggctactttttatatttttagtagagccaccgtgttgggcaggctggtctcaaactcctgacctcaaatgatccacccaccttagcctcccaaagtgctgggattacaggcatgagccaccgcaccctgcccctgtttgtttttaaatatccagctttaatgtctgtcttaacctatctaatgtcttccttattaacctttctgctcatttagtcggtctgtcctcttatcccataatactttgtacattttgtactatgcatttatcgtattgaattatacttatttttccaataattctgctgtcttttccttagtctcttggaaggtgggtcttaattcagccagcagtgcccaacacagttgagaggtagatggatgattagatggatgaccaacgtagaaatgccagtgtcaaaacctaggaatcaaccctccgttcttaactgagtctccctaagacacaggaaaggagtctattttattccattttgttttctgtctttttttgcctttattaagttcaacatgtgtgtataaaagaataggaaaaacagataagtgaaaacgagagtcaactaatatttttgcctagaaataagttttatgtgcactaattctagaatttttctgtaacataattttttacaaggcttattctgaacatattgttttgttcttcttgcccttagaaataaactgtaagcgtttttcatatcttgaaactttttaaatggcaggctggatatataccacaatttacttagctagtgtctttccccgtcatttacatttcttgccattgttcagttctataaactacactgtgatatttgttcagctttatttttctgcctatccttacattttttcctcaggataaattcttagaagtaaaatgggttggctgggcgcagtggctcacacctgtaatcccagcgctttgggaggttgagggagcgggttatgaggtcaggagttcgagaccagcctggccaacatggcaaaaccccatctctactaaaaatacaaaaaattagccgggcatggtgggagatgcctatagtcccagctacttgggaggctgaggccggagaatcgcttgaacccaggaggcagaggttgcagtgagccgagattgtgccactgcactccagcctgggtaacagagtgaaactttgtctcaaaaaaaaagatgtgaaatgggttggttgggcatggtggctcatacctgtaatcccagcacttttgggagctgaggccaggagttcgagaccagcctggccaacatggtgaaaccccgtctctactaaaaatacaaaaattaggcagatgtggtggcaggtgcctgtaatcccagctactcaggaagctgaggcaggagaaacacttgaacctgggaggcagaggttgctgtgagccgagatggtgccattgcgctccagcctgggtgacaagaatgaaactctgtctcaaaaaaaaaaaaagaaagaagtgacatgggtcaaaatgctcccatactgattttttttctactctataccacactgccttaagtatgctatctagattaccattgtgtcaatttacttggcaatatttgcaggtaggggaaaacattttgcattaaaccactgtctttcttattgatctaacctccctccgtcaaggaaccgaggactcagcttgatttctagaggttcactctgggttctattacttctgtgatcatagagatcagagttggtaaacctccacttctgtaaaaaggaatgaaattaggatacatctgtatcgtaatgctcatggcatgtagttgagtgaaagccactaatactctacatctgggaacttaaaaaaatgatgctggcttagttagaactgctttatttgtgtgtgtagtctttgaagtcactgagccctctctgattagccagaagaggaagaattctgaggaatacgttaggattaagtagagcaagttttttttgtttttgtttttgttttttgagacggagtctcactgtcatccaggctggagtgcagtggcaggatcttggcccaccacaacctcacctccgcctcctgggtccaagcaattcttctgccttggcctcccgagtagctgggactacaggtgtgcaccaccacgcctggctaatttttgtatttttagtaaagacggggtttcaccatattggccaggctggtcttgaattcctcacctcgtgatccgcctgcctcaacctcccagagtgctggaattacaggcatgagccaccgcgcctggcccaacagaccagttttgtaggtgagaattatctcacagtgtagtcagcttccagtgtactacttattcacccatttttagtagcagtagtagttacttttaactaaaattttaatagtcatagtatttacttttaattaaaattcaaacaagatatatgcaagtgatatatttgctgtaaacaaattttatttataaataaatgaataataaagaggttatttctttcactactctctggacatagaattgcattgttgttttaaacaaatgctaattcattttctataactattttattgagatataattcacacaccatacaattcacccatttaaagttacagtttagtggtttgtagtcaattcacaggggtgttccaccaccaccacagtcaattttagaccatgtttatacccttgagaaaccccacaccaattagcagtcatctccatgtcctcccagacctcctcttggaggcatctaccaatctaccttccatctccatggattttactattctggacatctcttattaagtggaatcatataatgcatgatccttggtgaccaacttctattgtagcatgtatcactacttcattcctttttatggccaaataatattccactgtatggctatactatattttgtttacccatccatcagttgatggacatttgggttttttggctatcgtgaacattacatacaagctgtgcagatatgagttcattttatatctcttgtttgttttttagtgtctttctcgagaagcaggtggaaacatgagcattcagtttcttggtacagtggtaagtatgaaatcattctttattctcttaatttacagagaaaaaatgttcaactagttgtagctcatgtgtttgaacttggcttcattactgctagatatttaaattacctctacttttttgcctttacaaatgatattctagggaacaacttcatatatttcactttattttagtgtttggaattattatcttttttgagacagagtctcactgtgttgcccatgctggagtataggggcacaatctcagctcactgcaacctctgcctcccgggttcaagcgattctcgtgcctcagccacccaaatagctgggattacaggtgcctgccaccaagctcggctaatttttgtgtgtttttttctaaagatgaggtttcaccatgttggccaggctggcctcaaactcctggcctcaagtgatccatccacctcggcttcccaaagtgcgggattacatgtgtgagccatgtccggcctggaattattttcaaatgtggataagatatttttaaacatgtatgatatattttctcccaaatagaatcaaagtcataaatagttttatggcttattatacatgttgcccattattttatgtccctttagaacaccacccatcatatattagaacacaactttgcattgtcacctagtgtgagttgtaattttcaagattagtaaacttgatctgctgaagagtttcaatttattattactattttacttataagtttataattagtattagttactataattttcaaactaatttgtttaaaaaggtaccttatttggcttggtgcggcagctcacgcctgtaatcccagcactttgggaggctgaggcaggtggattccaaggtcaggagtttgagaccagcctgaccaacatggtgaaaccctgtctctgctaaaaatacaaaaattagccgggttgtggtggtgggcgcctataatcccagctactcaggaggctgagggaggctgaggcaggagaatcgcctgaactgaggaggtggaggttgcagtgagccacgattgtgccactgccctctagcttgtgtgacagagcgagaccccgtctcaaaaaaaaaaaaagtaccttattttaattttcatttttctgtttattgctattgtatttgaatatttctccatgtattcattcaccagatatcatttctaatctgtgaaatgtctgttcatgtcctttgggtacctcattcaggatatggattcatattgggcatttcagataactctggagtttattaagaatatcagaggtattctgcaagaatatcaagaggtatttcaggcgagagagcttgcgtgaaaaagggttttgcagccattgagataggaaggatgttaataaaatgtgtgtttactgaatgctttatcgattatagagatgtatatataatttatgtatataaagtatatgtataggtacttggtcaatgtaacctaaattttaagtattggaactaagttttgtgattattcttgtttttctgattagtaaggtaatacatgcttattgtaaaacatttgaaatacaattcaaatgtatgtcataatatgttgcattagtcaagattctccagagaaatggaatcaacaagatgtgtgcgtatgtgtagagagaaagagaaagatagatctaaggaattggctcaagcaattgtggaggcttggcaagactaaaatctgcagggtagatgagcaggctggagacccaggggagcgttgcagttcaagtccaaagacagtccactggctgaagccctccttgcttggggaggtctgtctttttctcttaaggcctttaacgggttggatgaggcccacccactgtggagggtgatctgctaaactctaagtctactgatttcagtgttcgtctcatctaaaaatatcttcgatgatacatctcagtgtttgacctaacatctgggtaccatggcctcgtcaggttgacacataaaattaaccatcacagaagtatatatcctatccctagaggtttttaagttattagcaatagataattcttccagaaaattatgcatcttttcatgcaataatagatcttggacacctttctgtgtcagtccgtaagatggacctcagtcgccttaagggccacacagagctgcattacgtggatggagaggactgctttcactcctcagtgttcgtgctgggaagtccactcatgctgtctctgctacttagcatctctactgggtttctaatcggtttctcaacttcatgtatcggaaactgagctcgaaaagtttctccctcagtttttcctctctctgaaaatggcaacttgaactaatccttgattactttctctcctcttcctctctctcctcttcccctcctctcctctctcctctctctctctctctctctctcttctctccttcctctccctctctgtcctcttcctctcctctctgtcctcttcctctcctctctgtcctcttcctctcctctctctcctcttcctctcctctctctcctctctctcctcttcctctcctctctctcctcttcctctcctctctctcctcttcctctcctctctcctctccctctctctcctctccctctctctcctctccctctctctcctctccctctctctcctctccctctctctcttttctccctctctctctcctctccctctctccctcctctccctctctcctttcctcctcttcctctctcctcttcctcctctccctctctcctcttcctcctcttcctcctcttcctttctctctctcctcttcttcctctccctctctctcctcttcttcctctccctctctccttctcttttttctttctcctctttctcgctcctctttttcttctctctctctccttttctcttttccccatctgtctctccctgtctccctctcccctgtctctgtctctgtgtccccacgccccccactcctggccctgcctttagccatctcttgtttggaggatggcagtagctggcgtccacctcactgccatgctactccctagtccatcactaatagagcaggaaaaggagtcctttgaaaacatcccttggttggccttgttgctcttcttcagacctgctgggcacatgccttagggtctctgcccttgtttttcttctactaagaacatctgcccctacatgtctgctcaggggtttcctcactttcttccggtctttactcagtaggctccttctgaaggaaggcttccctggtcacgccgcttacagttctggtcactctttccaacatcttattccccctcgcccactttatttatttatttttttcattagcagttaccactgcttgacatactgcaattttccttttttgatgtatttgttgtctatcttcctcacctggaagtgataagctccttgagtgcagggtgatttgtctgttctgctcagcgtgctctgcccagtgccctgaacaaggcctggcttggaggaggtattcagtcagggttgggcaaatgaatgactgaaattggccaatgtaggacctgagtgttagacttgaaaagaaaactaaagaaaggaaatacaggcctggctcggtggctcgtgcctataaactcagccctttgggaggctgaggtaggaggatcacttgagcccaggagttcaagaccagccagggaaacaaagggagaccccatccttacaaaaaattagctgggtgtggtggtgcatgtctgtggtcccagctacccaggaacatcacttgagcccagggaggtcgaggctacagcgagccgtgatcacaccactgcactccagcctgggtgagagtgagaccctgtaccctgtctcaaagaaaaaagcaaatatgaaaacaaatggaggccgggcatggtggctcacacctgtaatcccagcgctttgggaggctgaggtgggaggatcacctgggtcaggagttcaagactagcctggccaacatggtgaaaccctgtttctactaaaaatacaaaaattagccaggcatggtggcaggagcctgcgatcccagctactacaggaggctgaggcaggagaatcgcttgaaccttggaggtggaggttgtagtgagctgacattgcaaccactacactctagtttaaaaaaaaaaaaagaagaagaagaaacaaatggagaaaaagaaagtgcagggagctttttgggactgtggagctgaactaagctgtcttccatggataaggaaactgtatcttagaaaaggtcacttgacttccccaaggtttcacgtctggctggtgtgtagagcactaaagggtatacagatttcctggctctcagttcagggcctgttccatcagcaggtgcccttcaatttcactcccttttatccacttcaggcacccaaaacatgctagcataaaaaaacacaagaaacaaaaacacaccacatgtacacacccctacttaaatggacaacaaaagtcaccggaaaaaagggaaaaaaagaatgtctttttgatttgttttgttttgtttttgtttttggagacagagtctcactcagttgcccaggctggagtgcagtggcgcgatctcgatatccgctcactgcaagctccgcctcctgggttcaggccattctcctgcctcagcctcctgagtagctgggactactggtgccggccactacacccggctaatttttttgtatttttagtagaggcagggtttcactgtgttagccaggatggtctcgatctcctgacctcatcatgatccacccgcctcagcttcccaaagtgctgggattacaggcgtgagccaccgcacctggccaaaaaaaaaaagaatttcatgtagctgacactttcctctgcccctaataaatcatagattccttgccaatgagttctaaaggggctgtgtccactctgtttatacagtttatacctagcaggaatgtcagtttcaggtacaatttctagagtaatttctaattactgtaaaattcacagtacagcatagcagtttggatggccaatgtgctttgttttactgaatttttctgtgtgtgttattagcaatagtagatcagtctgaaagggggaaagaaatagtttgaagatagtagtggtcctgttacaacaaatacagattgattcctagctagcatatgttgcttcagtcaaagatgtctaaagcaagtatagtttccaagacacacaggtcaggaatagcagcatgtcccatggcaaaggtgatgctttccaggtatagatttgtctttgtgagaatccttgtagaattttctatataagtttgtttttgtcaatattgataaacatgatcttcaatgttcaaaggagagttcaattttagactaagagaagtacttctgttgtgtaaataaggttcaaaaataaggttactgttcaacttagagaaaatacaaacttaaaaataattcatttcattttttattcactctgaacttttaaaaaaagctggtttgtgattttcattttcagtaaaacaaatctcattactttaaaaaaaatgcttgtattagatattatatatatgaaatattatactttacattcttataaaacatttataaagaatgatgatacaacagatttgcatacctaagtgtaagacttgaacaaaagactaaagacaggaaatacaggcctggcttggtgactcatgcctataaagccagcactttgggaggctgaggtgggaggatcaaatacatcaaaaaagtaaaatatgtagtatgtcaagcagtggtaactgctaatgaaaaaaagtaaataaagtgggcaaagggtggaataaaatgttggaaagagtgaccagaattgtaagtggtgtgaccagggaagccttccttgagaaggaggctactagcctgaagagtttttaaaaacgtaaccattagtttggaaggtctctgtgttactcccattctgtcactcattctctccctgcacaaggaactaacatcttcccgacttgtatctattattctttgcttttctttataattttcccacatttatatccctaagtgatatacatttttgttttacgcgtttttaaacttgatatacatagaattatattctggaatcatctgtgacttggtgattttgctttgtgtttgtgagactcgtatgttgcatggaggtataattcatttatgctcagcaatgcaggatgctgtggtgttgataaactagcctgctactcatggataattgggtagtttccagtgttttgtgctgtaattctcactactacccgaagcattttggtacgtgggtatatgtgtactgatggcacatatgcaatcgtttctttcttttttttttgagacagagtctccctctgtcacccaggctggtgtgcagtagtgcagtcttggctcactccaacctccacctcctgggttcaagcaattcttctgtctcagcctcccaagtagctgggactacaggtgcatgccaccacactcagctactttttctatttttagtagagatggggtttcactgtgttggccaggctggtctcaaactcctgacctcaaatgatccacccacctcagcctcccaaagtgctgggattacagatgtgagccaccatgcccggccatatgcaatagtttctttagggttttgtgcattgagtatgcagtgaatgagttcactttgttccacatcttcacttggatcttcttaatttttgccagtgtgaatagtgccctcattgttgtttcaatttgctttatcctgatattaatgaagtagaacatcttttcttatttattggctatttctcttcatcagccatttggtttccacctctgagaagtacctcttatagctttttgtgtgtttctctatgacatgggactgcaaaaatacatgaatttagtatgtgaatgatacaaattaagtatatgtcatttggcttttcaataaggcaagagggttaggtgtggacttttatgactcattcttgtagggcccaggcctttggggcttagcgggtgttctcccggtgtgcggagacgagagattgtaataaataaagacacaagacaaagagataaagagaaagcagctgggcctgggggaccactgccatcaagatgcggagaccggtagtggccccgaacggctgggcgcgctgagtacaagaccagggggcagggtaaggagggtgaatcttctaagtgattgacaaggtgaagcaagtcacgtgatcgtagaacaggggggcccttccctcttaggtagccgaagctgagagagagaaggcagcatacgtcagcgttttcttctatgcacttataagaaagatcaaagactttaagacttttactatttcttctaccgctatctactacgagcttcaaagaggaaccaggagttacgggaggaacatgaaagtggacaaggagcgtgaccgttgaagcacagcatcacagggaggggtttaggactccagatgactgcgggcagactgggataatatccagcctcccacaagaagctggtggagcagagtgttccctgactcctccaaggaaaagagactccgtttcgcggtctgctaagtaatgggtgtcttcgcagacactggcattaccgcttgaccaaggtgccctcatgcgggcgtgacagagggctcacctcttgccttctaggtcacttctcacaatgtcccttcagcacctgaccctatgcccgccggttattcctaggttatattagtaatgcaacaaagagtaatattaaaagctaatgattcataatgtttataatgattgataatgtccatgatcatctctatatctaatttgtattatgactattcttattctaactattttctttaatatactgaaacagtttgtgccttcagtctcttgcctcggcacctagataatctttcacgcacacgttctgactatgagctatgaatggaagtgactgtcaatgactctgaaggttctgagatttatgctacttgctggctgacaaatcagcctgcgacatttcatagatgctgatagaaaacatgagactccaggatcagagatgaaggacagtttattacagcagcagcagtggtcaggataccattgtctttgtaccatttccctgaacccagattcctctagggcaatgcaaagagacatgatacctgcacacataatgggttgcattataggagaggagctctgagtttagagaacctgagtctttttatactgtgcagtaatcgcacctgccctttgatctggagggagacactctaccaaggccatttactgtacaagcatctttgaaaaggtagttcagagcaaagaacaatcagtgtcttgctcacaagaagtggaaaaatgcaagagacctgggggtgaattgtctcctggtagtgatgtgtgtcacttttggtcagagatagctaagagcaagtgtgagccctctagtccctgccatgccccccttggaggttgtgtgtgacgctgatgctcctgtcagcatgagttccttctgaagagtggcagtgagcactgctacttgcaagctgtagtagactgggatctcagtgttgacttattgctaatgcgtagcccagcttatcctgatacatagtctgggaacatgaaggaccaccttctgtttatagaaccccatgtctgcttatagatttcagattttatagagattcattaggtttattctgtctactttcagtcctttcgcttataaactttcaatccaagcataaggtctttttcctgttacgctgtttgaactttgtttaaaaattgtggccaagcatggtggctcatgcctgtaatcccagctactcaggaggattgcttgagcccaggagttcaagaccagcctgggcaacagtgggaccccatctctacacacacacacacacacacacacacacacacacacacacacacacacacagtgggaccccatctctacacacacacacacacacacacacacgcacatatacacacagtgggaccccatctctgcgcgcacacacacacacacatacacacacacacacacacacacacacacacacacacacacacacactagcggagtatggtgacgcccacctatagacccaggtactcagaaggctaaggagtaaagatggcttgagcccaagagttcaaggctatagtgaggtatgattactccacttcactccagcctggggaacagagtgagaccccacctcaaaaaaatcaaaaaagcgaagatttaaaaattaaaataagattgttagccagttttttgtttaatgaaggaaaagttttccaaattaacagaatgggacattcagataaaatttgtgcctttatgacccaggaggatggcctgggtgtacatacaagtactcaggacaccacattctcacctttggtatctatccgttttattactctgccactcccaaacagtaatacataggattccgtgttagtttcctagggctgatgcaacagattagcacaaaccgggtggcttaaaataacagaaatgtgttccttcacagttctgggagccaggaatctaaaatcaaggtgtgggcagggttggcgcctccctagaggctcttagggagggtctgttctgtgcctctctcctggcttctagtagctcctggcagtccttgccttccttggcttgtggctatgtaattccagggtcttctgctgctgtcacatggccttcttccctatgactgtgtgtgttcattcacataaatccagcaccaccagtcatcagatttaaggctcaccctaatccagtgaaacctcatttaactcattatgtctgcaaagaccctatttccaaataaggtcacattctgaggttctgagtagatatgaattttgggatgacactattcaacccagtatgctatatagatctgaaagcctacttgacacacatgtaaagctaaaaagtgactgaggcaacttacctgaaaatatattttacaaacagagcattacttcttaggtctcatttgagtactaccatttatttccctagtattttcatacatcacctgtatgactgcagttcgtaccccatactcaaaaatgcaggaacactgatgatggctatgcctaattttcagaagacaaaagtgagcatagaaaggttaaaataactatcctatggtaataactggtagaaacaggatgcaaaaccagccctcaccaactttgaagtcaggctgttgaacatcagaggaccttgagaacaaattgcttgactgtggaatccagggagctctctgcagtaactgctaagtacaactgctcaggctgccataatgaaacaccattgaccgggtggcttaaacaacagatgtttatttctcacagttctagagcctgggaagtctaagtaaggtgccagcagattcagttcctggtgagggccctcttcctaggctgcaggcaaatgcctattctcccgtagcagagagagagtgcaaactctgatcttccttcctgttaagggcgctaatcccatcatggggccccaccctcatgacctcctctaatgaactctgaaaggctgcgtctccaaatactgtcacattgagggttaggcattcagcatatgaatttggacgttcagtccctaacatacatttggttggtaagctgcagatcccagaatttttccaggatatctgtgcccatttcaaattgcaaattgtctgggttttgtttgttttgtttgcatgttttggtgaagctgtgagtctgtgtacatcagatagtgtaagctcacaaagaaatcgaagagagctggtgttttacttaaccagaattccttacttgaactgtgcttcacaataagaataaatattttgttattaaagaatgcagaagttaccattttattgcaaatttttattataattaggttttaaagtactataataaggcaaacatatctcagtgagactgactttttttcccttataaaaacaatgtttgtatgaaagagaaaataagcttagactccattgaacagcttcttcatggctgcagtattggcattcacccaaggactcttgagaaacgatcaaattttcagtatctttgaagcttagccagagatctaatgaaaccaaatgatgctaaagttcttaaagctaatttaaatctcaaattatacattttaaattaagtttttattgataataaatatactttatttcatattacccttgaaagcttgagtgataatattagtagaataaacatgttttacaaagatttaccattaagaatgctattaatatgacccttgatacaccagcacaattagatttcaaagtaagcacttatgaagtaacagcgattaatgacaaccatcgaaaacaattttgaactccatcagtttaactcaggagggtaaacttaatatgataattcatctagttgaattgtatcagcttagcaggaaggtatgtaaatatgtgacccttacctagcttctaaatggatgctgtgctgatagatttatcagttccattaaagaactttggggaactttggagtttcagcaattgttcccttggaggctgaaaacccaacctgatctcatactgggaccattctggtctgcatatttccataatttgcctttgctactaatatgacagcaagacacaaataactgtttctaataatatcagatggagttgtggaggacagcattttaatgtagtaaaagacctccccgtggggttgttattgctactatagaacagcagctacacagttgcaactgtagtctcttaattgattcgtttaattagcaagagctgaagcttgggctgtatcttgtcatctgatatcataggactcgaaatttgcatcattcatatttatagatatgtaaacatcatcaaaaaggtcttctgcttctgaaaattcacttacagatatcaaattttaatagagcagactcccatttgtttgaaatttaactaattaaaaaatgaaaagaattaagtttgttactgtttttctttatctgtactcttgagaaataagtgatgtcatacatttttggttgtggatcatctcctaaacataaacttccagagaacttcttcagtcttccgtatctcataattccataagcagtccctcaactgacatgtctgacttaagttgatctctcctctctgtcccatccctttctctgtgtcagtgtgatttcaggaatgacatgatggcttactggggtttcttgcacacgtgtgctgtaactttccacctgtccctgcctgcctttgcagctgctccaagtcctgctagggtaggctgtctgcttgtgctgtggtttggtgggtcatctggctgagttggctcttggcagttacctgcctacccaagctgcattggtccccactttctctggaggggaaaagagaaacggatagaaagtatctggcatagaaaccagagcctttctagtctgtttaccctcaactccacagggcttcctccctgctcggtcacactctttgtattcctgacccttttctagtccaacaataggaagcaggtggcggtcacagagcagacactttgtggaggggtgatgaagttttctgatgttcagatatattttacagtgctaagaaaatctatagcattccttcctgcatttgcccctaaatatacaaaatttcaggcaaaatatgggtagaataagattttatgaaatggaatataaatgtagtcttaatcttgaacattgtttctgtggtaatgtgtgttctgtgtgccatgtaaccaagctaagaatgaacttttggaatataactacgtttttattcttttgaaattggcatgctctatataatataaaagtttggttattagtattgcagtgtgatgcattctgaacaaaaatttaaaagaaatcattgcctgcctgctatactatgtgctaggaagtgggttagttgaacatgacttggtccctacccttaagtagcacactggctggtgaagacagacaaactgataccatgcaaacatggtatcagtgctgagatgggtaatgcataggcttatatagtagcagagcgaattgtagatctgttagctttattatttgtttcttttattgataaacagtacagtccatagggcgtaggtctctggttaagaatttgcattttatttgtcaagtacacctcaataaacacagggaaaagaagaactgtatttcatatcttattagacattactttttgaaaatgagcacaaaacctagcatttaatggtagtcatgagagtcagtcagtcatcttacactggtgacagacactgaattctggcaattcaaaggaaacaaatatccctgcagtcattgggcccattgtcacctaaggatagagaaatgtaaatgactgattaccgtgataagaacgctaacagaggtgtatacgaagtagagggattctggggctgaggtgaagaaagtggagaaattgtgaacagtttttcagtgtttatagctcatgctgtgactttaaggatgaattgagtttgcaggagaaggcatttcagatagagggaacagtgagcctggagatagcaggttgtagaaactgcactctgtactgatgatggagaaagaggacggaatgaaattaataaaggcgcagaggtattaagatgtcccaagtgtttaaggaagagcagattggcttatgagggtgatgggcagggcaacaaagatccctttggaagatgaaattagtctgttgggggcaagatgacacaagaccattccaaggaggttgggtggcattccctagattctgaggttcattgaaggagttgaaagaagaatcataatctcatcagaggtggttggttttattggtgtggtttttttttttttttttttttttgacaacttatgggagtaggcaaagaaagaagagggtacatttgagagccacttctttagaatccagtgtacaattctatgtattgggcagaattgaagataattctgagatttctagaggtgataactgatgcagttagggaggaaaaacaggaagaagagaagaattgtaccagagaaaaggtggactctattaaaaagatggatttaaccaatttaagtttgaaatgccaagagacatctatgatataagggaaatttctggtctggagagcaagaagaagattaagagtgagcacgtaagttgatgccccagcagaggtgaggtcctaagccatgcagtagatgaacctgccaaagggacaatggcaaagcagaggccaggcccagaatggagctccaggaaatgcccacagctaaggtggaggcttgtcctctctaatggagtcacttacaaaatgatgacatgtttattattgaaatcatttatatatactattagaagccagttcattgtaacctcagttatgatttcacagtatcctagggtatcactaagttatttcaaagtatctcaggatctgttgccacctgccaaagatcttcaaagtaaaattaatatttataaataatgccttacgcgtgtatggtgctttagggctttagaatgattctacatatgtcagcttacttgattccattcaattgctaagatgaataagccatagcacaccttagagtgagtggtaaaaattagacatggaatacttcttgcagtgttttccatttaaaatatttgagattacaagttatgtgttcacaggaaattaccacgaaccactgccagattgctagtgaacaggatcgggcaggggtgggggaggaataagtagagtttgtcttcctgcatttgaatcgcagatcacctgtctcttagctttgtgaatttgaacaggttgcctaacctccctggtcctcaattttttcatcaacagaatagatattatctgcttttatggagatggcaagggctgaaaaagaaaacgtttgtaaaatgcctgaaaatagcaggcacttggcaaagaatagctcggtttttattgtagctccccactctccctttgcttcattttccctttcatttgtcttgcttggagacatgctatcatctgaagtgatagtctccaccgagtcttcaatttggtgcttggcctacagaaaaatccagagggaaaatattgttcccttttatttgaaaaaccaaatttgtgttaatcccctggttatgaccccttaacatagttaatgttttgtaagtgaatatggaatagaaagcacatacttaaatgtgtaccttgtggtggcagggtgcttaaaaacatctgtttccttgaagaatcttgcgaatcaccaacaccaaacttgaccagggaagaatttggtgccttgtgtttaaactgtgctgcttaaaatatattcagatggaaagaatggcaaaaccattctgatataggacattttatgacagtgcctatgagatgttctttcttctactggcctcacttttaaagggatatcattttaggtaggctgtttcagggcactgtcatatgttactgtggactatcgatctcttgtacctatgaattatttgattgtcactctttaatttatagtgagaaggaagtgggaatggcagctcttctcttatagaagaaaaatctgagtcagtggttctcaagttttatcatgcctgaggatgaccaggaaatcctggtgaaaatacagattcccagatctgttcctagaaaagctgaccccccatgtctgatgtcgaaatcggcttaaaatgcaccaggactagaatttgcaatatattttgaacattaatgtagaattactatctagtttggaaagtcaataccaaaagacacatgatattcctggccccatgagccaagcttaggagcagtgttctggatccttttcagaatgagaagataggacaaacatttgattatttgtgctaattaacatgtactttcataatacatacttttttaaaatcagggagtgacatgataggatctaaagtataattaggtccatagtgtcatcaactgtatcttttaagtttacttatcatctgtataattctttagattcagtctgagttatttcaagtcttatagacagtgataatttttatttttgccctagagcagggcagtgttatctgtttgggcagtattaacattttggacaattctctgttgtgggagactgccctatgcgtaataggatgtttagcagcatccttggcgtccaccaactagatgtcagaacatgtctccagatataacaactaaaattgtctccaaatattgccaaatggctgcacacagcttggttggggagagactccagaacagatgtgaaacttagtggctggaagcttacaaagtacacatgtcatgacctacttgaataccttatgcgaagaaaataaactttacccgtcctgatactggatttgctttaggaacatgtttagcgaatagctgtttggaagtgtgtaaggggtactttttctttatcttcctcatattggatcatgaaccaggtctaccatggacagccattcatggaatttagggcaaagtctagtttgtgtgattgcattgtgttcatttgggttctttttaccatttgagtagatgtactgttactgcttaccaaagacacattttgggtatacagtgcgtgtgcagctcaataccttattctagaagctgctgctcttcattttgtcttcagttttgtaaaagccccgtaatcctgctggtgagacatattagagtgtgataagcatcacttcacagtgacatctgtgaagttcttctgttctttttgcagctactatttaattgtttggctatttaatattttgtggcgcttccccccttgtgcaaggaagtatatggcaggatgcctgacaagacacgtaggaagccacacagtagtcagcatctcaagtgtgtgttcctgagaaatagccttcccaagccggcatatgttttgtatggtgtaaattctcaagattgtgaggggaacagctaaggtaattcctaaggtatccgtgttaattacctaaggtaattaccaagcatcagggaacatagcaacactgcaaagtcaaagtaccctcgtttgaaatagaatctctacctgatttaggggttagggaaagaattagtggataggttctaacaattacccttctgaggtcacgagtttgagaccagcctggccaacatggtgaaaccccatctctactaaaaatacaaaaattagctgggtgtggtggtttgtgcctgtagttccagctacttgggaggctgaggcaggagaattgcatgaacccaggaggcgggggttgcagtgagctgagattgcgccactgcactccagcctgggcgatagagggacagtccgtctcaaaaaacaaaacaaaacaaaacaaacacagttacctttacagttcaccatggccaaaagattgtaccactcctttcctgtctcagccactttttgagtgactgtaaagtaggttggccgggggacgatcgttgcttgctgagtgcctgtaggtacctagcaccgtatgtttgtcattctcattgaagtctcccctttgagatcaccagtagaatccccatgtttcagatgcagtaacacggacaggaagtaagggatttgctcagagtggtttatatcagaagagcagctgtaggaccaaacccagatctagtaacaaatgtggcttccttcacatgagcatctgggtggttgggagttagttattcctgactgttgggtggagagcaatttgatgggacaaaaccagttcttctgtgttgaggcttagacaccagccacttaacgggccagacagctgaggtccggatttctctgcttcctgagccagttactcttgtatagcgggggaggagtgggcacattctttttttgagatggagtcttgctctgttgcccaggctggagtgcagtggcacagtctcccctcactgcaagctctgcctcccgggttcaagctattcttctgcccagcctcttgagtagctgggactacaggtgcccgccaccattccagactaattttttgtatttttagtagacacggggtttcaccctgttagccaggatcgtcttgatctcctgacctcatgatccacccgccttggcctcccaaagtgctgggattacaggcgtgagccaccgcgcctggcatcaagtttgattgtgagagtgcagcaattcagtcacatgtccaagctccactcctagttcttttgctgttttccctacatctgcagttacttcttgaacccctcaaagtcacccatgagggttagaatccagttcttcaaactcttgttcatgttgataatttggcctcttcccatgtgaattcaacacaaatgttcttaatagcatctagagtggtgaagaaggttttcaatttactttgcccagatccatcagaggaaacactgtggcagctgtagtcttccaaatgtatttctgaaataataagacttaaaagctgaaacgactgcttgatccatgggctgcggaatggatgtcgtgttagcaggcacaaaaaccacattcatctccttgtatatctccgtcagagctcccaggtaacaaggtgcattgtcaatgagtagtaatatttttaaggaaatatttttttctgagcagtaggtctccacagcaggttttaaatattcagtaaaccatgccctaaacagatgtgctgtcatccaggctttgtttttgcgtcctagagtacaggtagggtagacttagcatcattcctaagggccctgggattttcagaatggtaagtgagcactggcttcaactaaaagtcagcagttgcattagcccttagcaagagagttggcctgtcctttgaagccagaggtttacttctcctctctagttgtgaaagttagatgacatcttcttccaacagaaggctgttttgtctacactgaaaatctgtagtttagtgtggccaccttcatcggtgatcttaactagaccttctgcgtgacttactgcagcttcttcatcagcacttggtactttgccttgcacttttatattatggagatagtttctttaaacctcatgaatcaacttctgctagcttcacacttttcttttgcagcttcctcgcctctctcatcctgtgtagaattgaagagagctagggccttgctctggagtaggctttggcttaagtgaatgttgtggctggtttgattgtctatggagaccactaaaacttaggctgggcacagtggttcacacctataatcccagcactttgggaggccgagaggggcggatcacttgaggtcaggagttcgagaccagcctggccaacatggtgaaactccatctctactaaaaatacaaaaattgagctgcaacaatagaaagatggtggagcaagaacaaagaaacaatccctttgactgggcgcggtggttcatgcctgtaatctcagcactttgggaggctgaggcgggtggatcacctgaggtcgggagttcgagagcagcctgaccaacatggagaaaccccgtctctactaaaaatacaaaactagccggacgtggtggcacattcctgtaatcccagctactagggaggctgaggcaggagaatcgcttgaacccaggagacggaggttgtggtgagcaaagattgcgccattgcactccagcctgggcaacaagagtgaaactccgtctcaaaaaaaaaaaaaaaagaatccctttggttccagaaaatctcctgaaaaagaggaaggcttattaagccttcagagctacccaggcaaagcaggtacttttggcaaagaggaacaaaggaaaggaaaagggctcaggtttaagggactggaatcctacatgattcctggcggcagaaacatgacaaggtgggtctcagacgactagaagtgaaacctcatgctttggaattgccagataaacattccttggcctttcttgtacgtatcaaaaggattgatggtgtggccgggcacggtggctcatgcttctaatatcagcactttgggaggccgaggcgggcggatcacaaggtgaagagttcaagaccagcctggccaacacagtgaaaccccatctctactaaaaatacagtattagctgggcgtggtggcaggcgcctgtagtctcagctactcactcgggaggttgaggcaggagaatcgcttgaaacccggaggctgaggttgcagtaagccgagatctcaccactgcactccagcctgggcgacagagttaggctctgtctcaaaaaaaaacaaacaaaacaaaacaaaacaaaaaaagtttgatggcgtgtgagtttactggtgcagaaaaccattgcaagattttgcctaaagaaagtttttagtggtgtctttgtaaaagtcaccccctgctgcatgtaatgggatcttatgtgacctggggatttccaaatctgaattttctctgggaactgattttgaaacgtggtcaaggtcaagaataagaccatccctctgacagacaacacagtggttgcggagcacctggggaagtatttccaggagacttcatggttcttgcgtcgtttccacctctcagtggcccatcatgctaccaaaaatagagtgggcttcctcgagatgggcacacctggctatcggggtgaacacgtcaatcagctcatccgccagctgaactagacccaggtgccaaactgcagtacatttttatcagtgaagtggaagcgtgtgttttgggtttttttggggaatttttatcaagtatcttcagagaagattatttcctgcttaatcttcaaaaactggaaaggaagggtcaaagaaaagacagtagcttatgtttatggcgggcacctctcatcacagtcattcccaaggaaaaattccagagttttctacattggcagctgcctcgtctaaatcaacacattccatgtgcatcttctatccttgggtttaatgttgctaaatgagtaactctagcatttgtacaagaccccctaagactctggcagcagtcgaccaagcccagggacataattgaatctggagattcctgaggccttgttttgaaaaagacttgaaatacacataggaagaaaggcccaaaaataaatgttcacttgtctctgcaaaaaaataaaaataaaaaataaaattaaattaaaaaataaaaatatgaaaactagctgggcatggtggcttacgcttgtagtcccagccactctactcgggaggctgaggcgggagaatcgcttgaacccgggaggcggaggttgcagtgagccaaggtcacaacactgcactccagcctgggcgacagagtgagactctgtctcaaaaaataaaaataaaaaaacttttcatatcagcaacaaggctatttcactttcctatcatccatgtgttcactggagcagcacttttaattttcttcaagacatttttcctttgcatttacaacttgagtaactgcacaagagacctagcttttggcctgtttcagctttccacatgctttctcagtaagcttaatcatttctagcttttgatttaaagtgagagacatgtgactcttcctttcacttgaacacttagaggccactgtagggttattaattggcttaatttcaatactgttgtgtcttggggaatagggaggcccaaggagagggagagagatgggggattggccagatagtggagcagtcagaacacacacaacgtttattatagtttaccatcgtacatgggcacagtttgtggttccccaaaacaatttcaatggtaacatcaaagatcagcgatgacagatcaccacaacagataacgacgaaaatgggtttcctaataatgcagaggtttgaaatactgcaagaattaccaaaatgagacacacagatgtgaagtaagcacatgctgttggaaaaaatggtggcaatagataaagggttgccacaaacctttaaattgtaaaaagtgcattatccttgaaacacaatagagtgaagcctaataaaatgaggtaggcctggattttttggatacttgatagtatctaagtttcttctcaaacacagcaaacatttcacagttcaaatttgcccatcggtagagttttctctgtggatcttctctgttaatgccacatctgtctagagtaaaagttcaattcaatattgtgctatcaacttagcaacttgttgaagatgaactaacataagtacatgctgtgtgtgtgttctgtgtgcagacacaacacaggtgagctttccgtaagcctggatcttcccaatggcggtgcttctcgtgtgcaggccaactagggagaaggggacactggggcccacccggagctctgtgggccttgtctcttgtgacaaggatattttgctccttagctcagcagagtccaggttcttgtctcaggactgggaagaagtaggcaggcggacacttggagagtgagtggagtagaatgcactaagggaaaggaaaacttaaaggaagggtcttgaaagcagattgtggttctcccttcacagtggaatacaagggcttttatatacctgctgatggggctgcgttccctatttctgtaagcgcgaattcctggcggctccacccgtccttccaatgcagacgtgggcccttagtctgagccactctacattgatttatttcccttactgcgcatgtgttaagggacagaacttttccaccgcaagcatgtttgggcaaggtccctgggcacgacgaccttggtgggtcagaggttctccggggaccctcccctgtctaccggggagagttctctgcttcctgcctccatctactccccagtctgcagtctggccctcggtggtcctgcagatctggtgttgattttgcagggtgtttggaaaggtacctgcgtattttcatttatggaagtgactgagtgccgacgaggagaggttaatgcccttgagaggagaatttattacttcatcacctaagagaagggggcacacccctccatgcagggcacaggggaaccaccagtgtgggtcaggaggcagaaaggagccagagaaaagtgtgggtgggaaccttagtggggcttcctcgggaaaggcagtgcgtggctggtttgaataatgatggtgggctttggggtggtctctatttgcctggtatctggccctgggatgttttaaggcagggaaaatactggcttggtgtgtgttagagaaaatgggcagctggcttacttccaagttctttactaaattgaggaattagctggtcttgggagaggcagtgtctttctgggtctgtaagtccctggaaaatgttaaagtatcataagataaaaaaaaaaaaaatttaaacctgattaatacactgtgaacctagaagtaaccagattttaggaaactgacctatagtgagcaaactcacagggattgatagctaagccagaatatgcatttattagcttgaggggaggaatgtttcttccagtgaccaaatctttaagtctgccctccagaatattgactaaatattctgccatctagaatggaataattaggaaactcattagtcaccttaatttcaaactagtttggtttatgtggtaatcagagcaaacggtgacgtggtgtacctgtgccgcgcagggacttggtgaattaatctcttctcccagaacgccccacaagggccaccgccgtgccttcccttttctttgcctctgcgctgctgttatcttcccacagaaaggccccctgcagtcgattaggcttcagctacctaaacaataggcacagacccaaacgatgtcaaactacagttttctcctgcccttagggtggcactcaggccactttgattggaattttgagtgtccccaaactctggttgtactctttcacagatgggcaattacagtactgctctgtggagttttaccagtatagctctcagaaattcctaagaattttctatttcttaggttacactctctatagtacatacactcagacagaaaaatatatttcacgaagagagccttgaaaaatctcatctctagtcccagtgatgccttaaactggttgtgtgaccttcgtaaacctcagttttctttgttgtaaaatgaaaggtcggggtcggtgacctctagagtctatcccacccctagcctgctccgagagtgattgcatttggcacaatatgcagtttgcttcgcagcagtagcaaaatgacacatgcaacttattatcatcattgtctatcttttgatttccttgagttttccagtctcattaggggagacatctctggcttatcgcacaatgacatcgtgtcttgtaacttaatttctggggacaacacattgtgctgccacaggcacagtgctaataatcaaggttgtctgttctgcttactgtgacttttttgtggtttctggagaaaaaatgcagatgcttttcaattattctaagggaattttgatgaaccccctgggtagagttccctgtgccacctgccatgagaagtgagttttatcgaacagaaggtagggaattgaattgctcatatttgttttctttctggtacctatagtattatttcaagctcaagcattttaataaatatttaataaatacctgtctaaaataggccaaaactgtcataaactaaacctcttttcttcttcaattttaaatgcaaatgagttaatttgacttttagtggaatttccaagataaaggcccatgtttttcctttatgtatccgaaagttatttttgatggtatagtgaacgtcctgcttactacacattttatgtattagcctttggaagcaaattccttaagtttattgcaacgttgctgcttttgttgccattcttataattttatgtatttactgtttctctctctctctctctctctctctctctgtctctgtctctgtctctgtctctctctcatattgagacaggatctcactctgtggcccaggctggagtgcagtggtacagtcatggctcactgcagcctcgacctcctgggctcaagtgatgctcccacctcagcttcccaggtagctgggactacaggaatgcgccaccatgcctggttaattttttaggtattttttgtagagaagggattttaccacgttgcccaggctggtctcgaactcctagtctcaagcgatcctcccaccttggcctcccaaagtgctaggtgtgagccactgtgcctggccgtatatgtccattttgcaggccagaattctttgactgtttgatttacagagaattttcaaatatctgcctctaaggacttttgtagcaattttattgagatacaattaacgtataattcacccacttaaaatgtaggatccagtgggttttgtttcttgtttttgttgtttcttttgttaagagataagcagcaaatacatttttagtataattatgtttcattcaatatttgggacatatgctaacacttgttattattagcattattattagcattattattcaagctgaggtctcattctgttgcccaggctggagtgcagtggcttggtcacagctcattgcagccttgaactcttgggctcaagtggtcctcctgcttcagcctcccaagtaagtgggattataggtgcaagccacagcacccagcgattcactggtttttagactgtccacagagctgtgctgccatcactgtaatattttaaaacattttcatcaccccaaaaagaagccccctacccattagcattcactcctcaccccttccacccctcccgcctgtggtagccactgatctactttctgtctgtgtatagcttattctggacatttcttaggaaaggaatcatacagtatgtcgtcttttgtggctttcacttacatactggtatccacattgtagcacatgccagtacatcattcctgtgtatgggcaaataacatcccattgtatggatataccttaacattttatttacctgtcagttggtgggtgttggttcctgtcttttcggctactgtgaataatgctgttatgaacattcatgtacgagtttttggggcgacaaggttttaatttttcttgggtgtatacctagaagtggaatttccaggtggtgtagtaactctatgtttaactttatgaggaattctcacactgttttccaaagtggctgcaccattttaccctcccaccagcaatgggagcgatccagttcttcccacatcctcactgacactcgttattgtcttttttattatggtcatcatagtggctatgaagacaggcttgtttttaaatattctctatgtagtattctgctttcttccctagaaatcataattaatgcagaagtagcccaaattgtgtatgttaatttgttttatttttttaaaacaaacttgaccccccaaaagcaacaaagcacatacatttcagttaatatatattttctaggacgttattgtctcttctcaaatgagatgatttcgatatgaagcacagagttcctttcattttcctatgctcattctctctctttttaatggtatcacatactgtgcaggaaggtcattatataaggagaggaaaaaagaataatcagcatagaagagaaaattaatgctgtttgtgtaatttttaataggaatgttgtaaaattttgagatttaaaccaactactaatattttttatacattactgggcagtttcctcttgttgcctgtgaactgatactttgccttggaaactcagatagtaaaaatatttgtcaaagcttcaaataccagtgttttaattccttagtcatttagatattaatcctgttctggagaccacctacatgtgtttgtaagggatgtgataactgacactgtatttaattagcactaatattgtgaaaaaagcaaaacatattaagtatctttccaagtcactagtttgaaattagcagaagtgaggaagagaaagtcctgtccaccccccacccttagtttgcatacccatggaagtttgtgatccatttactcattcatttatccaagtatttgataggtacatattttgtggtggacaacattccaggtattgtggaaatggaccaatttcaataggacagaaatctgaatcacaaataagcatccagtggcaaccagctggtgtacacactgcacctaaatacaaattcataggtatcaaaatcaccttcatgtgtcacacagtcacctttcttagttcctcatagcaaaactgggggactctgaggtcagtccccagagtacctggttgaggggtggggcagggcagttgaataagggagtagaatgaatgaaaactttagactctgaagctcgtcactttattctgccatattttagttttgtggtattaaatctctacagaaattaattatcttgcttcctttcttgaattccttttcaaatgttatagttactacttcagtaattctatcccatctgtttatatacaaaaggtaatttaccgggtaatgaccgagggcacctgctttaaagtcaagtgcatactaatttactggctatttgcttggcctcatttacgctctctcggcacagtttctgggtctgtaaaatgagagtgattgtaccatctacctcattggcgacagtgagaattaaatgagttggtgcatgcataacacttagtacagttcctggcacaatgttaccactcaataactagcagtgtggaaatatttcacacctaagagtaaagttttatttacctttaggagacaggatcctgggaactttctggttgccatagctgcttcctcaaggcaactaagttagatgtggagtttctaattcctgttggaaattcagtgaataagaaaatactactgaaagttatactattttctgcatgttaatgatttgatattatacagctttaagttctcagtgctcattcgggtagtgcaggtgagagacggcggctttaggggcaaggcagtgaccctgtggatgatgggaagagagttgttaagaaataattgtttaaatcatccagagagtactgtagcaaggattgttcctaaaaagaactgtggtaatccttgttgaatagcaagtttggacagtatacggtagggaaatctcaggaatactataaacaaataaaatgatggggtgagccctatgaagcgtgtgttctcctgtgggcagtggcagagttacccttcacccctgagtcctgatttctcagcctcttcatgtgactgtctccttggctcctgggaaagaaagaagcctctaccttccctggattgaatgcagcccttcttgtcccgtctgcagagcatgaggaacagctggccacctgcacctgacaaggcctgtggccgcgggcagtacccagccctgcgctgacggccgctccaggttgttgctggatgtggcgagctcgagctaatcgggccttttaggcttttgtttcttagcaaatgatcagctgtgaactgcccttggcctaacttggccttgttagctcagaagcccgcaattcattgcattttaccctgaagaggaatggtaggtctgaggacatatttatttttctgtggattttttttccccttgatccaggaaattgtctgtcttcaacaacctagtcttgtctcctccagagaaaagttttgaatcctctgaggagcggtctgtcgccattgtggcctgtggtcagtgggtcagaccagagccctgacaactgtctcccttcctgggcccaagtggacaccagaggagtttggggctctgggatcagcctgctctggcgagtgtcctttccctcccactctggaactgtagcttctcagccctcttcttgatgctgggcgggtgcctgggaggccccaccccttccctgggtacctggggaggtccccgactgagaggtgggaagacctgtgtcccctcccccagcacactctcagcctctgacttagttctcataggaggaggcaacagcttccaggagctgctgctgttaccctcgacgccatgatgaggaggaaattgcctggtcaggagggctcgcctgcctcttcacagccaggcgtactgtagcggcctcaggagcggtcaccctgggagtgactcctcacctcctaagcagccctggggcatgaacactcgtcctggaaatcctgctaggctggcttaagggagttgcttctagcatgcctttctggataagcctagtagaattgctttttctactataaaaaggaaagaatggggctcctcatattatagtaacagaattcttggtactagaactggtaagccaagagaaatggaagctgaccaacttttctctctgcacagggttcagagggatagaaacacacaatttgactctgcatgcaccagaaccttctcactcagggtaagggacagccacagtttctgggacgttacctaaaaacacaataatcccacttattctctgacagataatcatcagtcatagccccactactcacttttattaaagaaatagctgggcccttttaggtaaagccctttatatactgggaaaaaaggtcatgttatccattcctcaaatcccaggtaaactcctgctggttactcaaaaataaaaaccaaaatgaaagcccattcatcacagggatgcctaatcttgtaatgagggaatcactgagtgtggcacagggaagactcctgagagattctgatggggtacaagtgtgctgaccaacgtcctagatacagtgggcccttgaacaatatgggggctagggatatcaaccctgtgcagtcagaaatctacggataccttctgactctcccagaatgtaactgctagtagcctactgctgaccagaagtcctaccaataacatacagtcatttagcacgtatttggtatgttacatgattatatactgtattcctgcaataaagtaagctagagaaagtgttaggaaaatcataacgacaaaatatatttattattcattaagtggaagtggatcatcttaaagatcttgatcttcattgtcttcacgttgagttggctgaggaggagggggcttgatcttgctgtctcaagagcagcggagtcataagaaaatgcacatttaagtggccccatgcagttcaaatccatgttgctcaaggctcaactgtacaccgaactgaaaaatgattccatttttagtaggaaatggcctactctaagtcctactgcttccctttgcacttgatggcaagggtctttaactgtgtcagtggagctggtttggctccactgatagagactccctgaccatctgataggccacttttgttagaggagaaggtacccccttgcctacctgttcttttcttacttcatgggtcttgattcctgactcaggagcacccattacagaaaagccctgggactagatctaattttatttaatgaaaaacctatggagcatttactcttgcttctaataaattaacaagtcagggctttcttctgaataggagggtctcttgactctttgatatttgacttttgaaccagactagatgaggcagagcttcagcacatattttaccagtgtcttcagcaaatgcctttctctttgcaaagctccatattactaccaaaaattaacccaactaaattgtaatttctactcacccacatttattgagtactgtgtttccttgaaagatctcaaacaaggcaccttcttgcaagatcttcaccaccagaccttcatgatagtcacctcctcattaggctgagacgcatacacagtgattacgttcagacacagggactcctgtgtcttaagaccttgtgtgacccttgtaattaaagcattacactttgcaaaggctgacagtggtataggggctgtctgaaactattcagccatagcctggtctctgctttctttttacaaatgggaggttggctaaggcagacacagggatggctaagagggataaaggacgtgacttccatagaaccttttgttcctagaggaacctctccatgaaacacacagtgaaactagattaaaccaaaaaacgccctcagctccagcagatcctgagctacaaagcacctcttccctaccgagccttctcacccatgcgcactgagtttctgagtatcagaaagtcaggtttctgaatccctagagaaagtaaaaatttccttggacacaatgggttttctttgcttcctgcatgacagtcacgaaggggaatctgaaatagagaacttgaatatgcggcttgctgaagggaagtgtactgtacagtagccccccttctccacgggggatccatgtcaaaatccccaggggatgcctaagactgcggatgggaccgaaccctgtatacgcttgcctttaatgccttttccatttcagctcggcacttagcccacactgtggctgtaacttttgtagttttaggtacagcagcaaaactagcacaaatttctttgtcctttttcacaatttcatggatagaagattgattcttactgtagatcttagcaatctcagcatacttttttttttcttgagaactttcaccttttaactaaaggaaggacttcatggctggtttttggcatatccagattgccagcatcatactcttggaactttgaggccattgtgaagtcaaataatagttcctgccaggcacagtggctcacacctgtaatcccagcattttgggagtccaaggcaggtggatcacttgagctcgggagtttgagactagcctgggcaacatggcaaaactctgcctctacaaaaaacacaaaaattcaccggtcacggtggcacatacctgtagtcccagctactcggcaggctgaggtgggagcatggcttaagcccaggaggtggaggttacagcgagccaagatcatgccactgcactccagcctgggcgacagagccagcctctgtctcaaaaataaaaaaggaacctaagcactgagaccccctgacagtagatctggtaactgagatggccactaagtgactggttggtggtgggggtgtctacagcgtggagatgctggaccccgagagagagggtttatgacccaggcaggatggagcaggacagcacaagatctcctcacactactcagaatgactcacaatttaaaacttatacattgtttatttctggaattttccatataatgtttctggaccatggttgaccacaggtaaatgaaaccttggaaagctaaaaccttggataaggggggactactgtaatataaagtttacagttcctggggtgaaagctcaggcagaccctatctatgcattattacaacgtaccatcaattcaaaaccataaatttgcagaaacatcgttgctttaattcctaaaatattgaatatgaataataaaaataatatatgctttgtcttagaagcacctttttaatatgattgatgtgtattgatctgtttcttcattctaacatgaacatttctgtaacagtcatttcccctgaaatatctaacctgtgggtacctgagacagcttgtcagttaggaagaacagtggtggcgatagccacgtagggctggtttggtcgtgagtgcaagtgtggttgcagcagctagagcagaggactgtgtggagaacatgggtcaggtcagaaggcagtagccaggagggatgcagagtcgagagagaatttgttgattggaatgactcaggttgactttcaggatgaagagaaggggccaatagagagggaagagaggacagttgatgaggcaggctccaagagaggagggcaaagcgagatcaggggctccagtgaaatgcctgagtgtgatgagaagagcgctgtcttgtgaggctagagagggaaccaaggatgggtgggcctgggaaggctggagaggtagcctgtcagggagctgctaacccacttagaaatactcttattgacataacaaggttttttgttttggttttttgtttgtttgttttgagagagcgttcgctcgttccccaagctgaaatgcaatggtgcagtctcagctcactgaaacctccacctcctgggttcaagcgattctcctgcctcagcctcccgagttgctgggattacaggtgcatgccacgggtgcagtggctcacgcctgtaatcccagcactttgggaggtcggggcgggcggatcatttgaggtcaggagttcaagaccagcctggctaacatggatataacaaaattttctatttcaaaagttcagtcgtgggcacaagttgattttgccttacagtcttgatagtgaaggtgcatactatttttaaagctgtattccttagatactaccatattatctaatgtttctaataatggaattagcaaaaaatgactacatcatccaaatttgactttgtactaacatacttggcgtactccatatccctgaaggttaacaagagataaatttggcctagactggtcttttcctgaattcatcacttaaaaaaggaaaaaaagaatggggaggaaaagccacgttttacttttataatttttattccatcattaaaagtacaacttgctttatgatctgaagaaataccatctaagtctttctattaggaacaaaagtgagcctttcagggaaaaaaaaaaaaggagctgggcttaatctgcattagccctttgatgtattcccagattttaaaaagcttcccactgttctcagccacgttgaaacagacccagccatgtgtccggcgctgtccttttctcctctcagcacacacttagccggagacaccttttggccaatgggccaggattcttccattgcatcttcagcatgtgaccgtttgtgctggctcattgggagttctgctgctcagtactccttccccaggcaaagactcttaagttaataattggttcagaagaataaactataccgccctcttggtcttcttttggacatttctttaagatgaggctcttactggtatatctggggtactttattgagaaatagaaagtgctagctgaaataaggcgtatcagtctagagttaggaagtgagaaatgcaatcggtaaattttgcttttaaataaaaatggaagccccattttaattgttgccatttctagtcattttatcatttttaacagcctggttttctattttagagaagttgctgaccaatatttagagagcacctccctaatctgcacatcctcttgtgtgtgatggtgaagtgatgggttggaatcgtttttaatgctgtttccattgatgggacattattaccagaaggagtgctttgtgccagctggtttcatggatggaggaaaacaatctgggtttcagtttcacaaatagaaaaacaaaacctgagaggaaaaggaagtaattcgttagcagtggccactgtgcagagtaggataacctgccttcaaagatttttgtttcatgcactataatataatgtttaataaatactttacttcaaagaacctcactacaagaaaactggccgctttcctgctattcttgttctccggctcagtatgactataagtagctcatatccggtcctctgtggtctcaggtggtcgtttgtgtttatgatccttaagctgaaactgtaaggactgtgtccctattttaagtctttagcagatccaccgtgttctgcaggaattgacagaggctctcgtgaaacccttgacactttgacccatcttgaggaaaatgcttagatgctaaaagcagtgtgcatagggattacgtcctccaaaaatagaaaactctaaatttactaagcagggagtagagaaactcatcagactgcacctcaagtttttgatgtgttctggtcgcctctgcactcccattctagacttctaaacaacacgttcaggatctctgagataaaagctggactgaagttacagaaagagcattagagatgtttgaatttttcttttttcccccctgtagatatatttggcatatgtagaatttgagagtccactattgataccagtttcttccagatattaacacatatcaaatagacagctagaactcagaagaaactaatggagctctgaaagaaaccattgttttttccactataaatcttaactcaacagcatttagggtctgggtggagccagtcacctgggcagctgcttcacacccattttgaattagctgcccagtgcttctggtgagcacctcggtaggagccactgctgtgaactcttttgcaagttctggtggtgactggtttggtttttattgctccctgtttgatgcactgataggacctagggctgttcttagaaatataggcctgagacgacttaaatttcacactggttttgtcttccgtttccacattcctctcactgactctccctcccttcctgccctctctctctctctcatatgaaatgagtttaaaatcagaggggaaggattgctttaatatttagcagtctaaacagagggggacagggctgaagaggaggaagggagtgaatgggtgtagaagagaaaagctgttcccaccccattgctttaatgacagtggaaagggtgcatggattgggcctgtgtttctctatcagctactttgttctttaaagcactggctagctaagccatctctttctctcccatattttgcctctttgagtgtttgcctagaaccacttagctgtggcagccctgctgatggggcaaggtgctctgcaagtttctaggcaaggtttctggatccatgttgaaattgaacgcagatagcacaaccatattataacagctacttacaaaccagtcagcacatgtgtggtgagcatttctagagttgagttattgcttaggtcaattgtaagaggagtttctctgaaagagttctgctctttgaactggcaaccccaactctagaacttacagaattgtttttgttaatttttctggcaagagattcatccaagtttcctaaacgtactacaagggtatatgtatacagagaccttaaggaatggccagccatgcaaaccctagggaacatcttatctgacagttcttgggatccacagtggcttgggtcataatgataatactgtaactgggagagctgatgtatatggagcactcagtatgtgtgaggcaccatagattctctcttcatttaatcttctcatgagaaatacagacgttaaataattttcccagggtcacataagctggtactaggaatgaggcttaaagcagggctctctaagaacaaaagctgtgatgccttagcatcattgacagcagctcccaggtcttactcatcctagtgcagtcccgttagtctacctgagctccccctaacacaggagttggcctctgcccactggggctttcattcccactaccacccacagtttctgcatatggcaggtcggagcccatcgtagtgtcatgagccattctctaaaccaccgtctgcctgaaaactgcctcattctctgtcattcctgaaggaaggactctggctggcccatctcatctttactcacctaggtgttcaatggatcactgggtaatctgagggttgatgttcttctttagtctatcaaccaatcccagagatgggaggcagggcttacataacactgtaaatactgccacctgggatgacttctgcgggagaagtactgagacccaagtccaccatgggaactaactggataagtttccgaagatttatgtcagtaacattcaccaccgtgtcctttgtattcacaaaataattagaaactacctgactgtccatcaataggagtttagttaaagaagttttgttgttccatatggcagaatattcatatgcagccattaaaatagtgatcaggtaaatgtttacaaacatggaaagatgcaatatgaactatattgtaacatgaaaaaataaagttaaaatggcccgtgtaggatattgctttgttttacaaacacaaagttgaggctgggtgcagtggcttatgcctataatcccagcactttgggaggccaaggcaggatgatcacttgagcccaggagtttgcgactagactgggcaacctagtgagacctcatctctgcaaaaaattcaaaaagtacaataagccaggtgtgatgatacatgcccatgaccccagctactcaagaggccgtggtggcaggatcgcttgagcccaggaagtcaaggctgcagtgagctgtgatcgtaccactgcactccagcttgggtgacagagcagagagactctgtttcaaaaacaaaaagcccccacaaacatgaaaggcttaatccaggactagtaatagttgccgaacttgagcggaattgtcttcatgctcttatgttagcatctgatattttataatgagcatatcccttatagattcagcaatatatttgaaaaatacaccaaggtaaaggagttgtgctaattaaaagtagctgaaatgaaaaatattgattattgaggaagaaaaacaatgaaagtaagacatagaggcctcagcagtattactgataactcaatcattgttacctgtataatagaacaaattaagggcagaggttctgaactgaagcagtgttattactaaggtgcttgaaggggggaacccacatttctttaatagcaacactccaggtttctaacatctggaagtatcacaccatgaattttttttaacccagaaaaactgggaaaaacttcaaatcactgaatgacgtgttaaccaagtttctgactttaagactttaagattattgactctgaatttacatagaattctaagaatttcagttagttgattgtgtgtgtggtgtgatgtttaaaataagtttgggaaatgctgggttaaattaatattttttatttcaggatgtctcaaaatctttactaagtggatgtctgttttgaatctccaagatggaatatagaatgcagcatttctcaaatggaatttgaccactgagtccttgttttctttgggcatgtactaagtagcctttcccagagctcattttgtgggataccataggaaatgctgcgatgggaccttttaattaatttattttttgagacagggtctccctctgtcacccaggctggagtgcagtggcaggatcatagctcactacagcctcaaaactcctgggctcaagcgatcctcctatctcagttcactaagcagctgggactaccgaagcacaccaccacagcctgctaattaaaataaaaaaaaaatgtagaaacaaggtgccactatgttgcctgggctggtgttgaactcctaggctcaagtgatcctcctgcctctgtctcccaaagtgctgggattacaggtatggccactgtgcccagccatatatgtatatatatatattttttaatgaagccacaagcattctgcctctgtgctttttatttatttatttatttatttttgagacggaggttcgctctggttgcccaggcaggagtgcaatggcacaatctcggctcaccgcaacctctgccccccaggttcaagtgattctcatgtctcagcctcccgagtagctgggattacaggcatgcgccaccatgcacggctaattttgcatttttagtagagacagggtttctccatgttggttgggctggtcttgaagtcccgacctcaggtgatccacccgcctcggcttcccaaagtgctaggatttacaggtgtgagccggccgaccctatatattttttaaaagcttttaagaaacacagtaatctttgagttgagattttgaaaaaaattgcaaaaatattgcacattagcattttaaagttagtggaggctgggcatagtggctcacacctgtaatcccaataccttggaggctgaggctggagggtcgcatgagctcaggagtttgagaccagcctgggcaacaacatagtggtatcctgtatctacaagttttgtttttttgttttgttttttttttgttttttttttttaattagctggtgtggtggtgcatacctataatccagctactcaggaggctaaggcaggaggatcacttgagcccaggagtttgagcctgcagtgagctaggatcgcatcactgcactgcaatctgggcagcagagcgagaccctccctcacaaataaagttagtggaaagtgctatagtaaacttttcccagttttcccctaatctgttttaccatgggccactcccttacccccacttttattttttttcacattagctattaacatgccctgaaagtaatgttccttagaattccatcaggcaacactactctagatcagatctgcaaactacaccccaccaactgtttttgaaaataaagttttggctgggtgcggtggctcacgcctgtaatcccagcactttgggaggccgaggcaggcggatcaccaggtcaggagatcgagaccatcctggctaacatggtgaaaccccgtctctactaaaaatacaaaaaaaaattagccaggcgtggtggcgagcacctgtagtcccagctactcgggaggctgaggcaggagaatggcgtgaacccgggaggcggagcttgcagtgagccgagattgcaccactgcactccagcctgggcgacagagcgagactccgtctcaaaaaaaaaaaagttttatcggaacacagccatgctcattcctgtatgtactgtcagtggctgctttcacgtgactgaagcggaactgacagtgtaacatgcaaaacaggtaagaaaagattgaccatctagcccattgtagaagaaagtttgcccacctctgacctagatgattagtcataggtagttgcatttgcaaattgactaattttctttttacactccagcatgaatacatgcaattgaacagctaatataggtgtgtgtatgtgtgtgcacatatgtatactaaaatattgtaaaatgtcaagtgttgcaaataacattgttaactgaaagtgacggaatggccggccaaatttatatttattgtgtcaaaaacaaaatgtaccagacaattaagataattttacccaggccactgcagtaggggtaacgtttattaatgagaaatgtctcagagagaggaagaactagggttttataaatgcaggtgaacaagggaggggtccaagaattacggggttcatgaagaagagtggaagtctatggggaaggttgctttgcctccagccatttcctgggttaagaaagaggaggaagattctgtaactgtttctgtgttctaggagcacggggctcagggaaagttcagcattgtcagttgtcaacaaaatcagtaagtgttattaaataccccatggtgtgtggttctggcactgaaatggggctgtttcctaaggctctgtccatggccacctctgtctatttctgcattctgtcttgcattgcttctgttgcctatatcctggtcagcacagtttatggtgaatcattgcttattgaaatagagacggcaataatgaagccagctattataaattagagcaaatatacacatccaatacgttttaaacgcatgtgatctctggagtagtatcactaggtagcttccatttcagttcgcctttggtatattactgtactccaaagaatatcatttttccctctgtaaaattttcctcatgaaaatggtcaccataggtctgatttactttttggatcagtaacaggtcacagcataaatcccattcctgcatcaaggcggaacaagaccctcacactttggagggagctgagttcctgtttagaagaacatgcacagttagataaatctgttcacacggcttagatgatcagagccaacatctgatgactatgagcaaggcacttttctaaacatttttagtattttctgaacagttttgttgaggtatactttacagataacattcacctcttgagctgcagttcaatgagttctcgtaaactgagttgtgcagccatcaccacgttccagttttagcacatttccatcaccccaaaagttcctttctgcctgtttgcagccaatccctgctccctggccagccacaggcaagcgctgtcaatgtttggacagtgttggattacctaatggactcttcaagacagtcctttggggtgttactgtcattctctgttttacacggtgaagaagtgaggcactgagggcactcagggtggtttcaaatgaccgaggccaggtgctcagggcccagaaccctcttaccccctccaacttcagtgagcttcaaaatcacctgctgagcttgtttgaccacagacttgtgggctccacccttgaattcctgacgccctaggtctgggatggggcttgacaatttgcatttgtaaaaagttcctgaatgctgctgctgctgctggtcagggaaccctgctttaagacctcctggtttatgcaatttcaaacattgtaagaaatagtcactcatgtgattggtttgtgtgcttggtgtagactgtacgaggatttttcaaaagtaagtattgttcattctaaaggaaggaaatgtatgttatgagatagaattatataataaacagaaccattaaatgccatctgaaaagtggtgttttcaatggcaggaagtagcattgctgcgtattttgtgtgtgtgcgcaactcagctttgtgtcattgtgtaactttaatttgaaagaacatcacgtgactgctgttttcatttctgccttttaaaaagcagacagctattcagaacagcaagaagcagacccaaactttgtttgtatgcccctagtcataggcaaaaatggaaagggtaatttaccaaaaaagaagaaaatagataaaaaggaaaagaatggaaagaaagtactgactcactgcaaacagctgcaaaatgttgcccttgggatagaggttaactcggttgtgaaataatggccaaagcggtgcactcttaataacttttttgtagccctggagaaagcttctggattgactgtgagaagcttggcagaaggtgctgcggcctggtggctggctcagcaggaggcctgggattgaaagctctcggtttgtacaagctcttttggatttgtaacacttttattttaaatctccaataaatgtaaatattttggtccctttttttctctattttttaaaataaaaatattttagtgaatatgagttaaatgagaatcaagtggcttctgggcctccctgaaagatcaagtggaagcactggatgactctaatgatgccgaattgtaatccataaagcacctgggcagagttcaatcagaggtcccatttcagaagttttttggaatgtagggaaagaattacttagaaaaggttcatctacttggagaggagatggttcaatatgacttttagaagaagccgcagtccctgccccacaggggctgcttagattgcttagatggattgtcatctctctctctttttttttttgggacggagtctcgctttgtcgtccaggctggagtgcagtggcatgatctcggctcactgcaagctccacctcccaggttcacgccattctcctgcccctgcctcccgagtagctgggactacaggtgcccgccaccatgcctggctaattttttgtatttttagtagagacagggtttcactgtgttagccaggatggtttcgatctcctgaccttgtgatccacctgcctcagcctcccaaagtgctaggattacaggcgtgagccgccgagcccggtggactgtcttctctctaagcagtaagagacagtgggaactgcagaagggtgtttgcagcctcatgcagttgactgaatgaattggccccagagtcacccctagcaccatcttgatatggacaggaggcagggaaatactgggtagaagagggtggttccccagcaaaggccccaccctcaagcctggaaatccggagccctaaatgggaacaggcattcccgtttttgtgcccaaatgttgccttttggctcaccacgcccccctctcctgtatccatataaaccccaaaccccaggctccacaagcagaagagtggcagagcagtgcagcagagaaggagaaaagaaaaggtgcttctgaacattgagaggagttcggctggggaaggtagcagagatcagctatgggatgaccaaactccaggggaaagatcatcttcccactctgtcccctttccagctccgcatctctcaccgagagccatctccatcactcagtaaaatcctcacattcaccatccttcaagtctgggtgacctgattcttcctgaatgctggacaaagacttgggtaccaagagggcagggcttacagggctgtcacccttattctccgctgagctgttttaacacgtagccatccgcagatggcagcttctaaaagagcattaattgtaacagacccccagacactaccatggggccagagcccaaaagtgctcaccccagctcctacacctgcccctgcccatctgcgtgctctccctcccataaggggtttgagcacgtgtcggccaagcaaacgagcttcacccctgtcacaagtcctgagaggagtcagggaactctcccatttcattctgacacaggtgggactcagcattctcagaccttcaaaggcctgttgggtggatgtggaggtgtgcgctgccccaccaagctgatgcctgatcaggggaggccactagaatagtctcttgtacagcaacagagcctcttactacagtgagcttctcctggggctttcagagtacgtccgagctccacaccaagaagagagccaacccacgtggatgcagctcggttcttagggctgacttgaaacttgataagactgcctcaagcatgtgccacaaccccagttcttgcaaacccccacagagtcttgagaaatccctcttgtggtccaaattggggaaatatagaattagtcaaaagaaaaggctgaagtcttggtcatctacatgcttgcaaattccagccttcctggcctgtgagtgttgcatgaatatagcaggaagtcagcactctccatctttcacaaaacgtgatgtgtttcagtccgtgcccggtgaacactattctccacctccctccctcccaacttgcttgctttcagcttctctttaaagtacaccttaaaattcaatctatcattcagacatagagagcagtggcatatgagaagcaaacatttggctgggcgcggtggctcacgcctgtaatctcagcactttgggaggccgaggtgggcagattacgaggtcaggagctggtgaccatcctggccaacatggtgaaaccccatctctactaaaaatacaaaaatcagctgggtgtggtggtgcacgcctgtaatcccagctactcaggaggctgaggcgggagaagggcttgaaaccaggaggtggagattacagtgagctgagatcatgccactgtactccagcctggtgacagaggagactctgtctcaaaaaataaataaataaataaataaataaagggcaaacttttaccaagttctcatctcttaagccattgtttgtttaatggagtagtagatgatgtgggttgttatctaacaagaacattgtcccttgtgggactgcacttagcattcaccttcggatgccatggctaggtcaggatgccagcctaagcagtcttgactttagatttgaaattccggccgggtacggtggctcacgcctgtaatcccagcactttgggaggccgaggcaggtggatcacctgaggtcgggagtttgagaccagcctgaccaacatggagaaaccctgcctctactgaaaatacaaaattagccaggcgtggtggtgcacgcctgtaatcccagctactcgggaggctgaggcaggagaatgggtttaacccgggaggcggagtttgcggtgagccgagatcgcgctattgcactctagcctgggcaacaagagcaaaactcaaaaaaaaaaaaaaattttgtaattccttcaacacattataacatgacaagtgcttcttgccttatctactagtgaagactctgcccggcccgctggcttcctaacagtcctgtggcggtctgttctttcctgtgtacactccttaaattgtgacatccctacttctggaaagctcaccatttcctatacccctatttgatttattttatcccaagacttatctcaaatcctccctgctcccaaaatcctcctctcactgccttagttctccctctgaaattccatagcatttcattttctcaacacagactcagagaaatttgctggtaggagggaccttagaggtgcgattctcaaccggggcagtattgcccccgggcatattcggcaatgtctggagacatacttggttgtcacagctgggagggagtgctatggcatctagtgtgtggaagcccgagaccccgctaaccgtcccacccaacacaggacaactccaaaacaaagattaatccaggctttcggctgctgttgggaaacttgtccacattaccaccacatacctggttccacaatttacctctacatgtgcatgttcctgagtaattgcacactttgtaatgtctcgtagcccctatagctagtctagttaatttctggtcatcatggaaaatgccacctctctgaaatggccagcactggagagacgctactgctgctgatggtgaatgtcaggggactactaggtgtcccttctatttttgttaacttgtagttatttgtaggatgattgcctttagtgcagaaaattttttttaagtttataaagcttgtgagaaaaatccttatttgtaaagaagctcagtattattttgaatgttcttgcttctcatttatgactactcaataaagaaaataccttttcctgctctgctgtccagtttgttgggttaatttgggagatagtgtcagcaccctggaattgtgccaacttccaattatcactctgtgtaaccactgacttcaatttcaaagtaattactgcagatttttctcactaccctgaacatagcctacacgcttttaatcctacacttatttttttccccatctaaaaggaaaacttattttgattttgatactttttaattttttaaaacttattttgaaataacttagacttgggaaaagttgcaaaacaataatacaaagaatgtccagataatttcacccagagtccgcaaatgttaacattttatcagggttgatttattgtgtattcctctctttctctctctctctctctcttcccacctccaccatctatatatgtaaataattggtatcttctgaaccatttcagcaaattgctaacagttcttaagtgtgtatttcatcgacacaggacaacattcccttatggaactgcaatgcagtactgttaccacaattaggaaactgacattgaaacagcaccattgtcttatctacaaacctttcaaattttgccagttttcctactctttaaaatgttttcaaattgttgccagtttactcactacaaaaaatactgtctttaaagcaaaagaaaaagaagtgttattttctggcccaggatccgctcagagtcacaccttgcattgacttttcctgtcctgttggtctcctgaatctcgaatcgttcctccgttgttctttggcttccgtgatcttgacatttttgaagacaggccatttattttgtcaaatggctctcaatttggattcatttggtgtttcctcacagtcaggttgttactcatttttggcaggaacgtaacggtggtgctgctgcgttgtcctcgttgtcccctctcgggaggcgcatgttcacgtttctctttgtcccactgttaatggcatcactttgatcatttggttcaggtggtgtttgtccctttctccactctgaagttactactttcctttttccatttatctggtaaaggaaatagacagttaagctggtaatttcagcataatatggtgagtgttaaacagacagccagggtgccttgggagccagtaagtagatgtcacccaacctggtagctcagggaaggcttctggagttgatgacacctcaactgtgacttaaggtaatgattatgagtcagccaagccaaggaaaatggggaggatactgtagaaggacatgataccatgaacacagccatggagccacgaaacttcatggtgtgttcaggtcgctacagtggctggcagcttgagttctaggatggagttcggaagatgtcacggaatcccagtatggcagtacaagtgcacttgttctcacgggaggctggaagcaaaggctgtgctccttgttcctcaaaagctctagggtctcttttgtctcttaattccatagttctctctcccctaattaacacagagctaaaaatagcagagaaatggggaattggggggaagattatagtcaaagaagtttcatcacaggatgcacagttaatttggttgcactggaaattggtttccttctcttagaaaataaaaatcatctttgcaaaaaattgtcacttctttttctttcacttttttgagggtgaaaattagtgaaaaatgaaaatatgaacaagttgtgcaaataaaactaaaaagtcaccgaatttggctttgaagtatgcatctgagaagcctactattctttggcttgaatgagaagtgtaagttgtggaatggtaaagcagtgtagcctctttgacacccagccaatttaatttttttttttttttttaattttagtggcagtaagtactgacttaccaaggcttggggtagcagatactatcacagctgccaggacttttccaggctcctgtcaagaaactgctgcaattctgcaagagtcttcagattaaattcatgccaagtcatttcctctgttcttctaccagtgaggtcacctttgcagctgaccattagtgatgctgtcagcaagaaaaggattatgaactgaggtctaaatttcagtgatgtctaggcaaaaataaatgttcaaaagaatttagcgaggtttccaagacctggtaaatttctccctaagagaaattgccagatttgtgggctcttgattttagcctgaagaatcacattcttcagcactggaagtttttccttctttttttacttttctttttttttagacacagggtctcactctgtcacccaggctggagtgcagtggcaggatcataacttactgtaaacttcgaactaccgggctcagttgatcctcctgcctcagcctcatgagtagctaggattacagatatgtgccactacacctggctaacctgtttttttgtagagacaaggtcttgctatattgcccaggctggtctcaaacttctggcctcaaagtaatcctctcacctcagcctcccaaagtgctgagattacaggcgtgagccaccacacccagcccaacattggaagttgtcatagttatcgccagttgcctctctttttgtctggagatgtgtaggttagccaaaaaaaaaaaaaaaaattaccgatttttttttattttttcattcacaaatattgaatgtcttctctatgtaccagatactattatgctctctcatggaggttagtactgtctactggagaagacataccaaaaacaagagagagagaaagaggaaagccacaaatcagttggaaacacgcccgtattagtgactgaagagcctgcaaatgaaagctttacaaattcatatggccaaatagatttccttgctccttgagttaaaattcacataacacaattaaccattagctaagttaaaacatacaattcagtgcatttattaacgttcacaacgctgtacaaccatcatctctctccagttccaagacgattcatcaccccaaaaggaaaccccatttccattaagtgatcactccctattcccccacctcccccagcaacccctagcctactgtttgcgtgtgacttcttccactcagtataacacttctgaggttcatccacactggagcatgtgtctggtctttgtaggtttattccactaccaaccatgttctttatgcttaaaataactcctccctattgaactgttttggagtgatatttcctggggtggaggtagtttaatgattcatctctgtcttgttagcatgcttgtttatggtagagagaaattttgtattctgccaccataccttgtcaaaaccttttaacaaggcattgatttggttctctggttctgagaacttggcagtggaagacaagacttccacccgcattgcaagcaaaatcattgatgtcaattcacgttattgtggaaaaccgtgagttgtgacaagtgaaagcttttcaccaagccacaaaactatgggcgtgtgcagtcaacacacggaacacaaggggtttgcttccgtggctcagcatagcactctctcactagttctaaaatattcatagcctttgctgttcccaaaagacgtttgaaaaataagacttctcctttgtcagcatccgcgctcacataactggtgaaactaggagatagttttgtatcccggaagataatcattgttccattcaggtgttgggcagagagaaatggcttatctgcacatctgcaggatgtaagagattagtgaaatatttgtgattctgatgttgatgacttttaatgtttgacagagaaacttttgcaattattttcttctggtccaggcctcactccttctagcccacatggctctagtcaacctcctttaatcagcagagtaataggcaagactgtagtaggatgcctcaagacagacttttatgttgggacaagtagtgtcttattaaggcggttccagcctttcatatcctgcctccttgggataaagagtgtttgtttacagagcttctgggatagactgctgcatgctgcatccgtacctctgttgcagaagcacatctgtcccattatgtctagtgacaaaaataagacctacgcctcagtgaactttgcatacatctgaatgtaagcaagacaagtatatttgacattttaaaaaggttttttctttcacagttttcaaaataacataggagaagcaaaggaaaaaatatttcttgtgtttctaattcacaggttgcttgagactttttttggaggtgctagcattttattggccacagttttgaaggaaaatacaatgaaatcatgcttctgtcgtttggggaaaaggaataacagattcattttttctttttttaaagatgagagagatagtatttggaatctatctttagactattctacctctgaatctaattgaagtaagaaattgggcaagaatggaatcttacttaccacccaggaaaaaagctaaacaattgtggctcagtccattttcccctgagactgtcttcagattgaggcgatcagtgttaaaatggatggaatcaccaggctctccacattctagtaagattgtagtacggttgaaagtcaaatgaaagtccagctcttcagtgtgtcatttcctcttgcagacaccagaccaagggcagtggtggtctggcgcttatattttgttattatttgttgagaccagaactctccttaaggatatatttatatatgttttaatattaaagtttcttttcaaggaatttatactaattagttcatgtaataataacatgtgcattccatttaaagttaccttgctaaattttctaagacttgttagcttccccatagtttttaataaaccaaaagatcaaacgaacagtccccagttgcccaaatattgagcagttaaggctggtttcagctcatctgaaatctgtaaacatttaaagagaacctctctcccagaagatagtgagcacggtggtattctccagtctcagaatattaaggttacttacagactagagaggccttcagtctatattaacgagttcctttcctaatctcacccttctaagaatatatttgatccaatttagggacagcaacattgaggccagagaaaaattaatggggtagtaactgtagacaccaaaacactccccaaatcttgagacatcaaataagcaagactgaatttatgcaaaagatactttaaagatgtttctttagctgggcgcagtggctcacgcctgtaatcccagcactttgggaggccgaggcgggtagatcacaaggtcacgagtttgagaccagcctggccaatatggtgaaaccccgtttctactaaaaatacaaaaattagccgggtgtggtggtgggtgcctgtagtcccagctactcgggaggctgaggcaggacaattgcttgaacctgggaggcggaggttgcagtgagccaagatcgccaagatcatgccactgcattccaacctgagcaacagagtgagactcttaaaaaaaagaaaaaatgtgtcactcagagatttttctacctagaacaagagtcatacatactttttgaaattattttatctatgtaaacttacgaggtacaagtgtaaatttgtgacatgcatagattgaatagagaggaagtcaaggcttttagatattcatcacctgactaatgtacatggtacccattaagtaatttctcatcatccaccctcctcccaccccgtcacccttctgagtctccattgtctactatcagaaaagccttctccagcagcgcattgtcagctgagtctaggagaagaaagccttctcatggacatgagctaaattccctgggaaaggccattccataatggagaaggccttctgttcacccacagtgtggtcctcagaccagcagcttcagcgtctcctgggaactcactagaaatgcagaccccaggcccagtgtggcagctcacgcctgtaatcccagcactttgggaggccgaggcgggtggctcacgaggtcaggagtttgaggccagcctggccaacatagtgaaaccccgtctctactaaaaatacaaaaaaattagccgggcatggtggcgcatacctgtaatcccagctacttgggaggctgaggcaggaaaatcacttgaacccgggtggcggaggttgggctgagctgagatcgtgccgctgcactccagcctgggcaacagagggacactccttctcaataaataaataaataaataaataaataaaatgcacccaaacctgaattggaaactcaggtggggggcctagcggtctgtggttttactagccctccaggcaagttttgatgctttggtgattgagaactgctgcttatgctgtcttggtggagagcacttcagccagtgcctcttctgctgattctgtatttatcaaagaaccactgactataatttagtgctcacactacagttaggaggtgtgtgagttccctttacaaacctatttctgattgtaaattcctaagatgttttacacatcagtatcttgtgagcttgataaaagtgaatccatctcgttcagagtgatgcattatgagtgtatagtggaagtctagcttctaagcctgtgaaacagaggcccagccccctgatccaggcagatttcactaaggtagaggccagggtagatgtccctgctgaacgggcaccctctcatcccacctcaccctggctgtgtgtactgtatatttttaaccaagaggagagcagagcggcacagaatggctggtactcagtattcctggtttctggattatacagatgcaagggaaatgtctcctagtcttatttcatgagttactgtgtagcattattgaattgcagtggtaagagggttaggtaggcctttctcatttttgattagacagctatcatttacaaattagaccacagggaatcgaccttaacttctgtgactaaagcttttggcagttacttttggcatttctggccctctagacttgaaaatgactgagtggttacaatttacaaagttaagagagctttctgttgattggtgtgaatggtaggatatgagacagactcttaggagtaaaggacagggatttagggaaaatcctagtggagtcactgcagccaggcagagttgtctgttacatgcagataacaagtcacgctgttggggttaattagaaaaagaggaaacaaagttgagaaaagaagagggaggcagagcagacggcagaggacaggaattttcagtgcagcgttgggaaaggttgtggaagctgaggctgacgcagacctagggcgttaaagctgtatttacagctggaccttctgattcctggggaggaggggaggctggatcgtgggtaagagagactggcagggccagtggaggatactctcccactggagttgtccagtgggagttgtctggagttgtcctgggcagaggctgcctgttgacagaggctcagcacagccatgcttaagataagctagctaagcaggtacgaggaaaaataatttacctgaagttctttctggccgggcgcagtggctcacgcctgtaatcccaacactttgggaggccgaggtgggtggatcacctgaggtcgggagttcaagaccagcctgaccaacatggagaaaccctgtctctactaaaaatacaaaattagttgggtgtggtggcgcgtgcctgtaatcccagctactcgggaggctgaggcaggagaatcacttgaacccaggaggtggaggttgtggtgagccgaggttgcgccattgcactccagcctgggcaacaagagcgaaactccatccccccccaaaaaagaaattataataaaataaagttttttctgtattaaacatcttgtgtttaaaagtctacagtgagtcaaggatgttgaatggccaaagatcataaatctctccctctttaaatgagctgtgggctgggcacagtggcttatgcctgtaatcccaacactttgggaggctgaggggcatggatcgcttgagcctagtagttcgagaccagcctgggcaacatggcaaaactctgtctttacaaaaaatttaaaaaaaaattagccgggcatggtggcatgtgcctatggtctcagctacttgggagactgaggtgggaggatcacatgggctgaggaggttgaggctgcagtgagctgtgatcacactactgcactccagcctgagtgacagagtgagatcctcaataataagcagtcttcagtgtttcattttacccaggctaaatgtatttgtagtatacatatatgtttatattttgatagattcatgtgagtaaaagatatacaataaaaattgacattaccgaaggggagtgggattagatgtgagagggtggattagtaaattgttttacacacctctttaccattggacttgttacaataagcctataactatttttaactccataaaatacattgttttataagagctgtcaaatttcacttgctcagtcccctgattctcattttcttataaaatctcaggttcctcaaatatgaattcttctgccatgagaaattagcaacatagtcttaaagtctggggaaagattatagtcagatccacatagataggacaacgttccaagtcgggagaatgttcatatgagaattgaatagaaggccaaatttttaggctaagaatatgatcagaggacacttccagtggagagagtcagcgtgaagagttgaggtgcatggctgttgtgcatctgagagcgtgtacgcgggcgtgagagcgatttagatccctgtgtgttgaattcgagacccacccagacagcctccagtgtcttctcagtgactgtgcccaagatttctgtccatctgtggacatgttttaatgacagcaattagtggtaatgatggctattaaatacttaatgacatttctgtgttctgaggcttcttcatacaagaattcacttactggccgggcaccgtggctcacacctgtaatcccagcactttgggaggctgaggtgggcagatcaagaggtcaagagattgagatcaccctggctaacatggtgaaaccccatctctactaaaaatacaaaatagctgggtgtggtggaacgtgcctgtagtcccaactactcgggaggctgaggcaggagaatcacttgaacctgggaggcggaggctgcagtgagccaagatcatgccactgcactccagcctgggtgacacagagagagactctgtctcaaaaaaaaaagaattcacttactttccacagaagcaggcactgttatgatccacagttcataaagaaggaatctgagacatggaaagtcgacctttcccaagcttgtaagtggaacagtattctgactccagatcctaaatggtaaaccactactctctgctgcctcgcagcctggagattttctgtaagagaggggctaaaataaaaaagcccacctcatattgatcacattcttagtaatccttgaatacgtttatattgtgtcattcatgaatgtcttttccctctggccagattatggtatttaggtcaggagccattttttcttgtttattttgtattcttacattgcccagatatgctcgataaatggtttttgaatgaattaaccaaactgtttctctaattcactatgcttttaactgtctaaggaaaagacaaccgtggggtccctcgctgcatgcctgggaacctctctgaacacggaatcaacttcctttctttgattttagagccagatgtgatgtttgaagaatgtaatctatttgctctcaaacatggagagcatagagctagaactccaacaattagaagttaatctgagatgtcctacaatacatgattttaaaataaaatccaccagtgtcagtctggtgcagtgactcatgcctgtaatcccagcactctgggaacctggggcgggcggatcccttgagcccaggagttcaagaccagcctgggcaatgtggcaaaaccccatctctacaaaacatactcaaacactaagcaggcatggtggcgtctgcctgtagtcccaggtacttgggagtctgacgtgggaggatcacttgtgcccaggaggtcgaggctgcagtgagccatgcctgggtgccagagtggtaccctgtttctctgcccaccctcccccatcccccccaaaaaaatccaccactctttcattctgaacaaccagagatgtttggaaaggacacaggaaataatacctggtgaatagttactctcgagcacttgctaggtgcgctgcagatcttcgtaaatttaatcctcaaaacagttactcaagacctgtattagcttgattttagagttgacatctgtctgagaaggaggtaacttggtcagaaggtgccatctcgttgggatgtcacagtcgggcctgttggcttcagagacttgggctttcatgctctgctgctgccaggacgggggccacatcgccctgtctcccgatttctcccatggctctccaggacttggccaccttcagcatcgtgtgttctgtacacagcacagcatgagggtgccagcagtcctccttggctcagcgtctaggatgtgtcagaactgtaaaccccaagattcttaggcaacccccctaccagcgctcatttctgctacttcagaccagaaaccttcgcgggcgggggtgggggcgggggcggcgggggtttcagttgctttctgcttcagttttcttggccgacggtctacctcacagtatcacagtcatctttactttcgtttactctgcctttctgtattttagtttctgaatttctgtcccataaagccagcatttaggcattttgaattttgagtttcttcagtgaattcataatagtaaaaatatttaagaaaacctgtaaaggcaagattgttgttgaagcccctcacattagaacacttcccaggtgctccaacctgggggggactgaggacttacatgggaagtcagagctccccatcttttttccccaaaggtcattcattctgacagcatgacttcaacttgatatgagcaaagagcatttcagataggaggagaaaaaggaagagggttgggcaccgtcgtgaaatggtacacttcctcaccgcggtgcttatctacataattgtgtttttataacatttcctttacttttctgtaagctgatgctgccctaattatagatttttaagagaacacttcattgtaccccaaattatacagtgctttaaaaaggtactttcttaccggtttaccaaataccttataaattcgtaattacataaaacaattcgagatacagaatagaaacagcctgtactgttaacaggtgttggtattgttatataattgagtacatggctttcaaagatctataatatttttcttgagtaaaaagaaaaaaatgactcattatagtcgtaatgtgtcacagagactcctgatcaaacagaatgcacatgttctattttgtgcattctgtacagttcattgtaaatggacttgcctttgtggaagtgaaagtgccacttattccagcaaattgcctttgtggcatatgcacctacttgttagacagcttgggggcacttgggccaggcagaggctgggccccctttatcatgggcacacctgcacacatggcactatggcgccacactccaggtaggctgctgtcattaacagacttgctccttgggaaacccactgaggacttctcagtgccctcctgcccatcagagaccacctcggaattcttagaagactaggaatggggcagcttcctagacgctagctcttttcccgccacatcagttttaggcctctcttatgatacaagtgattcagattacaaggtaacctcagtgcaacacaagggaagaaataaatcctctctgttattgagtgctgggtctagtgtttaattttctttcttttcttttctttttcttgagacagagtctcgcactgtggcctgggctggagtgcagtggcgcgatctcggctccctgcaacctccacctcccaggttcaagcgattcttctgcctcagcctcccgagcagctaggattacaagcgcccaccaccacgcctggctaattttttggatttttagtagagacggggtttcactatgtaggccaggctgttcttgaactcctgacctcatgatcctccagccttggcctcccaaagtgctgggattataggtgtgagccaccgcacccagcctagtgtttaattttcaatttaatttttggcactatttttttttaagttgctcatcttaggacagtataactggaatgagccttgtgtttccagttacaaaaacaagacagaacaaaggatgaggctagatttttgtattattgacaaccccatattcttccctccagaggagagatcatctttcggaagcaagcccgagatacacacagtcttacccattccttcaatgctgttgatgattagccttaagatggttcttttctctaaggaaaccctccccatttttgcaggatgtttgaaaaatgagttgctgaatgggcttcagatattcttattcttctgttttgttgggattttcttcccactcctatttgtgttaatttttccctcgaaaaatgagattgctgctcactgccgttgagcctccttgtggcacattcattggtccagtaaacgacttaactccaagaaccacctaccagtaacacaacaaaaccttgagtacagattgattcataaatggcagcggacgagtgttgaaagtgacgcattatgtcgctgcaatgtattgacattatcaattgtgtgtcactaaacagccaggctaactggatgatttactttgtgtttaactgcctttttcagttggagcaaatgttgaggaactgggatgcaatgtcagaaaccatatattttcttctgttaacaccagcttcactgaggcgtgttggttttggctgcaggctgtaaggctctagtgtaaaaaggtctaaacaagtgattaatgcccaggaggcagggctttacactgtctccacatcttttctcctttctatttgtgttgccttaatgcttggggtggggggttcaggctatttattgtgctgacgttggtttccatcctgagagtccttgatgtttctttgtggattttgtttgtttttaatattatttagcataataacctaaaccgtaaacgcttgcagttgcgatccaggtgtccttagttcagcagtcagacgtataataagggccactctgtacagtgaaaggtgacagctgtggcccccaaaaaagcagctctggactttcccctcccaagtttcagtcctggtaacttgaactagacttgctagtttcttgaaacattgttttattttcttgcaagttagtgtggtgttcatatttcacaacgctgaaagatacagtgtttctcaaatgtgcacttgccagtagacggatatgttaactgttaccgtgacgctgagaactggagctgctaactgaccctatgcgtttgttctctgcgtaaaatgttgtaacagtgctaattactaagcagctgaatttgtgagaaggtccacagcactaatctgcgcctcagtgttgccttgctagtgagaaaacgtgagcatgtactcaggacacatgtacttgatgatgaacttccaggggcacgtttatctgtggatcacggacggtttgacttgtgggacgtaacatttgatttctatatgtgcgcttttgagacactcgtttttaccctattaagagttgttgagtgcagaacaagacattttaaaagggaagagtaacattcagagattttaaaacggaagcttttaaattactacttgcttctgtttattttttattttttgctagttttagaaaaacaaggaagaatatctcaagttggaatagtcagatttcagtgtttgggtgatggtgttaaaatcgttgttttaatggtagatgaaaatgattctgttctgttggattcacatcctgaataaatgtttctacacaattagagtctataacagactaagccagcatagtggtggtgtgggttttttgttttgtgttttttttgttttgttttgttttgttttgttttgtttttgtctaaaagaacaacttcaagccttgggaaagaatttgtttttgccctgtggatgggtcagaaacatctgcttcaggtatagtttacaagcgttatttattaacccatgagccgaaaacccagatgaggagctctgactattgaaaactacacattccatgtttttataaatgtatattaagatgaattccacatacctattatttggatttctggcagccggaacttctacaaggaatttgtgtttttaaaaaggaatgtaaaattaatttttcttgtatcagagttttgctgtatatgaagaaatcctgctcatgggcagaaagcaaaggtttcaaaggaacctcatctccatatggttttactcgataatcctttatccaccatcttcagctctcattcctttgctttctcgcctgtggctacatttctatctctgcatcaattagcacagtgatttatacaacaagcaagcagtttagaggtaatggtacacaattaacatctcattccaccataaagggtatgctaaataccccagtcattgctttctctgcctggaattgaaataagtgtttgtcctaattcatatgctatctgatgtgaagtgggcctgctttgtaccgcactacaccattaatctaattatagatagctgcaaatgaagtgctgtctgagctgggagattgaagaaaatagccttttgtcatttagcatgactctgtgaagcaagatcacactttacagggcaatactacaaaatggaaatctcaataatattgctgcctgttgcatcttttctaattacaacaatattgtaaacacaactgggcgctgatataaatagagctgtagatatgctgtcatgtgggttgtaggagaaagtcctccgagtgctgttggattaaatgatgcatcctgattgacagctaccttgagactgcactgatggagttgtcacagcattatgctaacaggctgctccagcgactgcagctgtaggaggctgtggttcgccctgcgccttagctgctgcctgtccatgtccgctcctttgcctgggctgcacctccaaaggaaggacggccgtaggcttcaattctgtgtattgtcactgttgtgtcttggagatttgtggtggtggtggtgtagctcagatatcaggcgattgggccctgtgcagaagtagagggaaattattttgtatggctcctaaccttgctctgcttttcctcaagtgataattgtgtaccctacaaagaatttaggagagtagaacgtggttgaatttcaagtctcattccactgaactgttttaactcatatctagtttttctctgcttttcagccacgccagtgtttttaaagatgcatcatttttgcatttcgcgctttccatcactttaaaaacactgacactgtttctccagctctgagttaggacagtagacctttaggggaatatttgagtgttgctctcactgccacgctgcggaaatgaagacagagcttaatgttggagacctttggggccagaaggtgtaaaaccttgactaggaagagagcctaatctttgaagaagtgtctgcctccttacttagtgaggggtgcatggacagtatttggccagtgcttcaagatagctgatgcacagtgatttacagtcaaagatagcacctgcccttgagttggtattgactgagatggccaacagttgaggacatgaaagaacattaacagtcagtcaactgtacgtgtcctaattgttactggaagaatgacttataaatggaaactggaagtgagcccacttgaagaggaacggaggttgacagtggcactggaggctttgaaatcacagctgaaaactgtacagcaaactgcaagcgctcacctcgggagcagccgcagacctcgggatcattgcaacatttagcgcatggggtctgcagaattacattactgctacttctacaggctgtggaaaaaagtgggtggatttaatgctgtaaggaggtgcatgtactgtacaaatacagaagcctccagggtggtattctgtgtatccgtgaaagtggagtgtgtctcaaagtgggtcattctttgctgtctttggggtgctgatttctggggtgcaggcatacatgcccagttgcaggatgcttttcttaatgaggtccagtgataacatccctctctcacccagactgtgactagccgccgcctcctgctgcagcaaccactctcagcccccaggctttcaataggtccacggaagagctgcgtgtcagttttaaaaacaatcccactggtgtttcttgtcattgtcctgctcttgtggccttcctcctgaccctttcatgtcagctgtgattccttttctttctttcttttaatcttttgggagaaattttcttgttagacatgatttcacactgtagaggccataaaattaatttgcttagagacccgggttcgggtcacctttccgtcattcagtccttagataacacctcattccctcccattactgtcgtgtgtgggttgaggagtcccaccaggccaagccagagagcaactgttctgttctcacttacgtggtgagctgtttttcaagaacattttttttcatttggctgtgtggtctggagaacaccttcctaagccagcggagtgaagttccacgcactgaccagccccgagctcactggagcgagtcatcttccggctccatggcagcccagccccacccacaggcagctgcctgtcacccacgctggcatgttccctcatcctacccaggcagcgggaaaacctggctgcttctgggatcctactactctgtcctgtccacaagccttcagagtcttggattcctaccctcaaacatcaactttgtgatttatcttcttgaaaacaaccacaaaaacttaaaatcaaaactctctaagggagtttcgcacaacccttgaggaatagttaaatgcccacggtgaaaccgagcttgtaccccacggtccaggtaggggcacattcctgaagtctcacaaagcattggctctctgtgcccccaaagaatccagagatgctagtaaatagcagttttgatcagaagcttggaaggccctggtgtacattcttaaatgacttcttttctggggcatcaaaaagcttttacggttctcaccaggcagttcattctgatgggcccctacgctgcaccctgcttgggccccatcccggcacgcgccccgtgcagcacagcacaggccagctgagaggctgttttaagaaggcgtgtttgtgtggtacactcacgggctcaggacaacatcaaaggtaatcttaaaaagagaatctctctctgtcttctctttttatattcagaaaggtcatttctaaaccaactatttgcaccaaggcctctctggaggagtttaccccgttgttattttttacttgctattacaataagtcacttatcccccaaacagatttaagaacaataaacaaatacaaaaggaaaaggaacatctcatcagtaacaaagactgcatctaaaggcattgagtttgtgattcttttacatctctttccaagcaaagcaggagtcctacagagaaaggaatctgaaagatgaaaattataaaaatagtaaaaggatccagtgttcgtcagaatcttgtaatttctggggagaaatgaagctaaatacagtcttagcgcttcgttcatatgcaggctgatctgtgatataactaaacttagtttttggagtatatccactgtggggaaatgtggtaaatcatattctcagcgaatgaagatacttttcctgaatttaggcttcatattttgaagtcgaattctgcaaaacaagaaaaaaatagatctgtgtgctacactgaaaactgaacaaggcacgtcgtaagtcagtcacacagaaggcgcagctcagggcgataccaactagaaaagtaacttttttgttgactctgatgcctctagtgatgttggattttttcccccattgcagacagcacagataggaaaactgtgcaatttggtccaattatagtcctctctgtccctccacaccttcccccattgatttaatgaaggacttggaggtacaattcactgataaatagtccctctgcccagaatgtttattagactgacagcagcgtgcactctcctcgctttttccctcaccacttatgactcagatgaattttaataggagcaaaaagcttttatttgcactgtaatttcacttaaggaacatatccttcagaaactggcagacgcttctatgtcttgattgcaaaacacacactcaggagtaaagaaacatgcaaaagatgttattattcaacctgtcacagtgtcgcaaatccacttggaacttaggccatcaaagctctgcccccacccttttcagtaggccctgtgaagaggcacttagagattcccgccgtccccatgcagaattaaagggggaattatattttgtttttgcatccctgccatcatgatgcccacaggaggctttgagttacagcaggttttttgaatgaaatggagctgtctcactgctgcttctttcttacccaagagaaatcagacctggtagggatccagaaccttcgggtggtggttccaatttcaccaagagacacttcctcaaaccattttatcttttttctgtttggatagaccaaattgtggctcatagatttattcacggagaggataggaattctcttttttgaaatgttctgcttcactgaactgccctaaatatgcccgattgtttgagagccacctacagaaggtgccatgaatatacttgtctgtgcgtattttccatcagtgtttataacatcttgatgttattgtctctcagtgcagaaggctttctcattatcttgcatcttttcctaaccatcttgttacatcagaaagactacatagtgcctttaagaaaagccaacgttttcagtcatgaatataacattttctgtcactgaaaaaatggaattttaaatactattttgcccaaaatgaacactgaaccccattgtcttaacttactgatacgtagtgcagccgctcttggagggctgtgggaagctgcaacagccatctgctgccatctactggcgcctgtccacatgtcacctcctccatcccctgggtctgcccagctcatgggattttccttgatagggataagtttgtaggtggtgaagggaatacaagtaaaattctcagttttctttataacgttttgagatgtttttcttaaagatacaggatgatacttatcaatgattaattttaataactggaatagcccttatttcaagaactttctgaaatagctcaatatatgacagaaacaaatatattttgatgtgtgcagcaattgagaaccatttgaatttaaggctcttactgtaatttgaatttaaaagctaaaaattgatttagaatgaatgctacttttgaggaaaatttcatttaaactcatttatggtttggttttgtttttcccttaagtacaaggtgaatatcttaaccagacttgccgcagaattgaacaaatttatgctggaaaaagtgactgaggacacaagcagtgttctgcgttccccgatgcccggagtggtggtggccgtctctgtcaagcctggagacgcggtaagggctgtgtgtgtctctctgcaggacatgctggtctccaacttccccttccaaagcgacggctaacggcacagcacgattcggctctttgcagttcttacttaaccgacgccccctaaacagcaaaatcgattgcgtgtgttgtcgacctgtttcacgtttgcattacgttggtgccaggaccctcagcgcttcccctcccaaatgatctgggagtggagcagaaagaaggccagatgcattccatcattttgcaaatgcagtgttttgggaagtactttccttaaaagtgctgcttactctctagtatgctgtgctcaaagcatccattgaagtcatgccagggaataatactccgatgaggaactttttgcatgattcctggaacaaatgtctaattgggaagaagagttgaggaaaggttaattctgcaatctgtacagtaccagagcacttccattacttggtaaataaaatgtagcatcacagtttgaagtttttcatcttgatcttgtgacattaaagcacaaatcaaagctatattatttcctcgagataacttacatggatgaattgataggatgcacacattttcttagaacatggatagaaatctctactgatgagcagcaaaagtgaaaagaaaacaatttaggaggcaaccagatttccaggtacacttaaatacttgcatttttattcatgtgcaggaaaatagcatccggacatgactgtctctcatggatgaggtggtgattccgttttgtatctcaggtcactgggacttacattttagtgcctcctgatttctcaatagtacagataaaatatctgcttaacattgaggaaaaaatcaggtagttggcattggcttctagaaaagtatttgcaataaatgtgaatattaagaaaacatgatcagttttagttgtttgaatgaccagccctgaaactaatatgcgaagttagaaaaccgacttaacagctgctttacctggtgatacagaaatagaactgtccactttttcagaaaggcataaaagaggctacgtggctgtgaattgttgtttgctgtgaaagcattgatactcctggaagaaagccctctttaagactgtctaatgcccacgtgttaaggatttgggagaggccataagaaaaattacgtgtgtgtgtgtgtgtgtgtgtgtaatgtgtgtaaaattcaggggaggacatcttccttctccagagttagggtcgtaagaggatagtctcgtggccttgacattaagaatcgttcacttgcacgtgacattatcagagctgtcagtggaatcttctagtgactagatatgtaggttcgtaaacaatataagggttttgttttgtttttttcatttttcttaagttttttttctggaaggcatctatctagtctgtatactgccagcctgagctttccactcctaattgtgtggctttaattataaaatcgtgtgtgtgtgtgtgtgtgtgtgtgtgtgtgtgtgtgtgtgtgtttcaagtaagtgttttccttaaatccttttctaacacctgaatccaaaccggagtggagggagggcgggcagggatgagggagaccactcctgcctcaagcctggagggcaagagggtgagactgcagccctggcccctcacacggccctcaaggaggttgctcagaggcagtaaacggggcgctcccaaggccagatcagcgcagccttctggtttctttaacagctgctggctcctgatctgactttcccacataccgaaagggtttggcctttgtacgttccatttcctggttaataattgaatgtagaaaagcaaggcatttcgtaaatgggaacaatgtgatatcagtccttggttcattgatgtagctcagatattaaaaacacccaccaataattaaatgtgtgtactcattaagaatggtttgagaactgttaaaaatatgttacggcagagcaacggggcctatattttatgcattcctttaaattcagagtacctggggggcacgcgtagtgaacaggctcaggacctcgggatctgtcagctccctcctaagttctgtttgcgggggctgctcaggtggggcgtatacttgcttttatttgtcttttttggtacttgcagaacttcctttcatattctgtgccattgtgttttgatgaaacagccttttctcttgaattactgcttgtgaaaaatgtcccaaaccactaataccgaaacccaatgcagcctgagaagtttcatcgtcggctcttagcgcaacttctatagttaaattctgcttagtgtaattaaaacacaagaagcttccttggaccagaggcacgtcacttacttgaggccattgtgaggaaacactacctgtcacgttgaaattttgcggttttaagtgattttaacaccgcggggcgtgttgtgttttcctccgcactaacaatagccgggcgaggttccccttttatgggtgggaagataatggagtcagtctccttggtgtattttcaaggaaaataaggaccctaaaacaactaagggccttacaagtattctgtttttctttgaaatgttactttttatcgtttaaattccagtaatctatcatgtttctgtttagcttagctgaagtaaaacttgaccaatcgtagaatggtgggcctggcaataagttctaaaaaaagtgtcacataaatcgtaatgaacaaatctgttttgtgaagtaaacaatttgaacacagtttaaaaacctcaggaagaagagatgtggggtggccgttgagaagtagtgaatccgctcggggcgcttggtgtggcagggccttgtgcactgattcatttgaaacactcagcctgccctaaacacagaagctgtgttttatttgaagggcttctgtagggttcacacagcaaaagttcctaataactttttcagtgtctgttatatactatttaacattaaatgtggcaggtcacattttaaatgattgtgtaatagtttttccgaacacgtggagagaggatgttaatacacagtaaaatgcaggtaagcaaacaaatcaataagaaagtacagtggattattaaggtccagaatcagtaatataatttaggaaacaactgatagaataaattttagtgcctttttatatgccttctgaaaatgtttctgcagtaactcatttcagtttgaaaactcgttttcttagactcgtaacactattgtaaactgggagcacttctgtaatcaaagttagcatgactcagctgtttcaaacttctacctttatgatactcttgaacagaaatgttagaaatatatatattttcagaataacggtagaatacatttttccacatgtcaaattagacttatagctgctgaatttattgcataattttcactttgactttgaagtcaaataaagtcatgatgagcacattcgctttgttagccttttgatatcagaaacaaaaccaccccataagatagtcacccaaggaggcattttaatattgcatttagttaagattctttcaagtaatgttcgtattctgcagtcatcacagatttgcatcagaaatactcatttaatacaccaaacaaatgagaaacaaaccataagctgctatatactcatctgcatttctttctttcttaacaattagtgaaaccaggtgaaagaatagattgaaattaagtacctgttgctgctttttcttgcgaattagcccattcgatattagacttcgggatattttggtggggctaagatgaaaagatccacctcgtgatggaattgaccttcagcaggggacagtgaggtgtctgcggttgttcctcttgtgaacaacgccttaaaggcgagaaacagcctactgtacagtgtgccagggaaagcatcacatcggtgggcgtcggtggcaacaccacttacacttcaccctgattttgtttcctccttgcacgtgctcctttgacagggcaggctcccaagcaggtgtgcagtcagggccacaagacacaggcaccccatcccatctcagagtctgacgtcccctcctcccctttgtctctaagcctcatgtaactgagcttatagccgaccatacagaactggcaaacttggtgagatacctttattttttatttcttaaacaagattttaaaatttcataagctctcacgtatcctaacgagaaggcagggctgggccctcccgacgggtgtttgcctggcatcgcgcttgtgtgcctcatgcagcccaggctcgctcactgcatctttccctggcagaggggctagcctggctgcttcatagactttccagtttctggataccttgatttacaatcacaaaataattgcagtaattaaatttatatgttttatagcaatagttattcaagcagtttatttgacaagatgccagttttcacccaaacctcagattgtatctcacagcatgtacacagagatccatgcatttgttaacattttaagactttaaaattatgaaatactacaaacatgcagaaagttacagagaagaatccaacaagcactcctgtgccctttgttcaccatttccatatgtgtttcaaattttatttaacaatgagacattacatataacatgaacttcccctgtggcaagctcctccatctcattcctgtcctgtcttcttcagaggtaacgactacccctggatttggccttttaatcttttccagataacatttatttttaaatgttaagagttggtttttggccgggcgcggtggctcacgcctgtaatcccagcactttgggaggccgaggcgggcggatcacgaggtcaggagatcgagaccacggtgaaaccccgtctctactaaaaatacaaaaaattagccgggcgcagtggcgggcgcctgtagtcccagctactcgggaggctgaggcaggagaatggcgtgaacccggaaggcggagcttgcagtgagcggagatcgcgccacagcactccagcctgggcgacagagcgagactccgtctcaaaaaaaaaaaaaaaaaaaaaaagagttggtttttgttggaggtaacaaatatctattagtagataagaggaggcagaaaaagatgaggaggtaaaaaaatatctattagtactgggaatttttacagttgaatatactcaatgataattataaaataaaaaatatttatgtggatcagtatattaaatattataggagagtcttctccaagcttggcgtttgatttttcaggagtgatctgcttgggagtagaaggtgttttctttgttttcaacatttttataagtgaccattctcagccttaccaagatgtaaactatctttttctcttttaataaaaataaaagtttacaaaaaatcatcctttcacggagcgctttcaggcagcatgctttacgaaggtagagggtccaggctaatttccaaaggtattgtgaatgacatcagtttccactagttctctttgtaactgcaggctttggctctgattttgagctaacttagagggcagcagggagtcatatttttcttcattttaaggaattttaaaagaaactggacttgttttatatcggccacaagtctgtactcttacccttagccccttgggtgctgcccagttctggggagccccacttgagagacaaggggagcaccaggcagacggcacgtgtgcctgaagtcccgagccggcagcggggctggacgggtggcccctgggttcccgcgccctccagagtgaggccgctcgtgcatgggccattaaaggagtcttcagccggagaaagggctgggcggcgtctcctgcccgcctggtctgtctttgtaatttgatgatggttccatccttgctcaaatactgcagtctcccgtggcctcctccccgtctcgctttacatgaagatgttgggatgtgaatacacgtttcttcttcaggaaatatcaggggatatttaccagcctatcttaccggctcagaggaagttgctattaatataatcagatgcgagcaggcagtgccttttcactcaatctgagatgcctttttttgtgactgttaactgaacctttcttcagatctaagggccttaaaatgtgtggcattcaggcacctgtgttccaagcagaccagcctttaacaatgaaatggtgggattttcacttttgtggcgtagacaccagggctgatattgatccgtgtttttccggtggtccggcgttgcagaagtggaaactgcagcgggctggtaagccctccgagccttctgtctaatttggcagaaaaacacagaatgtaggacaacaaaagaagcctcctttttccataaaaattcttcctcccacccacccttcttccccaaaaaggggacttaatttttcagctgcacgcagtgatttggtgctcactcttgcatcgaaacagttgcggtctgaacaggcaggaaacagttttcttttaattgccgaaatcattcggaagtgcttcatgccctgcttctgtacagcagatgctgtgcattaattggcctgcgtagaagtgacccagggttccttgcagcgggcccaattttaggcagagggtttaaatagcttatttattattttgtataatctggcgtacattgtgtgctcctgcacgtgtcgtatttcatggtctgcagtttctaatgtcatgtgggtttcaaaacctgtgtttctctggtaatgtactagcagcaggtaagctcaaaataccatccatcaggagctaattttttatccagatactccaatgactgatgaacctgtcttttgtatgaatgtttagcacagtggaaagccatatgccactggcaccgtttcctctgcattccttacagttgctagagagtgggcttcctggggggcggggcggctcgatgctgtgaacgtcccctggcctctatttcaacgataacacctttaaaacagccctgggtttgggcaacaaaaagaggatgggctgtcttaaaggagacctgactccctcgtcattttctttatcagaaatacgactgcacactcttaatagggaaccttgttttgttactccccgtctgttccaaacagacctcagcccattagaagggcctcccttgtgtgggagaccacagctgttactgtaaatctcatccactcactgtatcacccccattttgtggctctgaaggatgaaattgagaaatggaatactgtgcagtcatcctttacatctccaattttaggcctttgccatcattttcatgcttttattccaaatcaaataacattagtgagctacaccaccttctgatgaatatctggtcttgagcaccgctttcaagcctgtgcttgtgggggcttccttttatgtttggtggtcttttttcccccgttctcttctttttcttcctgcactttctttgagcgttcttcgtggtcatggcagtctgcagtttgaatgatcggcattgccaaatgtgtccctgtcttagcatgttttctgagagggggcatgtgcgggagaaggttctctgtcttttaatctttgtggaaggagtgaagagaacttggtagaaggatattgggggctttaatcagaaataagaagtggtttaaatcattagcacaacaaagcatactataagcttgaagataaaagtctctggggaaagagtcctctgaaaataaatggaacttgatagatttccatatcatttataacttcccttaattacacttggaagacttgccagtaaaactggaaaattggcagcctatatccattagagtcattttgccgaccatggcaagcagctggctttacgggatttgattcccatcactcacaattcatcatcagctggaggtgtctgcagctcttcagcacagagcaatgctgggtgacactcgggcccccacgacatgcgaaaatctgctgagtaaatgggccgaggtttctctcaagccttgtttggggcaaggccgactcctgcttaatgagtgccgctctgataatcggatgcgaacgtgaaccttgacctcgtgtcaaaggagaggacgcaataagctggatgaaagatacaggattcaggccttcaaactttacaccaattagacagggagcggggagatacatcaggcccactaggttcatcaaaaagacttgtgaggcttgtgaccattttgtaagcccaacattggagacatcctgtcacaatcattaagtctttatcagatgattcacaaaagtgttggagaaacgtgcgcacacatcctgcaggaacgggccccgcacatgggggcgtctgatggagacggaatggtggagggccctctctgtgcacccaattaatgcttggcttcccagccaccctgggcaatccggaaggtgttgcttccattgggcccactgcccagctccctggtgtaccctacatgtactctacggtgtgcgacacattctgcaggagtcagcgctgctgggagcaaggctccaaagtcctaaggtgagagcccctgctcccaagggccgagtgctggcattttgctgttgttggaaggagcccagctcaatgcccagccatccctggagcacgccctcgagtgtcagcctcttcccacagactggggcaggtgtagtttgtgtttccattgcattctttgacatttggtttgtacatttggttctccagctcaattttttccaaaggatgaaacatgttgaaattcaattaagctcgtgtgtgtgtgtgtgtgtgtgtgtgtgtgtgtgtgtgttggggtagaacatgtttctgttgagcaagatgtatctcactattttgtaaggcatgaaggaagtttttaaacaccatctcttagggatgaattagggaaaacggtctacaaaacagatggtgcaaaattaatagagaagtgtgctacttagtttttcatttacagctaaataatctaggctgggcacagtggcacacatctgtaaccccagcactttgggaggccaaggtgggcggatcacttgaggtcaggagtttgagaccagcctggccaatgtggtaataccctatctgtactaaaaatacaaaaattagctgggcgtggtggtgcacacctgtattcccagctactcaggaggctgaggcagaagaatcgcttgaacttgggaggtagaggttgcagtgagctgagattgtgccgctgcactccagcctgggcaacagaccgagattctgtctctaagatagatagatagattagatagattagattagattacataagatagatagatagataaaatagattagataggatagataggatagaccgagattctgtctctaagatggatagatagatagatagatagatagatagatagatagatagatagacagacagacaggcagataagatagataggatagagctaaataagtagactagtagacaccacgagaggaactagggaggggaaacaggaatgaaaggcggatggagcagggaggatctaattctatgattcagtgctgtgcttggatggggcagaagatgggatcgcttcagtggggacacgccttctttaaagtcctttgaattgaattgccggactctcacaatcagacagaaggactatttgaatttcaggcctccccacttttcctgattgtctcgggctaaatccgaggtttttttctgatgaacaactggggacccagcacttgcagttacctgtgcgttacctctttgcaaatcacccacattagaagcacagagccagccagaaagatggtcagtggcagccacagcagagccccttaagctcctgtccaccacccacttgctcccaggccctggcggggcccagagtagagctgtagccaggtcaggctggcctttgcccctagcgtgaccttgggaaatccccaggccgcatttcttcatatttgcagttgagttgctaacgcactcacttgaagatcctgtaaaacagaagcaggagctgcctgcctgtctggcccgcagattctgagcaaggggatgggaggggacgtgtggtggaagggcacacctactggcagagagggtaggggctgtgccacccatgtgaagccaatgtacttggcggggggacggggctctggccagtcctgggccctcagatgcctgcagaggaagggctgggtgggtgtttgggaggccggcatgcagtccccaggaagctcctccacctggagagagaacagtgcccagagcgggagagtggattcctcatttttggatggcatttctactatgttctgttgagtctcagatccacttcccagagagtccccggtcctgttgcctgagtgctcagtcctaggtcagagtcagtcgcagtgagtccagcttctaagaggacacggccaggcttccagggtcccctgtgtggagctggctggcaggtgtgctgcagtgaactggacctgctcctggattccctggtctttgcctgcctttgaagagagaaaaaaggctgtaaaatgccaactggagggagtgactgttctgacacccctgatgggggcctctgcattgtctctgcgctgcccctcccatccccctgcaaacagccctcgaggctgattcttcgctctccctggaatgcagatgccacgtgaaaatgaatcaaaaagggcagcgcgggcagcgcttccaggcccagctcctcagcgcggtgtctctcctccgtgccagcgccaaagccttggcatcgtctctcttcctatatttctatgccaggaagaagcagcccaccacctgaacagcagaggaaaagagtacatcggctcaggcgctccagagtgccagcaagacagcttgcgccacacgggggggccagagggggacttggagatcatctggggatttcaggaaagaacattctctaggcgcttctgaggcattggacgaatatggccacagtggtgtgaggggccaggagccccatgccaggacacccacccacaccacatagccattgccctaggaacctggacttgcccgtttcaaagactgggaggccaaagaaaaacctggccggctcaggacgctgacccatcggggcagagcgaagtgagtgcgcagcatggttttcagctgcagctcactcctgcagggaagcctcacgcttaacgccagtgggcttaacccagctcagcctggctgcccctcaggatgaaaggcaagttctgaacgcagtctgagcaaaggcccgtgggcgctcccagtctcctagcatggaatgcatgtagctctggaagtcattcctgtgtctggagggttttccggaagctgccttgtgccttgttgtgggtactcgctgtgtcttgcagaggatgggacagtggtcctcgtggcgccagggccgagctgttcccagttccccgggactatagacagaaatatgtatatttggtggtggttttttttttttggtaacagctatactgagatgtaattcacatacaatttagccctttaacgtgtacgattcggtggtttcagtcaattcagagttgtgtagttgtcaccacaatcaattttggaacatttttatcactctcaaaagaaaccctgtacccttcagcagtgactccccttccctcttcaaccccaggcaacctcgagtctgtctgtagagatctgcctattctggacatttcaggtaagtggaaaacattccaatttccgaacacctctgttagtggcagagccagactcagagatccccagggtaggccccgccgccagggtccccacttctccagggtcagggattttttttttttccaacgaggactttatgagagagagaatggcttttctctactgttcctaaagatgagcttggaataggaaacattagagattgttgctgctgttcatagacacatattttggggcatttgacaaagaatttcttaatggcttcattcctaagtgttaatgcaaaattagaatgcttttaaaacttctgcccatttttgttttccaggtagcagaaggtcaagaaatttgtgtgattgaagccatgaaaatgcagaatagtatgacagctgggaaaactggcacggtgagtccctaagtccccatcagcccaggccggccctgtgatggaggaacgcccacctttgaatcgtgggtggtttggctggaaagggccacagaggcgccctctccccctcgcttctacagaggaggacgttaggattgggagcttttgccattctgccctgatgcatccctgcctcgtagagagcgtggcttccaaaaagtctgtgctttatgttcaggtagtcaaagaacaattgttcttcaccttaatgtctttctttcaaattaaggggtctttaatttttaatgtttacatctgtcttgaaggcagttagttatctgagacttaggtgacacagcagcaaatggttttacaaattgcaaaaattaatgtaactcttcaagacaatttctctacaaagggaacaattcagttgcagatcaagagaagccaaaaccccatgtacatgtgggacttaattatttagggagaaaaaaatattagtactgaaattcattcatagtgaaacttaagtgtatttttttcttgaagatagaaaagtccttttaagcagtaacttcattattcttcctgtgactaaaaagactgaaaagatgccgttagtaggtaaatgatccttttgtgagggccgttgtggtttggaagtgtctgcatgggagagcatgatgggaagcgcaaggctggccgtgttctgcatgtggccatgccttggggacatcaggtgcaaagagagatccatcagttcataaccaggtttgcatcagagagacacacaacctctgtctcatgctctgtcactgcagaaggcaatgaaatggattctcagagaaggggcagcggggatgtcatgcctggtcccggctgggagaacagaggcccaggtgtatgccaggggctcctgagcccagcccgccggtctggaggggtgtggacagttgcactgtgctggtatggtgtgaagagtagaatgacatgatttgtggcgtttttaaggaattctttctaaattacttctttaaaaagtgaacaagaaaatgttggtttctgttcatgtaaaaattttatctgttctttgggatttaacatttgtgctgccctagtatcacgacatccatccatgatgagaacttggcctaggtgtgggggaccgagaacgtgtgtccgccgcatgccaagggccctgtgcggcaggtctgaggtgctaatgcagaaatgaccttggcctcatcagttccctgaaggggcatggtgccatgtggtagtaggtttcctgtcctcgtggcctgggtctccctcggccctcctagttggagtcttcctgtgcattctgttcacctcaccccatccccaggcctctcagttccaacccagccaagaagagcagaagtggcccgaagcccccgtgcaaagtagcaggccctggttcctacctgcgaggccacttttcctcccagagaaaaaaagttcacaaaggaaacagatcctctactctggtcatcgctgcatcactaacactgcgtcctctagtagggctgctaaatggaggcaggagcattgtggaaagcagccttttcagtccaagcagcatctgcagtggccgatgagttctaatccatttttcattttcaggcccaagcaagagcctccaagaagtcaaatgactgtctcttccccacctcaagcccctccttgctaattttaagtcagaacacaaatttcggaaagcaaaacttgataaagattgactgaaaccggtaggacaaaaaggcacagttccacccacccatggtgctggaaagggcgaccgcacagccccacctgccaaggactccatttcccttcagaaaatggaggtcaggccagggaggtcctcctcttactcagcagctgatctgactgtcgtgtgttttgttcctttttttcttttacactaagtattccattaattctcagagaacatttccacaacctcaaaaccacagagagggaggctaggggttagaactcacctggcagtgaagagcctgcctagacctgagggtgccagagcgcaggccacagcgcaaatgctccggagagtagccctcaggccagccactgtgagggtgccgaggacagaggagacgggaaaggggaggagtgagccacggccacggccaccatggcgcctccctgttcaccagggtcccttcgatgggctccggtggggtggggtggcttgtccctgtgctgctgagcttgcaggactgtgcatttttagaaatggattaggagcctgccgcctcttggttctggttactaattcttactctcccctccccctgcatttttcaaaattcaaggtgaaatctgtgcactgtcaagctggagacacagttggagaaggggatctgctcgtggagctggaatgaaggatttataacctttcagtcatcacccaatttaattagccatttgcatgatgctttcacacacaattgattcaagcattatacaggaacacccctgtgcagctacgtttacgtcgtcatttattccacagagtcaagaccaatattctgccaaaaaatcaccaatggaaattttcattgatataaatacttgtacatatgatttgtacttctgctgtgagattccctagtgtcaaaattaaatcaataaaactgagcatttgtct

SEQ ID NO: 415 - DNA, 75935 bp, Homo sapiens
agggcccagaaacatgtgaggaacagcagctcagaagggtctccagactgatgggccggtgatcctatattcttgttgggctgacaactcttctggtttcgggctccaggtgctggcaagaaatctcagaggtggggtgggagagagagacgcgaggcgacccacgcagacaaagggctcccaccccacccccgggccaccccggcaggccgggcaggggccgagcctggggtcgcgcagggggaccgagagggcagcgcggggctgggggtggggaagaggcgggaaccgagccgcaggccgctgcgaggagtactaccccgccacccccgcgccgcgagtttccgcgcacgtggccgtggggccggtctcgctcccgccccccgccgggcccgcgcagccccctcctctgcggctcccggagcggccagagcgcgcggcggcgggcgggggcgggccgcaagcagggctccctggccgctttccaggtcggcgcactaatacgggcgatgaggcttcgcggctccagtctgactgacgccggctggggccgccgccgccgccgccgccgccgccgctgctgcagccgctgtctcggtccccgccgccgccgccgggccctgcaggcgctgggcgcgcgcagccaggcagtgagtgcgcggcgctcggagcgggcggccgggggaccacggcgggggcggggttgggggcgccggacctgggtgggggagggatgagtggcacggcggggacaggtaagacgtgccctcctcggccgcgcgctgcttgtgtgcgtgcgtgtgagcgcattgagtggagggcgaagttgttcgtcctcggggcagcctgggaggctcctcggcgtgaggcttggcttttggcggtcgttgttcccgggttttttggtggagcctgtctggggtggagtggggtggggtggggtgggcgcggggccggaggggactgctctggggagttggccgcggcgcagctcgccttcctcgcgcctgcatccgcccgcgccgcgggccccgggacctgtcaggggatgttcgacccgcggcgggggcggcggtcgggtcggggctggggcccggggcgtgggcagggaccaggataggcgcctgaggggtcgcttgctgtagctggagataggggacagcggacagagggggcggcgggggtcgtcattgtgactctttgggggccacttttaaactcgccagcgccgaattggcctcacttgccttctgtttcgtaggctttttgctttgtttacctttgaggcatgcgaactgagaaaaaaagttaggaatgttgttgaagtgtctccgggctcgcgcttggactgtgtcggagccggggtgtttgtcttttccttggcccgcccctcggtgccagctctccgcagaggggagggggcgaggtgggaagcagatacaggagactgcctgacgccagctttgtgatcggaaggaggagcgctgggagaacatttttatggatggctaatcgctgacaagttttcccgttactattccttcctcctcctgcccttgaccgtggacatttgaagtgatagtttggaaatactacgttgacttatttctgggctggagtgggtactcctgagaactaacctacaaaggatacaaatcgagtttggagataaaattgtatgtaaattctttacccagtagtttacagtgagaaacacacccacagggcactgtggagtgctttggatggatccagtttactagtaccatttcggtggcttgccagatttctcggatgatcttttggaaatgtaggttagcaagaagcatggaggctgaccgttaagtcgtgaggcatttaataatgctgcctcctaagcagtaactgagcggaacgtttgtggcacccgtctgggaaagtgaaatgtgactactacaagcatgtctcctgccttagcattcctccaagtgtgagggaatgcctttggatgtttacattttaaaaatagtgatctatatttaagaaggcatttaaaataaaagccaaagacattctcaactccaaatagacaaagattcaatataagagtttccctgtgcttgtaggaaagcatcagcacaattttagactgcttttaggtttgtggttatccaagaaggaggcttcagataagaaaaggatgtgacgctttataaataaggagcattttaaatacaagatgacagcaatttcaagtactgtatccgaaaaacaacttttagtggtaatagtcaccttcagtgatggcaagacagctgtctgccagacagccttcggcctcttaatgtattctgacacaaccaactcccatttttatgcttgactggttatctttgtcagagctgttttatgcttgagctctctggtttcaaactatgcttaagagaatgccaacatactcttgatctgaacaaactcatgtttatcagtgcagtgtttactaaaaatcaaagacgtaaacaaattttgggttaaacctctaagtactttagaattgccacatcattgtcatcagtctttcaaagtcaacatgaactatttggcttttctcctttaaaaaatttttttaacttatatattcctagttagtaagtaatcagaaaatattcacagatgtcaactcttgcatctgtgattgcccaagacatggatgagaaagaagagttttgttttgttttttaaatgaaacattactaaagatatccataagtaataaacaagtggtacactatctttactaatcatgtggtcagttggagggaaaaaagtctgtccagaaattgtttcataaagatgaaaatattcaatgtcaatatgaaaatactcaatatgttttccaaatagtttaattctgattaatgagagtgcactatgcattgccaaactggagggatggtgtttcgtaagtgagcaccgtaggattaaggtaactactttatatctgacattccctctgtaataaataggacagcagtttcatcatgttctgctttaatatgtgggaaataatccttatccacaggatgtactctgattttagggaaggtaaaggttatgacaaatatgtggtttttctgatttgccagacatactatgctaaattttaaagctttaacgaagcttagtgcagactttctgtatattgttttggacacttagagaggagttaaagaaacgggaaactgtccagaatgaaacagtaaatatagcagtacgttgaaaccatgaatcttctcaaatagttgtaattctaggctgttggatttatatttccttggttactgttgctagtgggttgaaaagttattctaaagcaaaaaaaaaaaatgcaaacagtaaatgcataagtacttaacaatactgtgagcattttcacaatgtttcatgttatcctggtgaatgtccatgtcctaagtaaggacattaaaaaaataaacaattatcccttggtaataaactaaccttttaaaataaatattccggtaaattttgtctcttaagaaacttgtgtcaactaaagttgttaggatttcaagatatctgttagcattaggagtcattatacccatgaaaactggatgttcttcttgcttggtggtcttcatcctgacacttcctaccccaaaaccatgacggacacctcggccgcacttgcctgacttgtattctgctctcctttggtgtcggcttccttttgtgttaggctgacccaagaccacttttccaggcttatcttcccggtctttccctattttatgctgcagttaaaatagcaaatgctagtttccatgcataccctggctttcctctcctgtgcacctttaccccacgctgaggccttcccagcttccccacctcccacaggatcctcaaatatgacttcttcatcttgtatgccctgttcaggcgctgccttcacgggactttctgtgatgaccctggtcccaggtatgtcctccttcgagctcctgtggctcttcgccttttcaactcttacctgttttgtattaagttactcatagactaatttatttcttcccctcagaccatccttacaagatccaggaaggaagggactgtttcatctaccttttttattctctgaatgctgaccacagtgccctttatagtactctatcaataaataacaaatacatgacacattttttcactgaacccatggtccctcctgaaataaagtctgtaaaagcatttcacccataggataaagtccatctttcaagaagctggtgttgaatctgagctgaggactagttcagaggcctgaaatcccctcagcccagttgagagcctccttctcctgaacattgtggctgagcattacagtcaggaaaagcttctatgatactcttattgcattagcagttttccatatcagattcactaaatacacaatggaagccatttagtagaaaaacagattttaatgtgatacggctaccacaatgaaacactaatgtgattccacagaaaattgctaacacgatatgctgattcctccccccaccatagccgcataaaaattgatactgtttttaatgtatgtgtttcaaactatgctcacaaaagaaaagcagactgctactgagatgagctgctgctttgttcacgttggatgtgtaaagggtcttgttatcagcctcgtcaggcagaatctgccttctgtgccttggtcattctattatcgaacaatactaactctcattttaaaatatatcatgttctgtgtaacaatccagtattaaagttaatatgatgtgaaaaaatagaatttgcttataaatgtcatgcccatataatatattcagttgtaccgttttaattgggaagctctaatcagctcaaaacgcatttttcaagaatcaaaacgactcccaatataaaatttaaattcagaatttaaaataaaaggcataaatattaaggtggattgtatatgtgtgtgcacacggttgtaacactttagaagtcataagcactgaagagattatggttcttccccctcattcccagcccacatttaattcaaagaaaaaagtttaacccaaagaataattgtaaaggagacctatgtagttctgattttttcctataatgacaatttccaattcctcttttttagatattaaatatcaaaatcttctctctctctctctctctttgtctcattctttggtactctgattagctgattcactggtggggattatttttatgtgaatttccccttggggaaatttaatacttaatatctgatcacttccttttctttttcatatttaattctgagggactataaatagaaaacatgtactcctcagtcccgaggagagtttggtgctgcagttgcgaaaagcaatcttcagtttacaagcactaggagtgccagggatgcccattcattctaggactccagttgccagttttctatcactgaacaaaggaatctggatagcatacatgtggtcttgcggccattcaaacgtgttggtgacattggggattctgagttgaggattctgacgacttagagtttgcaagtagtagaagtgtgaacactgtgaggtagccacatcctgaactcactgaccccaggagcacatccctagatacactgggccatttgccttaaatgactgctttaatctatggaatatcttcttccatacagcctgttttttacttttcatctgttaaagtgcttagaagcctatcaaatacagatttactttggttactgtgtattttgatttgttttcacaaaacgcaataattgtgcaatggttaatgtcattctaaaggattttgtcctacgtacttgtgggctatggaaagcttacagcagatttgcaggtcttttttaagaagcatttgatggatggtagcgttcaactgaagtgccaggagttgctttctgaattcttgtatctaaatttaactgacttggtagtaccacatttcaggagttaatggtaacgcagaaagggattcacagattccatcagtttcccactttgtggcagaatatttgacatctcttatcagtacacttcatcataagttcatgaattcatcttgctcctttctttgctgagaatcacagtgagagaattggagtttggctgagaggaggagtgaggaaggaagaaggaagagtaagtttttttttgttttgtttttgttttttgagatggagtctctctctgtcgcccaggctggagtgcagtggcaccatctcggctcactgcaagctccacctcccgggttcatgccattctcccgcttcagcctcccaagtagctgggactacaggcacctgccaccacgcccggctaattttttgtatttttagtagagacagggtttcaccatgttagccaggatggtctcgatctcctgacctcatgatccgccggcctcggcctcccaaagtgctgggtttacaggcgtgatccaccgcgcctggcccgagagtaagtcattttaaggcttgggcagtagcactgttgagaagtttgaggcacctaagtgtggaaagagggtgttacagaaagcagattggcagatgccaaaggtagacatcacatatttgaattagtgttagtagtatgaaaggcacctgcgttgtgagttgagaggatcctagtgagctggccagggaagtacattagcactcatgacattgttctaggggaaggtgaattccagtttccaaataactatgcaggattgaacaccatttgttcataaagcaagaccaccagtgattgatgatatgggtgattattattaatgacataagtgattattagaagccaagaatggtggtaatgaatgtggaagatgaaaaatgtgttaagctaaaaagattttaggtctcatgtggttttctttgtcttgtttatgcatttagtcattctttgttttctagtggaagtagaattttatttttaggaataggagttgaataaaatatttgtcaaagacaaacatttatggacatgaatgcttccctttcagcttattgactatatgtttacacaaagcagtcattaggtgttggctgtgtttgcaaataatgacaagttggtattatttcaaaggagtggcagttttacttgctttctgttgtcattgcatctaattttattacaagatattctaaatacactttatttttttaaagttgtattgattatatcttggggttttaaagtgttgcaattttgtgggtgtagcaatcactttagaaggtggaacttgtaaatttatggggcttgtataggatattcattcaaccattatttactctgtgtctattgtgtctaccctgcctatgaggccccagaacaggccctggggactacacaacgaaatgaagtgacaaaaataaaatcctagtctccaggatttcatagtgtagttagcgtgaaagagatcaagaaagcaaatattaaaatatttctccaatagtaagatgtcttacttccccaaactgtaatctatttgggtttatttctctattcagctggccctgtgagtcagcagtttctgcatcaacagattcaaccaaccacaaatgaaaaatattggagaaaaaattaaaaataacacaaataaaaaataagatataaaaaccatttacatagcatttacagtatagtaggtattataagtaagctaagatgatttaaagtataagggaggatgtggtaggttatatgcaaatataccattttatacgagggacttgagcatccttggattttggtgtctgtggggattctggactgaatcccccatagatacctggggatgactgtatttttcctgattagacttccgtattttctgtgtgtgaatttttagttagtcttgtcaaggataatgagaatgatctcatttgggatttgggaggtaaactagaaggtagaggtaaaatagaagacataaacaggaagagattctttcagtaagtccttatgagaacttagagatgctgagaacatccctaggccatggaatttcactacttcctgagtctgtcaggaggaggatccagcctttgtacagtttcctcctgtttttccctgctaccctttactggttcaagggtgagtgagtttgcatggctggtcctataggaaaccccacccaacccttttagccagccaggggcctccagaccactttgaatacactcttctagtaactgttgtaatagtgcacctattacttgcctgataataatatgtttagattgctgtctcaatagtagtatagaggaaagggaccatgtcttatcttgaaatattcagctgctagggtagtgtccacttcattgttgatacttgaaccactccacctttcacttccctaaatatgttgggttttcaacgatcccacctttctcttccctaaataggttggtttttgtagggtaaggtggaaggaagggcaaggaatttggatttaatctgtaggcaaaggagaactattcaattttaacccgtagtcatgataactattaaatggtttgaacagaagaatcacataatcaaaggggtatttggaagagtgaagacaaattcaagtggtttgcatgcttttaaatggccacaactcctagctaagcagttgacacaccatctccactgcttcatgcttctctttagcaaataaaaatctgagcttccccgactgggtgcggtggctcacacctgcaatcccagcacttcgggaggctgaggtgggcggataacctgaggttgggagttcaagaccagcctgaccaacatggagaaaccccatctctactaaaaatacaaaattagctgggtgtggtggcacatgcctgtaatcccagctactggggaggctgaggcaggagaatcgcttgaacccaggaggcagaggttgcagtgagctgagattgtgccattgtactccgtcctgggaaacaagagcaaaactctgtctcaaaaaataaaaaataaaaaataaattgagcttccccgaacagcagttcataacacggcttatttgtgattctttatcagtttatgaactccacccgccccccccccccccaggcagcctttggccgggaaacagccttcctcgagacacacatctataaaattttaaaaattgcccacacatcattaaaaatatatatattaaacagatgatttatagtcatttaatactttacaagtattcagacagattatgctctatataatattaccttaagtagatagactatgcataggaagtagggaatgcattatataattctgtctttcaaagaaatttattgtattgcgttagtaaagcaatgggctttaggttagaacttcaattaattacatggggcttaatgatacaatagttggccaggtgcaatggttcatgcctgtaatcccagcactttgggagaccaaggggggcagattgcttgagcccaggagtttgagaccagcctggacaacatggtgaaaacccttctatgagaaaaatattttaaaaatttagctggtcttggtggggcgtgcctgtagccccagatactcaggaggctgcagggggaggatctattgagcctggcaggttgaggctgcggtgagccatgatcacgccactgcactccatcctgggtgacagagcaagaccctttttcaaaatagtaataataatattaataatacaatagttaatggtattgataaaactggattttactttcattcattcaacatttattgatggcctcctgcatgctaggtaggtagtacagaccacaatgtggcttggcttgtggcctgatagaaggctaggcatctctggagaaaacacttaccaaatctggggattcaagtgtggtaagtgctgttgtgagtgactagcacatgttaggtgctgtggaagcccagaggagcagcagagagctgatcagtgctgttgcctgggggcctccagggaaggtttccaggaagttggcttccagctctgttttgaagaaggagcaggaaagatagagctgcacaggggccttctgggcagggagggaaggagtgatgggcaaagggagtgaaaagagatgaggctgggaatgtagtctggggaggccagattgcgaacagccttatttgaaattgatgttacaggcgtcaactcacaacccccacctcatgatatttagtgggcttttaagtgtaaaatgtatggatacagactcagagtagaaatttgggagattcactcttggtggtgtacattctgtgggtttggacaagtgtatcatgacgtgtatccaccatggtagtatcaggcagagtcgtctcattgccctgcaaattctctgtggtctgtgttttcatccctccctcttctcatattcactatggttccatctctacatttgaacatagtgtatttgaggatcctggagtcaatggtggttaaattttagtttaaagagcttgtttttaatttttttttttttttgagacggagtctcgctgtgtcccccacgccggagtacagtggcgcgatctcggctcactgcaagctctgcctccccggttcatgccattctcctgcctcagcctcctgagtagctgggactacaggcgcccgccaccacgcccggataattttttgtatttttagtagagatggggtttcaccgtgttagccaggatggtctcgatctcctgacctcgtgatccacccgcctcggcctcccaaaatgctgggattacaggcgtgagccactgcgcccagccggttgtttttaatttttggggcacctcttaactcccacagtgaagcctacaggaggaataaacagaagtatacctccatgttggtaatatacaatattatcttagtttacagttttcaaactgctttctctcacatcccctcagtacttctgcacaaaaggtagtgactattgtttccattttacagaggaggaaacaatatggaagtgactaattacttgaagatgacagtgatggtactagcactcagactggagtcttcttcctccattcttgtgttttattcattatatcatgttgcctcttgcttctggaagcattaaattgtgggcccttccaaacttaaataataaaataacacatttgtggggtggcatacagtgtttccaagaatatgctgactatatgtgtgtgtaaattatatacagtttattacgtatgtgtaaagaatgtaggttgcaatactagaaacttacaccatgatctctacaaggtagtgctggccttctcttgtatcactgttatgttggcttatcactgaaatgtttaaatatgatcttaatattcagactattacatggaaaaatatagaacattctaaacctaccttaagtgacccaaactattgggcatgacctttagactcctgtctttgctgctttaatgcccattctacttccctttcactacatagcaaacaggcaatggaatagtggttctgtcttccaaagaagtgataatgagcaacaataaaaactgtatctagtttctttaatttaaaaaataattcaaaatctccgttgaaactttaaaaatgatatccaatcaatagtaacattctagccaaaaaaactgtacgagtggccaagagaactgtattttagggatgtaagtaaatgtagaccaaggcttcccaagtggcttattaagtataaattccagtgacatctgcttaccatagtacttcattgccatgagcacaaggctgcctggtaaaccaagagtcttcatttgggccacatatatcccttgtagtcatggccttcagtttcatgtgaaattcagtgtgaatataaaaaatccagccgttattggagagtctctgattttacagtgagattgtgtgtgttctttctcctcccaccataattagttgtttagttgctaatttgtttttattttcacttcttttttttccttttgactattttatcagatgcgattattatgtcacttcctctgggccacagtatacccaaattcaggagtgatgatgatgtatttttaaaatgaacttcaaatattctcatatttagttgtgtattgtaaggtaaattcacttaacccaataatatttttatgtagtagattctattctgttatattcctattccaggagggatcctaaagtcagttttatgaaagaatgaattttgaattttgtgaacttttcaattgatttgaagtcatggagactctggggtattagtaaaatttagcataacagaaatttgtatttctgtcttctttcagaatgctcacagttgttgaatctaggaatgtttgttgtatttaattatttgttttgactgaagaaattttatagtttgcattacaagaataacttgttctgagaaaatcaagctgaataatactgattcatggcatgtaacattgctgttggatggttgtgaaacagaaaacagatctcattaaaaaaggtttctctagagattgttccatattttctcccctttttagtatagaagcaactgttattttaaaaacagtactttcttctccccctcaaaaccaccaccatcagagaaaatggatatgtttacattaattggcactaagtagaagaaaggatctgaaaggcaggcagcctgctggggatctcatgggactggctgtccttcagagagggtgggctgctgaaaggagattaacctatgtaactgggcctgggcgagtgtgaagatttcccagcattttaccttatcagggattctgttttcttccaaggcttccaggtaccgatggcacattattttctacctgaaaattagagtttattaaaatacctctaatttggcagagggagaaactccatttgtaaaatcccttgaaggtagtgatgaagcaaattactataacatttggataggattttcctttattgtgataaaatataaatagtaatgcaatttaccgttttaacatttatttatttatttttagagtcagggtcttgctgtcacccaggctggagtgcagtggtgcaatcatagctcattgcatcctcagactcctgtgctcaagccatcctcttgcctcagcctcctgagtagctgggattacaggtgggtgccaccacgcctggctaatcaaaaacaacaaccacttttgtagagatggggtctcgctctgttgcccaagctagtcttgtacttctggcctcaagcaatctttccacctggcctcccaaagccctgggatcacagtcatgaaccaccgcacatggcctcattttcagcatttttagtcatatagttcagtggcattaagcacattccggttttatgtacaactaccaccctatccattgccagaactttttcatcttcccaaactgaaactctgtaccatttaaacaatagtccccattttccccttctcttagcacctggtaaccttcattctactttcttctctatgaatttccctattctagatatttcatataagtaagtggaatcatgcatcatttgtccttctgtgtctggcttattgcactcagcataatcttttgaaggttcatccacattgtagcaagtgtcaaaatttcattcctttttaatggttgtgtagtattttattgtatatatataacaatttgttcattcattcatttgttgatggatgtttaggttgttttcactttttggctattgtaaataatgctatgaacattgagtacctattttcttgtttttggtgtataattaggagtgcagttactggctcacatggtaattctacgtttacttttttgaggctctcccagactctctcccacacctgctaagccattttacattctcatcaacaatgtgcaaatttttgcacatccttgatttttacacattgttgctgacacttgttattttctgttttgttaacaagagccatcctagtgggtatgaagtggtaccttgtgattttggtttgcactcattcccctagtaactaatgatgttgaacctccttttatgtgcttatttgccatttgtatatcttctttggagaagtgtctattctagtgctttgcctcttttgaattgggtggtttgttttttgttgttgttgagttttaagaatttttaaatatattctgttaacttttttcttttttgtctcaatttcctggtgatgagatatattctggatgtgtatcccttatcagaagtatgatttgcatagaatatggtttttagtgaggtatttctcgagaaactgcatttttttccatttatttatgtaagtgtcttttcacatctaagatacttacgtggaattccataacatacggtcatataaataaaaggaataaaacattttttaaaatttcctgtttttaaaaacccaccaatttttgttcacattaattttaaataaatcatggttagaataaaagatacctagccagcataagagataacagtccagtgtgtgatataacattcaatgacacagcatttattcttcaaatgaaatttgaagggccatttggcctttgtggctgtagaaatttgatcagtgaagaaaaattagctgccattccttagagtctttgttatttttcccttggtgttctccttatttaaaactttcgtttgatttaagagttgtaaagcatgtagattagaaataagaattttcgtccaggcgcagtggctcatacttgtaatactagcactttgggaggctgaagcgggaggattgcttgagacatagcaagaaaatatagcgagaccctatctttattttcaaaacaataaacaaaacttttaaaaaaatataacaaaggatataagtttttttttttttttttttttttttttttttttttttttttgagacagggtcttgcccttttatctaggctggagtgcagttgtacaatctcggctcacaggagtctcgaactccccagcctcaagtgatcctcccacctcagccttcctagtagctgagactataggcctgcagagccacacctggctaatttttgtttttttgtttttcgtttttgtttttgtagagatggggtttggctatgttgcccaggctggtctcttactcctgggctcaagccatctgcccgccttggcatcccaaagtgctgggattacaggtgtgagccaccgtgtctggccggaagtaataatttttaaaacggctccagttctgccttttcatattgatatattgattagtattactgaaaatctggcagtaactgtaactaacaaaagaagatactcaaaagaagtgtaagaccttttgaacaggataagaatgattaagattttcaggaagagtgaattacaacagagaaagaatgggagtggggtaaaacaaccaagtcgatttcaagtaattaaagtctagatgagggtttctcaacctccactctgttggtattgggagcccgatcattctcaggactgtcctccaacttgtaggatgtttaacagtatccctgacctctgcccactagaggccagtggcacctccctcccccagttacaacaaccaaaaatttctgtaggcattgccagatgtcccgtggggggcaaaatcatctccgtcttccctcagtgctcagtgtgataatagcctgagctgagttctgatggcagaatggtgataaaaggatgaaaacaagtgaaatctcaagtaaaggaaaagaagaaaactatcaataattaatatgtattaagcatctactatatcctaggcaccactgggtgctatgctatggtcatttaacataaataacaataagaatttattgaacacctcttttatgggagagattggagctacagaaatgagtaaaatacttgctgcctttaaaggctttgttgttcaataaagagacaaatggacaataaattgtagttccaagtgaaaatagaaatatgtacaaggtactgactgagaagataattttatttgggggagtcacagagtcctgggatgtctgagctgtggttgaaggatgagtagcagtgttgccccttggagtgggttttgcagatgaggtaataaattgcctgaggcaatgtatttgcccatggccttttagtggctgaattgaagaccaagcaggtggcaaagctctctccagactgtcactgccgtccagggaataaaaggcccagaccataattaaagctgggatgattgcatagggcaattatacattttccctgaggcttggatagagcgattcgcacctggcaaatcccagcgccgtgcaattttagtgacagtttatacacttcacatattgttgtaaatcattatccaggcaaggaagatcaagagtcgcatatctaactcccaccaggtatcagactgcctgccaagttacattgacgacacattgttgattttgaaaaaatcaaataagaggtacacttgcatcctctgcttaacaatttctttattaaccagcagtaggtgtggtgtaatggaacctagaaacagatgggaccatatggcttgatttgtggagcggcaatatattgcttaatctcttacatagcagtatttgctatgtaagacaaatagttattcagtggcagtttacataatatatattaacagtagggtgctctttggatttccataattatttatattttaaatattttacattggaaaagtaaatagtatgcatcaaagaaaattactaatgagtttcttaagctttatcacgtgtgccctgtaattctgctttttcttcactgccttctgttccattagcaacagtaatgttcagacttgctgatgtggctgccaggttatttaatttgactaaaagtgatgtgtgataattgtgtttatttaagattttgttcagaatgtttttaaaaaggtcactatgttacttttgcattatatatagtatgactgtaaaattaacttatctagaagaattacttgtatacactaaaagttttggagacttttgagattagatgcaaaagctattttctctctcagttcaaagaaaacaattcattgttattcattccatttcatcttacctgatgttttatttttgaaaaaaatgtttaatgtgatagttactgatttttagttttggtacatttgaaatactaaagactgacttgcacacaatagctgctgctgtttgctcactctgccattgaagcctggaaatggcccctccaggccgggtgtggtggctgacgactgtaatcccagcactttgggaggccgaggcaggtggttcacgaggtcaggagttcaagaccagcctgaccaacgtggtgaaaccctgtctctacaaaaaatacaaaaatttgcctggtgtggtggcgcgtgcccgtaatcccagctatgcaggagcctgaggcaggagaatgtcttgaatccgggaggaggaggttgcagtgagctaagatggcgtcactgctctccagcctgggtgatagagcaagactctgtctcaaaaaaaaaaaaaaaaaaccaaaagaaaaaaaaagaaagagcccctcggcactagagcccaaggtctaggcctcccctcctccctgccatgtaaactcctctttgacagaaattacttagccatggtattttcttccacgcttcttatactcccatcctcacgcttatttcagctgtggatgactttatcttttcaggagcccactcattcatttagcaaacatcaaacacataatatgtgtcaggctctattctaggtgctagggtacagtggtgaacaaaatggacaaacgtccatatcctaattgaggccgtattgtgctagggaaagaaacaataaataatttttaaaaagtaaaatacaacacaacattgaaaaagaagagcaaggctgggtgcggtggctcacgcctgtaatcccaacactttgggaggccgagatgagcggatcacgaggtcaggagtttgagaccagcctggccaacatggtgaaacccagtctctactaaaaatacaaaaaaaaattagatgggcgtggtggcgggcacctatagtctcagctacttgggaggctgaggcaggagaatcgcttgaacccgggaggcagaggttgctgtgagctgagattgtgccactgcactccagcctgggtgacacagtaagactccatctcaaaaaaaaaaaagaagaacaaagttgaaggactcgcatttcctaattttaaaacttaactacaaatatacagtaatcaaaatagtgtggtattgatgtaagaatagacatagagatcaatggaatagaattgaaagtccagaaataaacccgaacatctgtggccaattgatttttgacaaggatttcaagaccattcaatggaaaacagtccagttctttattcagtggagaacaatgtcttcaacaaatggtgctggggcaactacacagccaaatgcaaaataataaagttagatccctacctcacactagatataaaagttgactgaaaatgatcaataacctaaacataagagctaaaaccataaacttttagaagaaaacattggtaaatatttataaccttgaatttggcaatagattcttaggataccagaaacatgaataacaaaagaaaaagatttcatcaaaattaaaaacttgcatgcatcaaatgacataatgaaaataaaaagacaacatacagaaaaggaaagaatatttgcaaatcatgtatctcagggtctatatatccacaatatgtaaggaacttttaacaatgcaacaacaaaaatacacacaacccaattttaaagtgggcaagggacttgaatagatatttttccaaagaagacatacaaatggacagcaaatttgctcagtatcatgaggcattagagaaatgcaaatcaaaaccacagtggaccgggcacagtggctcatgcctgtaatcccagcactttgggaggccgaggcagggagatcatttgaggctaggagttcaagaccagcctggccaacatggcaaaacctcgtctgtactaaaaatacaaaaattagcggagcatggtggcacgtgcctgtagtctcagctacttgggaggctgaggcaggagaatcacttgaacctgggaggcggaggttgcagtgagctgagatcgcaccattgcactccagcctgggtgacagagcaagactctgtctcaaaaaaaaaaaaaaggcccaaaaaacaaaaaagaagccaaacccacagtgatatatcactacatatctactaagatgctataataaaaacagaaacagtgaaaaataacaagtgtcagtgaggatgtagagaaattggaattttcatacgtttctgatgggaatgtgaagtggttcagatgatgtggaaaatagtgtggcagtctctcaaaaagttaaaagtaaaattactgtatgacccagcaattccactcctaggtatatgctcgaaagaactgaaaacagctactcaaacagatacttttgcacaaatgtttatagcagcactattcacaataacctaaaggtggaatatggactatatctatcaattgtttatacacacacaaacacacacatatatgattcatcacacatagtttatggtttcatttatgtgaacaattcagaataggtaaatctataaagacagaatgcagattggtggttgccagggtcgatggggagggaagaataggaaaaaactgctgaatgtgtatagggttctattttggagtgatcaaaatgttttggaactaggtaaaggtgatggttacataacactgtgattgtgaacatattaaatgccactgaattgttcattttaaaatgggtgattttatgttacgtgcatttcactttaataatttttttaaaataagtaaaataatttacatttatgtgtgtgtgtgtgtgtgtgtgtgtgtgtgtgtgtgtgtgtgtagtcataatgatagttttagtggtaagtcctttcgggaaaaataaatcaggaaaggttgatagtaaggtaggggtggtgggggtttgcagtttaaaataagatagtcggccaagcgggtggctcatgcctgtaatcccagcgttttgagaagctgaggtgggtggatcacgaggtcaggagttcaagaccagcctgaccaacatggtgaaaccccatctctactaaaaatacaaaaattagctgggtgtggtggcatgcgcctgtaatcccagctactcaggaggctgaggcaggagaatcacttgaacctgggaggtggaggttgcagtgagcagagatcacgccacggcactccagcctggatgacagagtaagactccatctcacaaaataaaaataaaaataaaataagatagggaaggcttcactaagatatttgagtaaagtcccaaagcagatgagggcagcagccatgtgtatactaacatgaagaacgttggaaaaacagtaagtgctttgaaatagttgcatacttggtatgtttgagggaaagtaaggaggcatttgtggcaggagtagagagagcaagggggagagtagaaggaaaagaaggcaggaaggtaacggattcatgctcaagcaggatcattctaatatgccaccagtactgagaagtagtggtgtaggaccttgcaggccattgtaaggcttctggcttttacttagagtgaatcaaacctttggagagattggagcagggaaagattgtgacctgacttatgttttaattgggccaacatggctgtggtgttatgaatagagggactagtgtaaagcagggagactatagaaggctactttaataattcaatgaaatgttctgcttctgcttttcacatactacacaatctcatccaaactagtttccttttcccctcatatgctgataaatttaggattccatccttcagttcagcctcttctttgagctccagaccctgaacccacctaccaactgaattccattttgatattgtgcttcccccaactctctatccagctcactacctcagactcagtaaatccaagatggatgtctttgcatctgtgttacccccgacttcatttagttcctcctgaatttgtcattttcatgaatggcatgctcaggtgcccaagaaatctggactcttcctactttattgattcctagtcaatagtcaagattttgccatattctacatactttttcatgtaaattttaaaatcaccctatcaacatatacaaaaaagtactgctaggaatttggtcaaaatggcatggaatctgtagattgatttggggagaactgaaatcctaacattattgattttgcacatccatgaacatggtatatttcttcatttaatttctttctgcagtgttttgcagctgtcattttcgagttctccctccaccgccccacctttttttggttaaatttatttctaagtgttttatggtttttgagctattgtaaatgttttcactttttaattttccatttgttttctgctggtaaataggaatgtaattgtttttgtacatttatcttgtatcctgcaattgctaaattcactaattagtttcaacagttttttcaatttttttttggtagatttctttaggatttccttactttgttctttctgttgcctgtgaatacagaaaatttttcatttctaatctttatgcttgtatttggttttgtttgtttgctttatcgcactggctaggacatccatacaatcatgaatagcagtggtgagagtagatttctgtactttgtttctagtcttaggagaagtattcagtatttcaccactaattattatgttagctataggttgtagttaccctgtacagattgtggaagtttccttctatttctagtttggtgagaattaataattttttaaaactcatgaatgggtattgaatagtgtcaaatgtttttttctgcatctattaacatgatagtatggcatttctcctttattttgttagtatggtgaaacatgctaatttattttcaaatttaataccagttttgcatttctgtgataaacttcatttggtcaagatgtgtgttagtcctttctatactgctgggtgtgatttgctaatattttgttaaggatgtgtacatctgtttttctgaatactatttgtgttttctttttttttctaatatcttataagatttttgcatcagggtcatgctagcttcataaaattatttgggaactgtttgctcctttgtattcttaagagtaggtgtataatttcttctttaaatgtttgatagagctctccagtgaaaccatgtgggcctggtgatttttcctgggaaagttttaaattgtgaattcaatttctttaatatatttaaagcagttcaaattttcatctttctgtgtagaccaactatgttacctacccctaataagggtaacccacacccttattaagacataggacatttcggccgggtgcagtggctcactcctgtaatcccagcactttgggaggccgaggcgggcggatcacgaggtcaggaggttgagaccatcctggctaacacggtgaaaccctgtctctaataaaaatacaaaaaaaattagctgggtgtggtggcgggcgcctgtagtcctagctactcgggaggctgaggcaggagaatggcgtgaacctgggaggcagagcttgcagtgagccaagatcgcaccattgcactccagcctgggcaacagagcgagactctgtctcaaaaaaaaaaaaaaaaaaaaaaaaagacacaggacatttctgttaccttggaatgtttccactaatgaactttgggtaaatagctccttgtaagtcatgaactgcatgaattgagcaattataactgaaaatgcaaatgcattataccttttttacccaatcaagtaagagttttcattagcagttttcaaaaaaaataggaatttttctacattttgtttttatgaaaagcaggttatcaaattctgcattattattttttatttaggaagatgttaactttctaatttcttctgaagatatcccacattttgtcagttgatgccagttttcaaatagacagtcatgaatatattgtagatttcatgtactgtgggagagtctcttgtatagcaggttgagcttaagcagaaagggctttgccacagtatggaacactatgaagcaggtaccaagaatgaagtagatttatgtcctggtaacagaaaatatcctcaagcaagttgcagaatgcttgaatctctttaaaaattcaaactaatgctatattttttgtaaggactttaatatgtaaagatatgcagagtaaaatatctataaataagtccaagctaatttgagtagtcacatcaaagagtgcataagggtttgggaactgtgggtgatggtcagatgagatttaacctgattatagaagtttgaattttcataataatagcacattaccatagaacttatgtaattagaactgtgaaggcctgtagcagatttactgatgactagagggaaaatgcctccagattttgtttttgtttttgttttagcagttactttgaagctgttgaaaaccagctcataaaatctacacatagagtgttctaaatctgttttttttttcaaattatggcataagaaagtattgcaagtaaagttcaaatgcaacttaggattcaaataaaagttggatattactcttgctacctcaaaactttaaaaacattaagtacttaataacatgaaaatgcttggagtataccattcattgaaataggcagaatataagatatatttataaatgaattatttaaaaaagtttatttagaaaaaatacacaaaaatgttggtagtgattggtttctctgggtggataaacagtggttatttgagccgccttttttaggaacttttccatatttttctattttttttggcttgtttttcattcacacaaatttccgagaagggaagagaagaaagaaaattcttagcatttacaagcatgctacagggaattctggtgctttttaacaggagaatggtaggatcagatatgcattgtagaagtctggcaatttgtagaagagatttgggaggtctggagggagatcaagaagatggagaggaagagttgtttttgaaggatgtttagtaaataaaaaatcggccgggtctggtgtctcgcacctgtaagcccaacactttgggaggctgaggtgggtggattgcttgagccaaggagttcgaaaccagcctaggaaacataaagagaccttgtctctacaataaatccaaaaattagctgggcatggtggcatgtgcctatagtcctagctactcgggaggctgaggtgggaggactgcttgagcccgggaggcagaggttgcagtgagccgagatcgtgccactgcacttcagcctgggcaaaagagtgagaccctgtctcaaataaataaataaataaataaataaataaataaataaatactcaacaggattggcaacagggtgggtgggagtagaatgaaagaataagggagaggttaattttccgccttttacatttgtcattttaaaactaagtcttttcaaatctattttgtaactgcacattacttctgatttaggtaacataaataggaaactgcagttcttctctttctgtgacaataacttaagtctctgcttaggtggaaatcccaatttcaggctgacttggaaaatactatttatttcaagtagattaatatctgaatataaaaactatgatgcaaatccttctaatgtcttcaacctgagtaacttcactgggtaacagtccctaggccaacttaaaaaaaaagcactgaatttcctatgcctaggattcaaaacttaatctgtgtgcagccattagcaaagcaatttctctccaaatattgaaattcacattgaacacatctttctctgaaattctgcttaatttctatttaacaattacccaaatctaaaagatcttgtgattattgagcagaatcaggatttatgctatatcagtggttctctacagagggtgacaggagatatttgacaatgtctggagacatttttggttgtcatcacaatttgatgggaatgtgtgctactggcatctataggtggaggccaaggatgctgctaaacaccctgtaacgcacaggacagcccctccacacaaatctagcctcagatgtcagtagttgagaaacctatgctagttgaggttgagaaacctatgctagatctttagatcgatacagagatgcaagtgagctcatgttttagtaagagactaaggggtttcctcttagtcatgtctaagaggttaggtatatccacatcacagcgttgtttacagttaaggaaatcattggtacatatgggtatagaaatttgggactcattagaaaaggggtgacctgggaacactgaggaagatgtagatttgaggatttagggttgatggagtggtggaggaatctaactggttaatctaacctaaagctgacaggtgctggctggaactgactgccggagattgaggtgagtgctaagtaaataggcagtttggagcccctcactaccaaacaattcgggaaaactgatagccctccttgccatggaagcgaaggagagtgtgacataagggaatttgtcataaatcatggccaagtagtgttcttggggtgtgagatgtttctacaagggctagttcactgctgtctttttcatggcatcatttgcatttctcaatgagatgtcacttgggggctaaaggaaccacaggctccaggggaggtggggttctccactgggacctcaatcagcatgatgccacacaggataagtgacatatgataagtacaaagcatcgggcaggggatcaggaggactccatggaggtgactggacctaaaagaggggagaggaagaggtcaggaagcagaaagacaggaatgaagatacggagccaggaaagagtttctagtctataacgaataatttcattcttgggctactcattaattgttccatgtgttagttttgtaactttatgagttgttgtattagtctgttctcacactgctggtaaagacataccagagactgagtaatttataaagaaaaagaggcttaatggactcgtagttctgcatggctgaagaggcctcacaatcatggtggaaggcaaaatgcatgtctttcatggcggcagacaagagagaatgagagccaagcgaaagaggaaaccccttagaaaaccgtcagatctcatgagactcactaccaagagaacagtatgggggaaactgccctcatgattcaattatctctcaccaggtccctctcacaacatgtgggaattatgggagctccaattcaagatgagatttgggtggggatgcagccaaaccgtatcaaaccatagtggttgcccaataaatactgttcttaacattcttattcattgttctaatgctattctagttatggattaaaattcttattttttcttaatctttgaacttttgttgaacttatatctgataagaaatattgttaacagcagggaccatgttatataaaattgtctaggattttgttttaaattaaaatattttattttgtaatatttgatacattcaaaagaatatgtagcacacttataaaaattatggaatattataataatacaacatataatataatatgacagtataacatactaatgccacatcttcttgttgggctactcccctgccttctgctcagaagcattaatttctgaattctgtgtttttattgtcttgatttttaaaatgaaatttaatcacatatgtatctctaggatatttagtttttatttctttttaaactaaatgatttcatactctatgtcatcttctaggctctgctgtttttcactaaatgttatatttctaagattaatctttgtggatatcattaatatgtttttattactatatgaaattcaattgtaagattatttcgtcatttattcatcctctagtcgatggatatttgggttatttccagatttttgcttttttgagtaatactgctatgaatattctagtatgtgcagtggtttctttatgtgtatatatatatatatttatatttatatttatatatatatctgtgaagggggaaatatatatatatatgtacaatagtttctttagggaagtggctttcaatttttttaaaaaaactatgatccagtaggacatatacacaaatacctctattcatctcttcaaaaacttcaagaagtagaatttttccccactatcaacaatgactgataaaatctagtccattttttaaaatgctggttgagatccaatgaattggtttcattaatcatttctacctgatgtttggaaactagcctaggttatatactttgttgtggaattgctatgtcttataatatacaaatttcaactttacaagataatggcaaattatttccacagttcttgaaccaactatttctataaattcttattattcacattcttatcaacacttgccaatccagaccaaatttaagttttctacaagaagtctattaagttagtaaattatatgaagatattttaatgatttttacctatgttctaattttataactaaacatttctggcccaaaaaagtgccagtgtttctagaagactggagaatgctgagttgtccttcattctgtttgagattttgcatagaatgtcttcacattttctcttcttaaaagtacttcttgcttgttattgtctttgctttgctgctcaagattacagctattgatctatctcagttgtggctttgtgctggattattttaaagttaagcatcactgataagttatctacttagtaaaacttaaacctactgagaaaacagctccgtcgttcctgatgtagtccgatccatttcactctcagaagactggaatgtttatggacagttggtgatgtcaactttaaaggacaaatgatggttaaatttatacaagcagatggtttagtggaaaattttggttgagtttgtcaaaatgtggtttttaatatctgaagcgacacaggaagaacttagtgtagttagtttgtgggctttgccataatttttaaggttgagaatgtctttcctgatactttctttgcacttgctagggtggtgctttgataggctggtgtatcctcttttggcttttgctgtgtttcatgactccttagcacataaaaatctacttgttcatctacattcagtgactaaattgacataggaagaatttttgctctgcacgatgaccaacttcattattcatgggatatgtatcctccgtgactttgtaaggttctttccttaatctgtctgacctgagtggctccagtttaagttttcaagtcagtggtacaatgaagcctagtcacccattaataccattttatgtacatttcaacaatactaccatcgtcattgacaaaaatatttcaacatggtcttgtactctgtcattttctgtgtgtttttctggcttgagaaggtacagagctcattacaatggatgagctcacccttactccaggacagattcagtttttggttttgttttgtttttaatttctgaaattctttcccaaccttaagaatctaaactgcaaatctaaagaagtgcttgtttgtgtggtgggactgtagcatttaacagatgccagatggaaggagcagacgaatgatagtgcagcaggattagggcctaattgttgtcatttcctcagttacaccataactgcattttcagacttccacctggagaaaaatatagcaagttggattagcttgagcttatgccctaggatccatccagctctgacctagggaaccgggaagctgtcctgtgggtgccagttacagattctggggcttaccaggccgggtgtaatgaagaaaatacattacttctggcctggcccagagttttagactctctacaatgagatcactctgttgccacctatgtttaaataaaaacaatataaaacaaagcaacacatctcccccttcacctagtaaaccatttagtaaggccagaaatagcacctccccaatattttattacatgtttaagactctgaatatttgaagcaggctaatggcatcatgacttagagttcttattccttaggcaatggagattttgaatctgggaaagtatagctcatgccacagcacccagtgcatgatagagtctcaataaatacttgttgactgaatcaaagaatgaatgaaagtgttgagaagtatatcaggatagcttccgcaaggaggttttaaagggctttttagaaataatctctactcctaagcacaaggaaagatagtaacatgtttttagtaggactaggcaaaatggccattcattcttcttaggatttgtatttctcagaggaccaaagcgggaaggaggaaaagtgaaaggtcatttgttgggtttaccaccatgaactacaggctggagtgaagttaatacattttctaataagccccataaaagtggcttgtgagttagcatatgagagattctgaatgaaaaatagggaacgttttgaagaacatgctctgtagtctgtgtggtgtgtctgtgatgcactgttcctgctctgccaccagctcacattcctcctgttttggctgaactgcattgattttgagagagatggggtcatgggggtgtggagaggggagagtggggggtgagagaaagggagagagggtacgagtgcatacatgtgtggttggaggggagctcatttctctggttcccaagcaggcatcagagtttaaaaagggcatccagactctcctgaggtgactttacaacaatgagaagaaagttgaatgtgcctagttacctgcaaaaccagttttaaacacctactttaaacaaagagaaatatctcttccaaattcaagctaagctgttccacctgggtattgtctgatatttagaaaaatacaatttatctgttttctgaaggacatgctgggaacattgaaaaaaactggttcattgactacgtcaataaaatattacttgctgcattgtttaccaaaaagctggaacagttgtataattcttaaagttttaaggatgcttggtgttttgatgggcaaagagttataaagcgtcctcaaaactaatttgatttgttttacagtttgcttaacagtgatattcttcagtgcccttccagaacatgtagatgaaaagataagcacaatgcattttaaaagttagagttatattttggaagtagaaatgtatattgagatctcttaattttactaaagggtatagattttttctgaccaaaaaattgaatatgcctttagaaaacaaaaaagaaagaaaaaaaattagatatgcctttcgaagtaaaattagcagttacacagcaagagcttggtgtaaatgttcattgaataaaaggatatttattcctgaaaaagctgtctgtgaatcagatttttgtaaattgaatcatatttttacatgtattatgacttatttcataagacaaataatctttcctaagtttatatttttgataaacttagattttcatgggtcagaattgctggagtaaggacaccttttgatgttgcataagatctggggtattctttttgaggttgccaaagtataagaggtttggttctttttaagggcaatcattatttaccagatgataaacaattcaataaaaatagatttctaaggatctacattttgtaattgataatcattcatgctaaaatagttggccttgattctgttctccttgagaatgtgggatgttttataaacacattaagagttacaaatagagtagggcaggaagaattgatttcattgtcagtaatgtaatgatataattttgtgtatacataaaatttcaatcaaagcagtctaataaaaataaaaaagcctgttagagggagatctatattaagaattgcctttaagtaacatgggctgctttgttctatgagttaatggcccattttgcttctgttttctcatttgtctgctgagttcttgcgatttaagtagagttttaggacaagtaggagctcgtgatgaatggattgtccctgttagaaaggtggtcactacctgctgtctaactggaaagtgcaagacttatcttgagcatgaaagaaacatggagccacattttaaagtaaatagcacacaactttctgatgaatacaggaaacccagtgttcctgtggtcttaacaagagctggaccagaatatgtgggcaccccagagacactaatcatattatactgcttcaaagcgttttgaggaagggtgggaaaaaatgaatctttgctaataaaacgtttattcagaaataaattcaattatgatatttcttctgaagcagaatcagtgtttggaaagacagtgggcaacctgtttcccactcttctgcagtcctcttctcaatttcctattgtgatttttctgacttgggaggcatttttcagttgatataaaatgcaaactgaaatgtcttccacccttcttctcctctggccatgttccctttccaaaggcaacaaatgtggtcagtttcatgtgcgtcctctctggcacatgaaagtgttttcccttcctctctaagctattatattaaaagggttcaaaggacgatcaagttaatcacatcctttagtaaagcacacaaacactctgtattcccatttcagaatgtctccccacttcctcacttccaggtgccaagtgtcatgcacatcacaaaacatatttaggagtgttgttttttcccacttgagagcaccgcctacttccatcataacatgatcagtgtatgatttgggagttgattgcagtgatatttttgcatctgttatacataagtgcccaaatacttgcctggctcttctgcctctttatccagctctggtcaccttctgtatcataaaggtgaaaagagcccagcagtaagctgtattagtccattctcacactgctataaagaaacagcctgagactgggtactttataaacaaaagaggtttaattgacttccagtttcacatagctggggagcctcgaaagggaaatttacaatcatcgcagaaggtgaaggggaagcaaggcacatgttacatggcagcaggagggaaagagagaagggggaagtgcgagacacttaccaaacaagcagatctcatgagaactcattatcacgagaacagcaagaggggaatcttcccccatgatctaatcacctcccaccagatccctccctcgacaagtggggactacagttcaagatgagatttgggcgggggcacagagccaaaccataaccgtaaccaactctggttgcagggtgaacaccctgaaacagcagtgctcatttattctgagagtggagctcctttttctgaaactcctcagagtgggacccttgcagtggctttgttgtcagcccttctggcagacgggcccctgttggagtttgccttttgttttctatgcagaacacacctctgcttccccacactgtggctacttcctaccttttccttgctcctcaaatctgtcacccctcctgctgcctgtctcactaacttctctgcaaccttggagttttcagagggaacaccctcatcatcctgtgaccagatagacaaacctgcctgtatctgctcccgtttactcctcttcccttctgttgtcccacttctatcttttgccacatgcatctctcctttttatggataatcagtaaaatgagtaagattctctccagaagcctcatctttaaacaaaacacaccacactgaccttaccttcctagtaactaccacctctgccaggtctcccagctctctcatctgtccttctacattgttttctacttgctcccccatctgatctgttctccatataagcagctaggacgatcacttaaaaatgatcaagtcggccaggcgcaatggctcacacctgtaatcccagcactttgggaggccgaagcgagcggaccacctgaggtcaggagttcgagaccagcctagctaacttgacgaaaccccatctctactaaaaatacaaaaattatctgggtgtggtggtgtacacctgtaatcccagctactcaggacactgaggcaggagcatcacttgaacccaggaagtggaggttgcaatgagctgagatcgcgccactgcactccagcctgggagacagaggaagactccatctcaaaaaaaaaaaaaaaaaaaaaaaaaagatctagtcagatcatttaacttctttgcttttcaaacccattcaaactggacatggtggctcatgcctataatcccagcactttgagaggctgaggcaggaagatcacttgagtccaggagttcaagaccagcctggacctcgtctctacaaaaaaaaaaaaaaaaaaaaaaacccattcaaaggctcccctttgcactttagataaaacccattttccatatgctgctttccagctccagcaggacactcgtgtcttctcttgcctcacttccagccactcacacccttgcccactcttccttggccacagtttttcctccagttacccaaatgcatggaattctctccacccctgtgccaccctcttggcatttttctctggaggtctcactctacagcccctggagtggccgcactttctcgtcctcttgatctcattgtcacctcctcaaggggtcttcaccagaagtccaagcaggtccctggccccacaatcatgtttgttcctgcataagatttcatggcttgttaatatttacatgtttcatatccagacagtttctaagccctgtaagggcaagggccatgtctgctttgctccccactgggcagggcctgacacatgataggcattcatatcagggccatttgctgagatatgtgaatgagtgaatggaggctgacatgcagctcagctcggatttgtcctttcctttaggagacagagccaacctctctgttgtgcttcatgcccctttagagccacaacgttttggagattgaggagatcttggagggcttctctctcacatatccgccatttgggctccatctcccatcctcctgcatttcagtacagctcaggcccagccttggattcagggggtcttttgctgtccgtctcgccttgtcaggggacgcacccatgtggctttcctcccatgtcctttgggagcgggattatggtgcagtggtttaggatgtatggagccaaactgcaggggtctgaatcctggcttactagtggtgtgacctttacaagatacttaatctctgtgttccttggtttcctcacatgtcaagtggggttaatgagcacatgcagctgtgacagtgattcggtgagtaaatgtacttaaggcacttatcatgaagatagtcaatatgcgttggccatctgcctctctcccctctacgttcttcttatgatctccatgcactgtaatccttccaggctcttcccagtacccgcatagtgagaacagtcagctactctctacagtctctttagcttagtcctcttcttactcttactttctccttttccccctttttctaattcagtgttgttgtttttttaacctttttggggtcacaggctcttttgagaatttaaagaagaatacctatggactgttgccttagaaaaactcagtatttgtgcaatcacccaaaatgagcatacaattcaaatgtccacagatgccttggaatctctctacggccccctagatagagctcccctgtctctgttgtcttctttggtgctgtggaccaaaggtattccacccagaaaactagaactgacccttcatggatatttaggaaacctcagaatacagctagaaaagtctccttccagaaggtgaaattatgataccatttctatgtgtatccaactgcatggtactaaacgggtatatgcataaagtgattatgtcttataatacagcttatgattgctactcatttgggacatatgggaatgccaggctactttaagtgaggacaaatttgaattaaatatacgtgtgtgtgtgtgtgtgtgttttaagcccagtttcttctcaagttgtacggtaataagacatgatatatgtgtgccaatggtgataataacagccagctgttttctagatagaagtccttttggacatagttttatacttgtgtgtaaagtataaataagttattataaagtaaaataagcatttattatggctgtattaattaccagtgtacaaaaagtgctgcagaaatagtctagataacaatatgtttcttggaggggattaaatgttccttcagcaaatgtgttcactttctaaattggttagtaaactgtcttatagataccaaggtatacttaatgctggtcatggattagcgggtcaaaattgataagtttgaaaaattaaaagacaaaaacaaataaggaaatcatgatgttttatcggggtgattgtttctggactaggccctcgcagaacaaacaagtgctccctgaccccctgggctgagcgcattgtgcaccctggtaggtgatggaggccttggccacattgacccaaaagcagtgcccgtgaaggattgctcaaaggttccatgtgcccagggcttaggaatgctccatctcaaacggtgtttttaaaattgtattttcttcaggattaaaatcaccaactgaaccttccaaggagaccaactgagtggaaatcatcttcagtaactgctaatgggagctggatttaaaaccgtcaacttaaagtaaaaaagcttatgtctcctgtactgttacccagccgggtaaattgttttttagtgtggaatcatgtacacttaaatcatggtgtatgcatgtggtcagcgctgcttttcttttaagtgggcttgtttatttaagagactcgaaaatgagaagttgttttcttactcagttggggtttattgtaaaactcaatgccagaaaaagaaaaaagtactgtttttatgctgcaagtgtgtgaagtgtgtcctttccaaagaaaggacagtcatggtgttttttctctctgcccaaagaaggaaagctgtaagggccagcaggaggctttgtgggggatctgggcttatgaacgctaatcacgcactgaccaatggtttcaaacacaggaacgcccagtatatgcttttactcttattcctttgcagaaattaatactaaaatgaaacaagtagctggagagcaaagtgggaattggttcatgttggtagatgatatttgttattaacagggccagtttgatagcggtgtcagagttgttgttttgccctgctctgtgctgtgaagtgtcatgagtgaaggtcgcgctcagactactacaagtagtcccagtagcatcaaaacagctgagcaagtcttgagatcccatgtgacacatccagccaacagccatggagtcctggacccatcgctcagaaacacccttccctggagactgagccttgtcttgatctgcaaatgaggagggggtgaagtccagagagacagcatgacgtgcctaagagcacacagttgatctgtgacagggatacacgattttcttacaaaagtgagactataccacaccaaaaaatcttggaaaattatcctaatccaccacagtttatatttttattttttgttatttttattattttttgagacagggtctctctctgttgcccaggctggagtgcagtggcacaatcatgactcactgcaacttccgattcacaggctcaagccgtcctcctacctcagcctttcaagaagctgggactacatgtacccgccaccacgcccaattaacttttgtattttttgtagagatggtgtttcaccatgttgtccaggctggtctcaaattcctgagctcaagccatctgcctgccaaagcctcccaaagtgctgggattacaggcgagagccactgtgcctggccagtttatttatttatttttaactgtgatttaaatccttttaagtgcagcccagttatcctctcaggaatctttccagactttccgccccctcaggttgggctcacttattgtttgtttcattcttctttgcactttttggaaatgtagtaactgagagaaatattaatcgcccctcctgtttttgcaaccagtttttttttcagtgaatgctctgagggtgctctgttttgttatggtgaacctgggccgtggagttatcaggagatgagagtaggttagagcttagagtctgtgggcatttcagttctctgacaatggaaagctgttcggagccaggttgacacaactgaataaacttacactgttaatgtcagggcgatgaccacctggagacaaacagggaggccctttgttctactagtggctaaaacattataggaatgagaatgaataacctttatgaaccctaaagtgcactgcctggacaaatagaaacaacctagacaaggaaatggggtctctgccatccaggccgtagtgtagtggtgcagtcatagctcactgcagagtcaaacctctgggctcaagtgatcctcccacctcagcctcctgagtagctggaacccaggctgtaagccaccacacctggcatgattcattttttacaattaatttttctattaaaaatatgccaagcatacaaacaagcatagaaaataatattttgaacatctgtatacccaccagtcagcctaattaaaatcttttcgatctatttctagcctacctggaggccactgttatgaattgggtgtttatcactcttgaagttctaagtttaactctttggggcctccctcaatgcaagggcctgtgtttaatgggacaggagtggtatcttgcagcagtaaaatcacagttttggaactgtcgtgagaccactgtaatgatttgaaatgtgtcagtgagatcggtctgcagagacccgagatgtttcagaccctagattcatgactagttgggaattccccaagggatgagaaagtgtggtggccactgaaggtcactcatcaagggaaacctcagacagacagtttgaagaaaaatgtatggtttaggagtagtgcttttcaaacttttttattgtaacccaacttaacaagtaaattttccattgtaaccctggacacatacaccgcacacacatacacacacacacacacacacacacacacacacagcacatacctgtgaatgaaaatttttcatgaaatgattattattatacttatttttcgtcagctgctctgcaataaagtctgttttgttttgttgtttgtgcaaaagctgttttgttccaattcattgatttcacatgccattggtaaatagaaacccacagtttaaaaaaacgaaccaaacaaaacctggtttagggaactgttgtttcatggagcaaaagtttctaaaaggtgtatttggtttaactcgctgagtgtttttataaaaagcttttctctatgactgacctcagcttaaagatctataccacaacttactaataatgagttccatgtaaaactaagcagaattcacaactcttttggggttcaggttattctatcatgagacttctccttaaagcttctaaccctcttcagccattgctttaaggcagcctgactagattaagtaaacagaacttgaacacaatgacttaactatactttataaattcatgattgttaagccacaaaatcaacctttccaaataaaactgagtgtaagtcaaactgccaagcgaaaagagcagctatggagctctcaactctcccttttgtcatagtttatctctgtacaatgccagataaagcccagatgaggaataaagtgatgtgactattgctttatacttattaaatctcatccgttattgtgggaccatgctgccatcctcctcacctgaggtgcccgataatgatcaccctagcggggggttataaggcacctttgttcgaaagaagtttatagaattggactcagaaaggtacagcttgccctccagggaagcaaaggagaaaattatatttaatgcatattaaacaaacaattgttggagattataagctacatcgattccaagatcccaaaatacttgagtcagcttactccaaaatgttaccagccagccactttaaacattaatgaggtagctggtttctaaaatctggaaggaggaggaggttttgtttaagccaactatttcacagaagaggaaatacagttcgacctcaggaaatttaaatgagactgctgaataactgggaaagaacatctcctgtggatgacagggcaaagaagaattaagctgattttaggccaaataacaaatgtgacagctgtgcttttttgtgtatgtattggtgtgtgatagtgtataatttctagaaaagcagttctcatgcatttgggtcttgaaaatttccacttttaaaaattattgagaactccaaagaactcttgcttctgtaggctgtatctatcaatttttaccattttaaaaattgaaactaagaaattaaaaaaatattgattgaatcattaaaaaaactgtattaacataaaatatttttatttaaaacattgttttcaaaaaagttattgagaagagtattattgttttatattactgcaaatctatttaatacttggcttaataaatggcacctagattgtcatcttttctccatatactctattgtgttatgttgttttggttgaagtatgtgaagcgaagttagttcacacaaataagtaattggaaaagagagaacctcatagtccccttaaaaggatctcaggggactcccagggatccttggggcacactttgagagccactgtcctgaaaagtagtttggaagactatgttaagaatggctgtccaggagtggtgagattattcacgattctttttttcttttcttttcattagtatttattttctacaagaagatggattgcttgtgcaaactaaaaatgagaaagaaagaacatactcatgttgagggcagattatggaggccctggaaaaacccaggcagaggagtttacacttgggagaccaaggagccactgtcatttcttaaatgggaaaatgataagagctgtgtttgggagtaagtgaattcgaattgaaagagagaaagagagatgctacttcagagaagtggtgtggtgagtcagacctcaggtgttggcagaaatggagagaaaggacaaactccaaagactttgagggcagaatgacctgagacctggatataggaaatacaggagagggcagagtcaaagacaacagttttaaaattaaaacatttgaagaatgttttttcccttctatccaactttggggcctggttctgttgctcaggctggagtgcagtggcgcagccttgacctcctgggctcgagccattcacccacttgagtagctgggactgtaggtgtagattgcctctttctatccaacttcaactttttctgaatgttactccgattaagctaattgaagtcttgtcgtgttttccagagttggccaccctgttcaagggcttaggagaaagtcaacacacttcgcaacttgaattggtcccagctgctcccagaagaacgggcgggttggtccctatgccacccctggagagctactcgccgcccactttgccgtgaagggctgtgcggttcccgtgcgcgccggagcctgctgtggcctcttatgcactccaccacccccatcagctccctcttctccttcaccagccccgcagtgaagagactgctaggctggaagcaaggagatgaagaggaaaagtgggcagagaaggcagtggactctctagtgaagaagttaaagaagaagaagggagccatggacgagctggagagggctctcagctgcccggggcagcccagcaaatgcgtcacgattccccgctccctggacgggcggctgcaggtgtcccaccgcaagggcctgccccatgtgatttactgtcgcgtgtggcgctggccggatctgcagtcccaccacgagctgaagccgctggagtgctgtgagttcccatttggctccaagcagaaagaagtgtgcattaacccttaccactaccgccgggtggagactccaggtgggtcgtctttacgacgtcaaggtttattttcagagtgaaggtcgtgtgccccattgatggagaatgatggggcaccagcagacagggacctctcccaaaagagagagagagaagagaggagagggaggttcagttttgagggactcgtccaaaattttgtttcccggaatgaggcagctgtccaatcaaagaaagttcccatgaaaacgatattcctgcctggaatgccacaggaacactcaatccaaagagaatcgcagtaaaaccctgttatagccagtgtgaaggaatgaagataaactagtcaggaaaatctagaaagaagatattttcatttgatttcattatgctggtaagctttgtgtgattttgaaaatgaggcagatggctaatcggagaaaactgccataaaagttttattttgaggtatctgggacaagtcaacataatcttttaccagttcttggggtcctgaaaggttttaaaatggccttgataatgatgagctgtaaaaattaaacatcctcctccccccgccccaaacaactgaactgaactgtactaaactgaactaaggcagggtttttggctgctactttgttcaagttcaggtaagtagaagatatctcatgtctaggtctgaaaacagccaatgaaagagttgctggaaatcattccaggcagttatttttaaaaatggttttaagtacagacaggtatcacttaatgatggaaatacattctgagaaatgcatcagtaagtaatttcttccttgtgtgaacaccctggagtgtacttacacaaaccatgagcctgctacaccgttaggctatatggtgtagcctattgctcctaggctactaacctgcacagcatgctactgtactaaatactgtaggcaatcctaaccacaatggtattgaatgtatatgaacagatctaaacatagaagaggtacagcaaaagtacagtatcataatcttgggggaccactgtcttatattggtccctcaagcaaaacatgattacacagtgcatgattgtataggaaagtatctttctaaaacccttcacacccctgtgtgtgtgtgtgtgtgtatgtatattatatatatgtgtgtaagaaatatgtatatatttcctcctcctcttggagaagcctggtgtttgtctttgttccttcacactggctataacagggtttcactgtgattctcttagattgagtgtttctgtggcatttcacacaagaacacagttttaggagagctttctctctttggccatctgcctcatcccaggaaaccaaagcgctggcacattagctcagggaaattgcccatgtccagtgaagagatggtcctgtctacgtaggcaggttcacttaaccttaaaacagtatccaataagtgatttatgcccagcctacctcagtcttagctaagtgatccttcaagctcccagaacttaacatctacctgtgtgtggatgcctcccacagcccattcagggactgaggccctggctgagaaggtattagaaggttccacatgcttggcaaatctgatgcgtttcccctaaatcctggagcgagttgctttccacccttcttccctggttcattttgactcttttcgcttacttaaaaaaaaaagtcaataatgtctaagcttataacaaaaatgactggattccattttgtgtttcaaagatttgaattacattaagcatccaaaatatatccaaatggaaaaatgttcattaataaatcatttctgtcttcctgaataatgtagttgtaaaatttaacaacttgtaagaaatatcttgtaaaatgtacctggttttccttttgaatattcaaaagcctaattttaaagaactatttgacattttagtttttcatgtcttttgtttttttgtcttgctctgttggcaggccggtgtgcagtggcgcagtctctgctcactgcaaccgtcacctccccagttcaagcgattctcctgcctcagcctcctgagtagctgggactacaggcacgtgccaccatgcccagctactttttgtatttttagtagagacggggtttcaccatgttggccaggatggtctcgatctcttgacctcatgatccacctgcctcgtcctcccaaagtgctgggattacaggcatgagccaccatacctggcctttagtttttcatgttctgtaagattcttttaggaatgatagtgtgagtgttttacatatggtaaatatatttcattttatcataatttaggtgtgaatttccagaaggaaagatgggtaacgattatattaatttaaggtaatatttaagttacagaggtttttcttacttgtgtttttttaatagaaaaagtagattttatatctagttagctatccatatttaaagtaaatattttaggaataataaaaatgttaatgttaaacaagtttgctgagttcctatttatcataaagcttaagttttgcctttgaaatctcattttttagccatccattttagatacattgaaggctgcattcccattttcttttcattcacacatccacttcaataattgacttcagtgctttccaagttatgtgtggtgagggatcagtttttatttttttaatttccagtccttcaaacgaacacttttatagtacagacaaattactaggcaaatgaaattttaaaaagacttagaaaatataagcccaattttaaaaattatttaaacaagtgtaaactagaaactctgtcaaattgctgtgaaaagtttctaagtactaatttcttcacagactcgtacccaacagttggtgaagggtccccagtcctcagacacactttacctggcacagttctggtggaagccatgcaagactgttgttgtggtacatgatgattttactccatttggctggaggttatttcaggagtgtaatttcttttttatataaaatattcatattatatcaaaaccacatgactttttttaaaaagacagaagtgttttttttccagctctgctttgcatgcccatgtgccctgtaactccttccgctgtctccccccgtgtgacactgagatgtaaagatagcatggtgtttaaaagtggcataagataggcatgagtgtctgtaagcgcactgtcatatttacaagcagcagttgagatgtggaagtggaattaagtaattagggatagctgtgttgtgagtgaaagtatttaaaaatatgatcagtgcacatttaaggcaacggagccagtcaggtcaaataacaactaggatgaaactatcagttttctttgcaaacatccactggctttgattttacccagatggtaaaaatatattatcaagatagttgttatgataaagggaaatgtatcctttcttttctcttggtgcctcagatctacaggccatgaagaaatagaagtctctacattcagatggataggaggcattatatttttatcagtgttaggaatataccgtagatattttacattaaaactgaagtcacagagatgattcaaattcttcttcataaagaagtgagtgtttacttgaacatcgttaacattttgatgaagggtcattgacaaagaagccatacacattcgctgtgtcaactcctcacttcagactattcatgaggcacataatctttttttttcctgcatagttgtggaatatgaatacattaaggggaatttaatggtttatgatccatgtcactgtttgatggtgatgttgaatgtttgttctctggtgtcataaggcagcatacgtatacaatagcttagaaaaggggaagaaattatttgtttctctgccaccctcacctgtagcagttttagtttaaaaccttttatttacccttcttagtttattttctgtccatataactgaaaattattgtttgttaagaaagagatagatgtatggtgtcaaaggcagatggcagacttcggggttaatgtcattgttattgtaattgtctgtttattccaaaacatttacctttttttaagactttattttttagagcagttttagaacatttactttttatgagtttttattaatacttgcctgtggttgacaaatcagtggtgtgattagaaccaagatctgtcctatttatacccggagacaaactcttctaaataattcttgcttagttctttcatatttctctctattattactaagaattatgacagtaactctagataatatataatatgcttacatatctatttccaaatttatcaccttttagataatgtcattgactctctaccataaaagatgaggatttcactcacatacatacatacatacatatacatatatatatatgtatttttttttttttttttttttttttgggacggagtcttgctctgcccaggctggagtgcagtggtgcgatcttggctcactgcaagctccgcctcctgggttcacgccattctcctacctcagcccccccaagtagctgggactacaggcacccgcaaccacgcccggctaattttttgtatttttagtagagacggggtttcactgtgttagccaggatggtctcgatctcctgacctcgtgatccacctgccttggccttccaaagtgctgggattacaggtgtgagccaccatgcccagcctcactcacttatgttttcatcttcttccttcctcctcttctcatccttgatatctatattttagttcatagtttgtatttgtttttggttattccagtggtttccattgtggaattcgggggtaagaattatttgtcctcagaagggcattggtctgttgacttctagtagccagggttagagtgggaagttgaggtcggttgattctcatttctttgtaggtgactttgcggtgatcctctaggagcttttggaatattccagttatcccgcagtgtttgaaattcaagatggaaagactaggtctggatcttttcttcattaattgagctctgcacactctgtggctcttttcaacatgaagacgtaggtcctttgtagctctttgaggttttcctttgttatttcttagaccacttcccccttgtattttctttgcttccctgtctggaacttatgttggtcacagatggctcttcaacaacagttttggagtagctactttatgccaggcattgtaaccttctaggagtcggtaggacgtgagggcctgggcaaagcttgcccttaagaatttgaatttattctgaaattttgtgtataatcagaatcaagaacagtaacattctttttaaaaaatgaaacccagaaaagcatagtaaatgaacaaacatcatttatgttttgttattgctgcttattttatttttttgagacagagtttcactcttgtcacccaggctggagtgcaatggtatgatctcggctcactgcaacttccacctcccagattcaagcgattctcctgcctcagcctcctgaatagctgggattacaggtgcccgccaccacacccggctaattgttgtatttttaatagagacggggtttcaccacgttggctaggctggtctcaaactcctgatctcaggtgatctggctgcctcggcctctcaaagtgctggtattacaggcgtgagccactgtgccctgctgctgctcatcttttacttagtcacttttattattattcaccgtttgtgttttacttaataacttttaattactcaccttgaaatctttccattaaggacacatagaatgtttttatttcagtggcactactgaacctgaaattgagtctggtcatctaaataattcaacatgatctctgaaggaaaaatattctggggatcacttagggtttcattgcaagcaagagaaactgattttgccttgggggaaaaaaagacttatttggcagaattaaagaaagacgtaacaatcaggttgccagaaggccaggtattaggacagctctggtcatttccaaggtaggaataaagagcaggtctctttagagtgctgacactagaaagatccttctccaaatgcttttgtgaattatgacattctgcttaagattccggttacaaggagaagactgttaccttagcttactcacatgcttgcttcttaggtggagatggggacttaatcgacagttttatgatgagcacaaagactaatgggagtagttcccaaggggaaaaacagctctatcataaacaaaaaatagataagaacagcaagtatccactctgttgtgtactgatgagcaatgttcaattctaactgccttgttcctttctgatcctagtactgcctcctgtgctcgtgccaagacacagtgaatataacccccagctcagcctcctggccaagttccgcagcgcctccctgcacagtgagccactcatgccacacaacgccacctatcctgactctttccagcagcctccgtgctctgcactccctccctcacccagccacgcgttctcccagtccccgtgcacggccagctaccctcactccccaggaagtccttctgagccagagagtccctatcaacactcaggtcagtaagaactatggtctgtggggaaatacgggaaaataagcccaacatcatgatttatgatgaacagtcacaatgacagtcattgtaactgtcattcatatagtataaacagtttacaaagcaatcagccttaaaatgattaggactatacctattttgaagcagttaccctggagatagaacatgtttttcctctagttttagttctaatgctctggaagctctcagaaactaaatggatttgaatagtatccctgggaatttccaaggatttttttttttaaggcagtagaaataagatgaaaagacttctgtaatccaagcagaagacttggcctgaggacaagcaacatggaagatcaatgctaggcctttaccttggttgcctctttcaacaatcaaaggaagcccttgcctaaaacatatgcctgcatcctttgagtgaggcagaaagtgaagccccagctccagccagtgcattatccctttctgccatgtgaagccaggacagcatcttaaatatagagctcttcagtttgctgaattgagaaagcatatggaagggaaagggagcctctagcatgctgtcataattgctcttgctaccatacctgtaaagtggatctaagttgagataatgaataaaagatacatatgcactttgtgagtgtgagataaatactgtgcggagctgacaagttcctaaaggcatgcataaatacatttggtgccagatgttacaatctgcctcattcatttattcctataatcatttatttaatggatatttattaaactcttactatatgcaagcattgccttaggattgctgaaaggggaattaaaaggttaataaaaattgtccctacgatgtgggaagataaagagggaattgcctcttcacctctcagttacttagttccttttgctcctcagcaagttacataagcatctattatatttgttgcactatattatataattcctgtgtgtctattttccccattgaacagcgagccttcttttttctatgtctagcacagagcctgaaatgcagtggttgctcatcagttgcttattgaataaataaattactacacaggcgtttatttatttttattttttattttttattttgagacggagtcttgctctgtcacccaggttggagtgcagtggcatgatcctggcttactgcagtctctgcctcccaggttcaagcaattctcccacctcagtctcccaaatagctgggattgcaggggtgtaccaccatgcccagctagtttttgcatttttagtagagacggggtttcaccatgttggccaggctggtctcgaactcctgacctcaggtgatctgcccacctcggcctcccaaagtgctgagattacaggcaggagccactgcacccagcccacacaggcattagaacatggacatggagctccagaccataggcacaggttttattgactcagtaagtgatgactgagcacctgctaagtgtctggcactgggccagtgctagaggtgcagtgatgattaagacggtgtagttgtccccccttatctgaggtttcagctaccagaggtcagttgcagcctgaaaatactggatggaaaattccagaaataaacagttcataaattttaaattgtatgtggggatgaaacttcgtgccatcctatccaggttctgaatcattccattgcccagcgcatccacgttgtagatgctatccacctgtgagtcaattagtagctgtctctgtgatcagatctactgttgaggtcactctgatttaatagtgaccacagagtgcaagagtagtgatgctggcatattgttctagttgttttactttattattagttactgttcctaatctcttactgtgtttaatttataaattaaactttatcacaggtatgtataggaaaaaaaacatagtatatgtggtattctgtactagccacaacttcaggtagccactgggggtctcggactgtatctctggtggagaaggggggactactgtggtctctgaccttcaggagtcagtagctattgagagccatcacatacaggtagcctgtagcagtccaggcaagtgattataaggagttgaactaaaacagggatatggggttggaaagagggcagtgaattgggggagggaggtccaacaggacttactgtagggtgaaggcagagatgctggagggtagcttgagagtcattaactcagtgtaggagcagatggttgaagttttgcaagtggctgagttcactgagaaagaagaaatacaacagaaagagaagtcatttgaggacagaaccttggttaaggaacaggaggataatagtgttgcaaaatatatatttacctaacacacctctatgctacaaagacttcctgtgctgactttgaattcctgccctggttactctgacaggttgatgttctttttactcttcccacccaagcaggacagacaccaacagtgatgcagaagctggttagtttctcacagaaggcatagcccttttcacttcaaagaaaataattcttgtctgaatgattaacagcaaaatgccaacctgagtaacagacctgtagataaacaagagtaaaaggaacctttgcgatttactggttcagcctctaaattttttaaaaagctctattgaggtataattcacataccatacaaccacccatttcaaatgtacaattcagtggtttctcatatgttaatttttttcaagtagtggtgaaatatatctaacacaaaatttgtttaaccattttttttttttgagatggagttttgctcttgttgcccaggctggagtgcaatggcacaatctcggctcactgcaacctccacctcccaggtacaagccattctcctgcctcagccttccaagtacctcggattacagacatgtgccaccacacccggctaatttttttgtatttagtagagacggggtttcaccatgttaggctggtcatgaactcctgacctcaggtgatccacccgcctcggcctccgaaagtgctgggattataggcatgctccactgcacccagcccattttaaccatttttaagagtacagtctagccgggtgcagtggctcccgcctgtaatcccagcactttgggaggcttaggcaggcggatcacttgaggtcagcagtttgagaccagcctggccaacatggtgaaaccctgtctctactaaaaatacaaaagttagctgggcgtggtggtgcatgtctgtaattcagctactccggagactgaggcacgagaatcgcttgaatccaggagtcggaggctgcagtgagctgagattgtgccactgcactctagcctggtgaggactattaaaaaaaaaaaaaagtacaatctgatggcattaggtgcattcataatgttgtgcaaccatcaccatatctattttcaaaaattttttcatcaccccaaacggaaactccgtactgatttaacaatagctccgtatttccctactttgccagcccctggtaagctctatctactttctgtctctctgaatttgcctattgcaagtacctcatatactagattcatgcaatatttgcccctttgtgtatgttttatttcacttagccaagtattttcacagtttgtgttgtggcatatatcggtagttcatctttgtgactgaacgatatctcattgtatggctataccacattttaaaaaatcaattcattagctgttggatatttggattgttcccaccttttggctctagtaaataacaccctgctttcaattcctttgggtatatacctaggagtggaagtgctacattatatggtaattctattttcagtccccctttttttaattttaattttttagagacagggccttgttttgttacccaggctggagtatgggggcacagtcatagctcactgtaacttcaaactcctgggttcaagtgatcctcctcagcctctgagtagctaggattacaggtgtacaccaccatgcccagctaatttttaatttttggtaggatggggtctcatcatgttgcccaggctggcctcaaacccctggactcaggtgatcctcccacttcagccttccaaaatgctaagattacaggtgtgagccactgtgctcagcctgttctgcttcttgagtaaatagacatatttagtcaaagacctacaaaaaggtcatcttgccttataactttttcaccaaagtcataggagtcatagtccattttctcacaaggaaataccttacccatggtttcctagtatggtccacgaaccctgcattagaattgccattggggcatgttaaaatgtacatggctacattcaaccactgacctattgaatcggaattgctaaggatggggccaggaatctgcatttttagcaagctccactggcaatttttgtgtacacttaagtgtgagaactacttgtgtggacaattcgatacaacaaaggcagattgatccaaccttttacgctgttgtattccaccacgcatgttaacaagaccattctgaactaacattagacatgcatactgaaggaattggttgttttgtgctgaggtcctccataaagagtttttcctgtgcctcatgagtttttactgtgttatgaattattatccacggaatgcatcccatttgcctaaccatgatcactgtccagtcacaggactgtcatttgggtagaagggcccttctcagcgtgccttgggtacaaggttataattacgtttcaggtatcttgaagtatctcagggatagagcgtccccgtggccattgtacaatttgtgacaacatagaagctgaaaattaagctcacttcaaagaaggtttagctttctctgtgttttgcaagccagatcacagactattctgctatgagaaaagctaggagaacaggttctgcatttgaaagtcttgccctgaagtcattagaactcaatgataactcaaaagtcggagggaaaatgaattgaccctttactgaggctctcagaacaaccagtttcttctgtagggtactcacagtgtcacttcagaagagccttgttacattaatatggtctctctgtaggagtagcactgtccaccaagctcaggagtttaatggcaaaagatgtcggatccaactgtctttgtgtggtttatcgatttgacaattcctttgttctactgctttcttttagttgacacaccacccctgccttatcatgccacagaagcctctgagacccagagtggccaacctgtagatgccacagctgatagacatgtagtgctatcgataccaaatggaggtaaattgcagatgaacagtgaaatgtagctattttccaaaagtatttcctattacccccaaacaaagcaactcaaaaaagaaaaccagaaatgtactggcctgctgttttgcatgtgttttaagaggcaaatgggatggctttgcattttaactttgacattcctcagtacaatagaattaatgttttgtttatcatcattactagaacaagttaactttttattttaactcagcatttagaagtttgtagttcttgatgttaagtatggagttgggaactcaagaagttagggattttattctatttgtgtttttactatatgtttatagtggtgtctttcagttggccagagaggtactcttagaaatatacataaatgaggtttttacaaaattttatttgcatcttataatagtctagataagtgttgctcgaccttaatgttcatataaaccacgttgtgatcttgcataaatgaagatttttattctgtagatcttacggtggggtccaagaatctacattgttaagcttccttgtaatgcggaggctactgttccatgagccagatcttgagtagagaggttctaaagaagtgtaccatttgaaatactccaagtgaatattttataagctaagatccttttgtaagagaaataataacccccaaatttatctgtttcataaatttatatttaatgcatataggaacacactctagatgcaagaatgacaaggatgttcaaggaagagaaaggtaatacaatcactagaaaggcagagaaagggtgtgagtggcaaagaaagaaggaactctgaactttggttagttacaggaaagtgacttaactttatgttgggtgtgaaaacatccatgggtttcctgatgaaatatccagctctctttaaatgtttttttttttccatgcataactagatatccacaaagcagaatgtgagcccctctatgtggaagctttttttttccttaaataatttaatgtcctattcagcattattgatttgctttttatcatagtcaaactattgttttccatctctagtttgttagaaaatgatactttttgccacaaggattcaagtgggcacagtaacagcaacatgccatctttcacatgtttctgaaagaagaggtgacctgccagcttcctttgagctgtgcttgctttagggccgacagtttttttatgttcatctgttcatgtcatgttttccctggccccttcatgaccaatacacatttataaatgctctagccatggaagatgaacaaggaccatgggctctacatctcaggtgtgctagtgaaatgagccggccccaaacagctcccatgagagctacaggttctaaaagattgcagagcggcatgcttggtcttgcagccgactttctggtgaaaagcattaactaagtttcctggtggaatcatgaactacacagcccaggtatgacagtagccatgtgttctctggtttgttttcttccagactttcgaccagtttgttacgaggagccccagcactggtgctcggtcgcctactatgaactgaacaaccgagttggggagacattccaggcttcctcccgaagtgtgctcatagatgggttcaccgacccttcaaataacaggaacagattctgtcttggacttctttctaatgtaaacagaaactcaacgatagaaaataccaggagacatataggaaagggtaagagcaaagatgttattcctttagtcatctagccgaaatgtagatggtcatgtgtgtagaagtgcacgtgaccaccctcacatgttggtcatgtgcccctgtggaaggaccccagggctggtgagctctgagatagctctgacattaccactggggaaagcacataggttgtcaggatcttagtccctcttcctctaatgtcatcatgccactttctaggggtggcatggagtggggattgtgaagacaagcaagatgataaatatgaagaaagccggatgaaattattaaatagaagtgttatgcattatttttcatttccctaaaacttacaaactaggatcatttctgaagaacaggaattctgactagatgattatttgtatcaggtgaagttccctttggagacttagcagctaggtagttagaaagaatgactgatttatgtctggaagcctttggcatgtgattggggctctcctgtgtgcaggctgattgggtacaagtcatactggtctcttttctgaccagtgatgcttttgaagcccatctcattggtctgagtgatggtagcaaatcccagctgagtgtgtggtctggctgaggatctttaaattattttcttttctattggaatagttggtatcttcgattgataccatggagtcatagatgtgaagaaccttcagtcatttgaccttttctctctccatccagcacttaagccacctcgggaagggagcctgagccttttctttcaaatttccaggggagattcattgttccatttggtgatgcattctaatattcttcctaacataccttcaaaatgtctcctgttggagtaaacctaaaagccattgtttagaaacaggttgaaatcattcattgatgttgactcttaatggagacagttactttatgtttatttatattctgtctccatagtggctttgaggccacttacgagaaaccattgcagtgaaatgataaatgaaaaatagaaaatcagaaacgggtcgaggggaggggagaagaatccagatatgtcatccataagggttagcattgttaaccaaactaagcagggtcgggcctggttagtacttggatgagagaatgcctgacctcctgggaatgcagccctgtaggtctcaaccttattttacctaacccctattcaagatggagttgctctggttcaaacgtctctgacacagagagctggagaagatggtggtgattttactctaggtttcctgacaaggagggaagaaatgaaaaactcactctggaatgtaatttttatcccaaagggggaaaatagccattcctcaaaggaaataatctttgaattaattcctaaacaagtttcttgagcatggctttactttcaaatgatttttagaagaaccttcagtgaactctcaaggcaaaacattaacacataatgttgtgaagcagtttgctgaggagctttgcagattggtctgcatgttcaatttctgctggtgccagtggatccaaagacaggattaaagtattaaaggagtgctgaatgtgttctaggaacctgtctgcaagtcgcttcttcaaggtgctcctgctgaggacatggagagtgtgtggtagtctgtttcactgctataaaggaatacctgagactgggtaatttattaaaaaaagaggtttatttggcccatgggtctgcaggctgtactggcatgtgcttctggtgagggctttaggaagcttctgaaaatcactgtgtaaggcaaaggagagcctgtgtgtcacctgggaagagacagaaagagaagggagggaggtgctggtctctttttaacaaactgatctggcaggaactaatagagtgagaatccactcattacctcaaggagggcaccaagcagatcatgagagatccttctgtgtgacccagatacctcccaccaagccccacctccaatattgagaatcagatttcgatatgagatttggaggagtcaaatatcccaattatatcagtagctcctgtgttgttgactgagagctcgtctttagggttaagaagccacatgagcaagagctgggactgatgacctgttctgcaaactggagcacctaatagtgctcccctcgatgcaagggtactcactgtcacatggtccgaagacaaagttacagttttctcagagctgcttagaaattactccaatgtggaaaaaaatttttttttggacatgccacaagccttgccataaagcgtgtgggtggaaaaaagtgttggcttgggagattttaaagcaagggcagtcagtcttctgtgagatcacaggattctctctcagatgctgccatgggttatctggttctgagcagcatggcttccaggagcaccagcctgagtaagttatctgcaaaatgcattcctcggctagcaaatgagttaacttgctctgtggagttagttaacagacattaggttttagtaatatgcattcatctcacgagtacttactgagcatcgcctctcagccagactggacacgagggatgcaacagtggaagaaagaccatgagcaggcttcctggattgcttgctgctggggaaagacagacacgaaatacaacatacagtatgtccaatagagaaacacaaagcaggggaagagaatggagactttaaaccagcgtaaccagggaaggccttcctggaaaagtgacatttgagaagatgttaccagaaaggtgtcccgattcagaccccaagagaagattcttggaactcacacaagaaagaatttggggtgagtccatagagtaaactgaaagcaagtttattagagaggtaaagaaacaaaagaatggctactccacaggcagagcagcagcatgggctgttcgactgataatgtagttatttcttgattatatgctaaacaaagggtggactttttcctttttcatgagttttctgggaaaggggtggagatttcctggagctgagggttcatttcctttttagactatatagggtaacctgggcacggccatggaatctgtaaactgtcatggtgctagtgggagtgtcttttagcatgctgatgcattataattagcatataatgagcagtgaggatgactagaggtcactttaatgccatcttggtttgggtgggttttggctggcttctttatggcactctgttttaccagcagggtctttgtgacctgtatctcgtgccaacctcctatgtcatcctgtgactaagaattcctagcatcctgggaatgcagcccagtaggtctccaccttattttactcagcccctattcaagatggagttgctctggttcaaatggctgtgacacagagagcaaggaagtcagtgttcgtggagcctgaaccagtctgtcaggttaaattttagagctccctggctgaggagagggggtccattcaaattgttgcggggccttccagttttatttttggtttacaatatgatctgactttacactttcgaaaagattgcctggctgttctattgagattaattagacggtgatgggcaaggatggaagatttttttttttttttgagacgggagtcttgctctgtcacccaggctggagtacaatgaaacgatctcagcttactgcaacctctgcctccagggttcaagcgattctcctgtctcagcctcctgagtagctgagattacaggcgcacaccaccacacccagctaatttttgtatttttagtagagaaagggtttcttcatgttggccaggctggtctcgaactcctgacctcgggtgatcccctgccttggcctcccaaagtgctgggattacaggtgtaagccaccccacctggcctgaatatatcatttttaaaaattctttttagtgaccagacgcagtggctcatgcctgtaatcccagcaatttgggaggccaaggcaggcaggtcacctgaggtcgggagttcgagaccagcctggccaacatagtgaaactctgtctctactaaaaatacaaaaaattagccgggtgtggtggcgggtgcctgtaataccagctacgcaggaggctgaggcaggagaatcacttgaacccaggaggtggaggttgcagtgagccaagactgtgccattgcactccagcctgggcaatagtgcaaggctccatctcaaaaaaaaaaaattctttttattatagttaatgatgagccattcccctacccagtagatatcaattagccttcacaccatttctggcttttattccttgtgacttaaattagctaaatggctggccctgctaaaggaaggtcatgttgccaccctgtcagcactgcgtgcattttgagttttgttttctctagtggtgatgatgggtcctcatttaccccacttaccatctagtgggtatgtccctgaggtagaggggctggtagaaagcatttatttgtagccatgcagcagttaactggtacaaagggactgaacttatgactttgacctcactagcaagatgctttaaatagctactaacagttagcactagcacaccaaaagctaccacttaaatgtcaaaggcaataccttgggcagcctggaacatctcattccagtgtgggatctatccatattcttccttagaaactaggcagaccacttgaactctctacaatgacatatcaaataataataatatgatgatgatgatagctacccccactgattacctaatatctaagagacacgctggtggccgggcgtggtggctcatgcctgtaatcccagcactttgggaggacgaggcgggtggatcatgaggtcaggagatcgagaccctcctggctaacacactgaaaccccgtctctactaaaaaatacaaaaaaaaattagccgggcgtggtggcaggcacctgtagtcccagctactcgggaggctgaggcagaagagtggcgtgaacccaggaggcagagcttgcagtgagccgagttggtgccactgcactccagcctgggcgacagagcgagactccatctcaaaaaaaaaaaaaaaaggtaaaaaaatttctccctttgtgggagaaaataagtgataaccattaaccctggttattgaactttctgagatagatcaagcgtatcctgaaaataattatcacatattccaaatcattgcattgtttttggaattgggctttttttaaaccattttatgaatctttattttcttgtatatctcaagttctgtataattctagtaattcttcttgttttatgaaaggaattatcttgacataaggatttcaccagtcagctccttgcagagatgttaccggaaagcggtcctgacccagaccccaaaagaaggttcttagatctctcacaagaaagaatttaaggcaaatccatagagtaaagtgagggcaagtttattaagaaaggaaaggaataaagaatggctgctccatggacaaagcagccaccagggctactggttgcctatttttatggttatttcttttttttcttttttctttttttttttgagatggagtttcgctcttgttgcccaggctggagtgcaatggcacaatctcggctcgcctcaacctctgcctcccgggttcaagcgattctcctgcctcagcctcctgagtagctgagattacaggcatgtgccaccatgccctcctaattttgtatttttagtagagatggggtttctccacattgctcaggctggtctcaaactcccgacctccggcaatccacccgcctcggcttcccaaagtgctgggatttcaggcgtgagccaccgtgcctggctggttatttcctgattatatgctaaacagtgggtagattattcatgcctcccctttttagaccatatagggtaacttcctgatgttaccatgttcgccatggcatttgtaaattgtcatggcactggtgggagtgtagtagtgagaatgaccagaggttactctcatcgccatcttggttttggccagcttctttattgcagcctgtttcatcagcaaggtgtttatgacctgtatcttgtgccaacctatctcatcctatgacttagaatgcctacccgtctgggaatgcagcccagtaggtcttagccttattttacccagcttctactcaagacggagtcactctgtttcaaactccttgggcagagggtctgcatgtccaggtggtatttgggttgcttcctttcccaatggatttcacttccctgtctcaaaatagtccttttgttctgcctctgaacacatgtaaggcttctcatcttaaaaaaagcaaatcctaaaaaatattttaacataggatgcaatgtcacactgttacagtcattaaacttgatgttgcagaatacttaatatcctgagaaaatgttcacaagatattattaactgaaaacaagttttaaaacatcctgtagagtatgatcccaattttcttcttaaaaatgcacatggctgagcatggtggctcacacctgtaatcccagcactttgggaggtcgaggtgggtggattgcttgagcgtaggagttcatgaccaggtgggcaacatggtgagaccctgtcactacaaaaaataccaaaaagttagctgagtatggcggcgtgcatctgtagccccaactaggcaggagactgtctcaaaaacacataaaaaagactgaaaaatgttaatagctaataactaatagatgttagctttgattatttctgggctgtggatttgtggctgatttttcttttctgtctgtattttctaaattttctatagtgggctttcttgatcctgtgaggatggggtgggcatggtgtgtaagggtgctctggaaggcagcagcagtggtaagggagacacctcacagtgcagcccaggcagagtggctgcgtgtttgagtgacagtatgggacatgccgtgtagtacagttggacccaaacaagcttgtttatcatgttgtcctgagaaacttggtcatcaggggcagtcttggaggaccagccttgctatcagcccagaggtgactttgtgtgagttaggaaaaggtgcctcttcctcaagagaaattactgccatctgctgggaaaggattgtaataattacacaaagctctgaagactaggaggcaaaccctggtttgcagtggttgtgcagtgcacaacggtaggcacagtcctctggaagacctgcctccatcctctgacctaggccctggtgtggatctggaaaaatgtatttttatattattagtatttttttttaccacccattaaaacttttttattgtgggaaatttcaaataggaaaacagagaggggaatataatgagtcttcatcttagtatctccggcttcaataaagattcacattctgtgccgttctttttcatctatcgctctacagtatttttgctagaatattttagagcaaatctcatgcttcatatcctttttcccatctattggagtttatatctaactatataagaaataataccattattacactcagaaatatatatattttcttaaagcttctaaaatagctgtgcagaagaaaaggcaacaaaggcaaggggaagattaattacaaactcgagaggaggcgttgtgcttgtgttgggacgtttaggttttgtcctaagaggagtggagaggcttctgcatcttctgtgcaggacactctgccttttatggtgatctttttgcctccctcccagtaaggagggtatccctgcaccttccttctactttgggacactgacttcttcctctgttagtaggttccagagattggcacactctcaccagcctgcccaacctgccctcttcccagtcatttcctgtcattcaaggcaaaagaagaggattgaaaggggacacactattgtagttccacccagcaaacccaaattaaacccaaggttcttctagtcctcattaaccacaacacaggactccacactccatgatctcataaaaagtgggtggcagtcacacacaaatggaaagttcagataaagaaagacacagcccaagcagatacagagcccaagatgtgggtggaacttgcttgagggctgcattgccagtgttctctttatgatctcaggcagtacttcctttggggcatttattccttattgctaggagttagaacaggctgcaggattgtaacactagcttttccttccacttctaatgctactaaattacaataatgaacatattaatggcatatttgattgcaactaacaggtgtgatgtctcttttaagcatttcatacagaactgtcagaatgtaggctgcagtaaaatctgcacatgttcatgcttttcctgtaccgttttaaaggaatatcactggctaggcatggtggctcatgcctgtaatctcagcactttgggaggccgaggcaggtggatcacctgaggtcaggagttcgagaccagcctgcccaacatggcaaaacaccatctctactaaaaagacaaaaaattagccaggtgtggtggcaggcgcctgtaatcccagctactcgggaggctgatgcaggagaatcgcttgaacccgggaggcagaggttgcagtgagccgagatcgcgccaccccatctccagcctgggtgacaagagggtaactccatctcaaaaaaaaaaaaaaaaaaaagtgcaggtcacccggcctcaccctggacctgctgaagtagtgatctgttttaataagccctgcaagtggtcttagtgcaagctaaggtttaagaaccactgctctactctgtggtgatcttgaatctgacactggcgtttaaagctactattctggcctaccaaatggatgcaaataacattgttggcctacttgactcctcctcagatgctggtgtctctagccagaatctggcctccctcaccctgaggctgggttccacccttttctggtgtttctgggcgggctccgcatgctggtcccattggctctgctcttctctctctggatgctggacgactgcctacctgcccaggctcttctctgcattggtagctttgccaaagtggactgtggttgcagatgacctgaacaggattgaaaaccaacccctgaagatagataacagactcagataacaaaaaaatcgtatttatcttatgtaataggttttgagaggattacatatttgaaggtcattcaattcacataccgactaaatccttagcagctccactctggccccttcacctgctttccctcttgaaaaaacctccgcccaccctcacaaggcaggtctttcccctttggagcccacaggggttgttgtaagaggcggtgtttgcattttgccctggcctggggttctctttatgatcgtgagggtccagccaagtaactctcccagccagttaggaccatccttctgccccctggcaccaccacctaggccctggggttagggcccaaggccattcaggagagtgggtaacagcgatgagatagaggagggagaggaaggctgagggaagcggagaaggggagccagtctctgactgaggaagaggagaggcagtgacaggacagtcgtggactggatatccagggctgtgctttagctgtgcgaccctggctcagtttcttcagagtgatgtggttgggatacatactactcaaaattgttcttttctaaaattttattaagggaaaaggaaacaataaatatggtgggatgtaatcacatataatgcagaactgcctcaagtgctacttaggacctgacaaagaaactcccagcagctatgtcagtaacgtttcctagattcagagtcatgcacacgaggccctgagcagccctggaagctgtgagttctgttctttaaaagtttcacaattagaccccaaatatataagtatattctggattgtttctacaaacaccttataactgcatagtgatcatatgtataatcacattgacttctagtgctggagacttttttttccccatcaaaagtgggagtaaaattgttctgatatttaatattcactagactagaatttcttcatttttttctaacatcagtccctcgctatacatttatattaaatctcaaacccagacatttagagggaaaggatcaactaaaatttaatttggaatggaaattagcatgagcagcaacattctcaggatgcttttcttttttttttttttttttttttttgagatggactctcactcagtcgcccagtctggagtgcagtagtggcgtgatcttcgctcactgcagcctccgcctcccaagtagctgggattacaagcgtgtgtccccatgtccacttaatttttgtattttttagtagagacagggtttcaccatgttggccaggccagacttgagctcctgatctcaagtgattcacctaccttgacctcctaaagtgctgggattgcaggtgtgagcacccagcctcaagatgctcttttgaactttaattccaagaatattagataaagtgatgtaggctatattttgcttatgagtttttatattactgtatctgaaaatgtagaaatttcacttcacaaatcaaaatagacattatttatatgatttatattagtggatgacaaatttaattgaaatagatctctgaggtatttgttaagagaaacagatttataagtattggtaaattttttaagtgtcttttattgtttcctctgaggtaggtttaatatgtgcacttaagttacattttcatgatattaactgtgtccagttttaaattttaaaatttgtgggctgggtgcagtggctcatgcctgtaatcccagcactttgggaggccgaggcgggtggattacttgaggttgggagtttgagactagcctggcctggccaacatggtgaaaccccgtctctactaaaaaacaaaaattagccagctgtgttggcgggcacctgtaatcctagctactcaggaggctgagacaggagaatcacctgagcccgggaggcagaggttgcagtgagctgaaatcgtgccactgcactccagcctaggcgacagagcgagactccgtctcaaaaaaaaaaaaataaaatttgtgtatgtacaatgaaggattacttgatttttttgtgtgatatattcacttcatttctaatattataaaaccttatttttggaacaaataaacaggaatgatgggaggaatagtatatgagaccttactgactggttcttgggagtgattgttaacatgggttgcaatccacttttatttttttatttttatttatttatttttttgagatgacatcttgctctgtcacccaggctggagttcagtggcgctaccttggctcactgcaacctctgcctcccaggttcaagcaattctcctgcctgagcctcccgagtagctgggattacaggtgcccaccaccatgcctggttaatttttgtatttttagtagagaaggggtttcactgtgttggccaggctagtcttgaactcccgacctcaaatgatctgcccacgtcgggcttccaaagtgctgggattacaggcgtgagccaccgcacccagctgcgatccacttttaaatggatttgtggaaaaagcacagattatcattaaactaagcggcatttaggtcacacatctcattcatctgatcagtgatctgacaacctgatgggagagtcacatctcctagggtttcaggaatcagtgggagaggcacgctatgaaagggcatgtgaaggaaggctgtgtttttgtgtctgcaggtgtgcacttgtactacgtcgggggagaggtgtatgccgagtgcgtgagtgacagcagcatctttgtgcagagccggaactgcaactatcaacacggcttccacccagctaccgtctgcaagatccccagcggctgcagcctcaaggtcttcaacaaccagctcttcgctcagctcctggcccagtcagttcaccacggctttgaagtcgtgtatgaactgaccaagatgtgtactatccggatgagttttgttaaggtaaggagtgcttgctatcacgttataaaatgttcagtgaaaaacaaaacaaaaaagcaccctgactgatgtggcaggcagttgtgcggtcaattctgatagacaaaaccaatttattattattattattttttgagacggagtttcactctgtcacacaggctggagtgcagtggcatgatcttggctcactgcaacctctgcctcccgggttcaagcgattttcctacctcagcctcccgggtagctgggactacaggcacgcaccaccacgcttggctgatttctgtatttttagtagagacagggtttcaccatattggccagagtggtcttgaactcctgaccttgtgatcctcccatcttggcctcccaaagtgctgggattacaggcgtgagccaccgcgcccagcccaaaaccaatttttttgaattctattgtttttaggaggagttcctctttgagtataaactgtcttgtttagcaattatatgaaaattgttacacattacttttgaggaaaaacaaggtggctatttgattgtttttaatgcagatgataaagtaacaacagtaattttacaggactagtgcaacagagattttttccatccttccaattgccaagcactgttatcactcagtgaatgttggtgaatttatctgaattcagtaagatactctccttactcttagaaagcatacaggcacatggaggagataatatttatgaataagctacaaaaataggcagggttggttctaatacaagataataaactaagtagtgttataaaggtataaacaatttggaatagaaacgggtgtgattaattcagagagcagtatatgttctgttgatgaatatttgttgaatttctcatatcgaatcttattaaggttgctatgaaggctggagaaccaaggaagtttcttagtgggaaggaaagacaactgggtttgtatatggaagtgaaagccttcagtttcatcacctgctattttgtctgttgcaaagtactcgcaaatgagtctagtatttcaaaatatgggcttatcaaagtatcggggtatgtgtgacagttttcttactgccatgattccatccagggaatcagcatggcttgttccaggcatttttttcaaagtaaattttattagcactttaaaattaccatgacaaataatttttctatactcaaattatgtttttattatcactttagtaattatttaaaaagtaagaacaatatagtttccaattttaaaaaacagctgcttgaaattatttctctttcatggtgacaaagcagtttcattcaaatttagtgttttgaaagcatatattataaagttatattaacaaataacttcgaaatcttttcaaatgttctgttgctttagaaacggcagagggcatcatttgaatcatacagttttttttttttccgggtctgtgtttttaaaattaggatgaaatgccaatatctcataggtaattatttcactctgattaaatataagcttatatagaaatctgattttcctaataactagatacatttctcagataggcagcatttacattcataaagctacacaattgacacagaagacaaactgttcctaatactgcaggaacttttaaaataaatacatagtaaatataactatagatcatttttttttaacatttgagatgagcagctgtagctaccactgggctgatggatcagatctctttaaggtttctttcagctctgatttttactgattctaggacttagtcagtcaacaaatgtttattgagcacctgccatgtgcaggccaggcacgtgggacatgccaatgtttactcacagatctctgacctcagggaaccaatattctaggaaggagagatggataataaacaacagccaaaacacagaagaaggatggaaagagaaagtctgggggcagggtgaagggaattggagcacgggggcagtggagtcatctgcacatgagggtgggcctcattgaaaaggtgacaggtcagcagagactggaaggagacatggagctaggcccagggacccctggaggaagagcagaagaagagggaagagcaaggcaacagcatacacctggaaactctgaagagcaggcaggccagtgtggctggggcctaatgagcaggggaagtgagatgagagcagccgcagggaaccatagcaaggcctcctgaacctctgctacgagttcagcggtgactgtaaggaggtggcgagcttttgcagggatcagagcagagcattttcatgatctaacttctattcttaaaggatcgccctgcctgctgtgtggaggatagatattatacaggcaaggttgcaagtagggaaaccacttaggaggctatagtaatagtcaggtgagagtcgcccccacctggagggatccagtacagctgtgagaagtggaaggattctgaattgtgaaggcggatcaggcgtgggagaaaaagaggaagatgaagttagttgccttcaatcaagatggagaagacgcaggtgtaattgagatgtccgttgcattcaagtggagttgctgagtagccagttcgatataagagtctggattcggggagagaggtttgggcttgaaatacaaatttgggaattgtctgcaaagggaccgtatttaactccctaagtgtggatgagaacaccaaaggtttgagtttaaactgagaagagccgggcgtggtggctcatgcctgtaatcccagcactttgggaggctaaggtgggtggattgcttgaggtcaggagttcaagactagcctggccaacatggcaaaaccccatctctactaaaaatacaaaaattagccaggcgtggtggcgcgtgcctgtaatctcagcacttgggaggcttaggcaggagaatcgcttgaacctcggaggcagaggttgcagtgagctgagatcgcaccattgcactccagcctgggtgacagagccagactccatctcaaaaaaattaaaataaataaataagaaagggggctctaggactgagccctgggacacttcaacatttaaagatgggacagaagggacagaatcagcaaagaaaactgagaaagaccaaccagtgaggtagtaataagaccaagaagtgtggtgctttggaagccgagaaaagacagtgcattgatgagaggatgtgatgaactaaatcaaatgctgcccacataacacaaaggctgagagctgatcattcattttaacaatatgaaggccttttttgatcttgacaagaaaagttttgttggcggctggggtgagatgatgatcagaatggatttaagagagaatggaaggagacaaattgagatggctagtatggatgactcttctgagggtttttgccagaaatgggataaaaacatagggcagtagctggtggggggtggagaagtatcttgaaggtggaagacatttcagtgtgttcatatgttgacgggaatgatatagtagacgcaaaagattgcaggagagaaggggaagatttgctggaatgatgtctctgggaaggcaggtctgagagtgcattaatgggtggaccagcttatttggaaacacaaataattaatctgtggtaagaggtagaaaggccaagtatgtggatgcaggtcctgtggaaacttatttctgatgtattcatttttctcattaaaatacaaaataaatatcagttgcaggtatggacagggaaaaaggggttgcaggttttagtggggaggagcgatcacctaggagggggacatgagagaagggactggggggtgggttgtgactgccggggacatcacaggtccacttgaggttctcagtcatgaaagtaaaatgtgatcaggcagcatggttgtgttgaaatccaagttttaaaaaactctacagagaatcactgctcccagtcacagaactgatttacttggctgtgatctcccttcatttttaaatatcctttcattgatatataacatatagagaaaaatatgcaaattaaaaaaaaaaattttaactgtctctcctttgaatggtgataaaagggaaattgccagttgaactagagagagagagagagagagaataagcaagctttgataatgagccctgaaaaaccaagagcgccttccagttctgtctttaccactttcaggtccagtcactggtctgcagtaaccattttgtgcaagacactgtcctgggcatgaaggggtgaacaaaaggtcaagtttcttcctttgtggaagggaaaatgatttttcagtgcttcccgtgtgactggagtgccagaacctctctagatccgagtattcagttgtgaaccctgagggaatgcactgatttggattcatctgaaggcatctggttggtgtgagagttgacctgtgtttacaggaaggtagaggccatgttctctccctctcaggtctcaggagctacgctggggtgtgggctctgtgccccgctgagctctgcctggggctctggaggctgagtgtaagtgtggcaccatcactcagctcctttcttgtttttcagggttggggtgctgagtatcatcgccaggatgtcaccagcaccccctgctggattgagattcatcttcatgggccactgcagtggctggacaaagttctgactcagatgggctctccacataaccccatttcttcagtgtcttaacagtcatgtcttaagctgcatttccataggatagaggctattgcagggagtggcttgtatcatttcagatttgcaactgaagtttctaaaaacatgtgtaaatacatagaatgtatactgttcttattttttttaatcaccgtttgttttgtgctttctagttaacctgatgccagtacagtgcaattggaaaagcaggactttggtgcctgtgctataagcagcagattttgtgggaggaaacacttgagaggcgatattgtcaacagtatttgaagggtgttagcagaataaaagacagctttagtcagccgtgtcattataaagcatgttgtgtggcctcacagaaacattgaaactgtttatacagcaaaagtcaggtattagcagcactaaagcaaatatcactcagatgaaacaaagcagtgaaacccctacagtttaaatgatgtcacttttagtgctgttggcaagaaaaaaaaaacaacaaacttgtacaatgaattaatgagataggccatagaaactttatttctaaggttgacatacctatagctgggctcctgtgctcatattcagtggtacattttaaacaaactgtgatcggaaaagaaaaaaaactgtgaagccaaaagtcatgttccctcagtctaccactgtaaaaacagagtctaatatgggaaaataaatatgaaaatagcatgaaatgctgtttcccagattgcaagataagaccagaacttggtccaagagccagccacccagggagactcctgctttccacagaggagaccaggttcctgtcgtgctggttgttcgtgtcaggcagtcctgcaaactttgagtctgcgcagcgtgccagaatagcttgtgtttcagtcctgtgtcaagaagcaggtgaaaccaaaggttggagaaaagcatcacacgtcgacttacactttctcatttcccacgttccagtctcctgggaagggcactctttcgccacgttttcctgcctcttggcaaatattaactctttgcagatcactaaagcaacagtaaagactttgagaaaatctagacacattattggatcaatgagttatttaacctagtgtctagtgattatctaacctggaaataaattcccaaggaaagtgataataatttcataatcatctgcaatttctggggaacagtggtactgaataataagacatcttttaaaaatatacacaatattaaaaacctgttcttattttactttagatgagggaggaaaatcccccaaatttctaggtactttcatatatatacttgccatgcactaaacactgcattgcttggaaaaatatttcacaccctctttaaaaatgtacaatttaagatggcagttatgcttgtaacagacagcacttcagtaatccaagaagtttcttcatttatacattttatctcaactctttctagcattagtgcacatggtagtttttctaattaaattgtattcaaggtagaaatgatcatgtgagaaagatatatgattgagctactactgtcacctcttacagttactagtgttagctaatagaaactttcatatatacacatagaaaagaattattacattttacattgaaaaatgtaatatatggcccatgtagtgtatagaaaaatctgtagtttattggttcatcaactatgtattgtgcacctacctatgggtgtcaggtacaatgttaggtactgtagaatcaaatgtaaataagagacagtcccagccctcagggagccgagaacctaatagtgaatctgtttgtacagacatcttcatgtttcagaacttttaaaacaaaacaaaataatgtaatctatcatcttttgcttgaaagaatgtgattgatttcttatctctgttttgaaattatttccttactcttctgcaaagtcaggtaatggattccttgtataaatgctacttttcttccatgtctcaaagttgttttttttcctcccctttcttccctgttttccaataattctccatgtccccttttcttagaaaaggcattaatatggtgaatcttgtatgggaaccattccatgggagaacttcaacacagtttttgctccagagatcaaacatagctttcgtgatctctctaccagctatctaacttatcctctggtaatctttttttttttttttttttttttgagatggagtctcgctgtgtcaccaggccagagtgcagtggcgtgatcttggctcactgcaacctctgcctcccgggttcgagtgattctcctgcctcagcctcccaagtagttgggactacaggctaccacgcccagctaatttttatatttttagtagagacggggtttcaccatggtagccagaatggtctctatctcttgaccttgtgatccgcccgcctcagcctcccaaagtgctgggattacaggcgtgagccactgcgcccggcttcctctggtaatcttacacctttacagaattaatctaaactggtggctcataaatgacattaaaaacaaaaaaaaaatctggatgcagtggctcattcctatagtcccagcactttgggaggccaaggcgggaggatcatctgagcccaggagtttggggctgtagtgaactatgatcatacaacttcattctagcctgggtgacaaagtgacaccctgtctctaaacaaaaatcaagaaacaaaaaacttgtatttccctgcagctttgggaagccagaacacaatattgcagtgaatctgaattttctgtgacaaataaattattaaattggcacatatgatcatcaccagtcatgtctcatcaaaagcctttattatgatgcttgtacattttgaagaatttagaattaatgagaagttaaccctttagtcattgtaacacaatcatattttaatcagctttttcttttgctaccaagagtttcaaaaaataaatgcagtatttgatttcaggctgctaaatgggctcatttagcattcattccttgatgtagacattaaaaaaaaaactgaatagcattctttccaggataactaataaagcagacatgctaagcctataaatacatcagcactgcagcacacgtttaaggttgccacggacaaggatcacacaatagagaacactgtagtaacatttcggtctgctcacaagacccagaacattgatcagtttttgttgttggtttattatttttctgttaaaaaattgtgaaaagtttgttttagctagatgatattttaatagctgcgagtgctttggaactataaagatgtcactacttaacacatataccttatgttttgttttgttttgttttacactcagtataaatcaggagaagttagccaaccatctagcatttagaatcctcttttttattgtcttctaaggatatggatgttcccataacagcaacaaaacagcaacaaaaacatttcataaatatcacttgatagactgtaagcacctgcttaactttgtgtcccaaatatttagtgtgtatatatatatatatatatacacacacacacacatatatattcaacaaataaagcaaaatataacatgcatttcacattttgtctttccctgttacgattttaatagcagaactgtatgacaagtttaggtgatcctagcatatgttaaattcaaattaatgtaaaacagattaacaacaacaaagaaactgtctatttgagtgaagtcatgctttctattataataacttggcttcggttatccatcaaatgcacacttatactgttatctgattgtttataataaagaatactgtacttata

SEQ ID NO: 416 - DNA, 5802 bp, Homo sapiens
ggagtgcaggcttggaaagcaggagagctcagcctacgtctttaatcctcctgcccaccccttggattctgtctccactgggactcaagaggtgaggagagaccatctccccaaatgcactgaagggaaactggaggagggagggagtgaggggtgatcataccagcggaggcacatttgctgagcccccccgcagtctgctctttccaagtggaccctcctggaagcctgatcccaacctcccctgcaagcaggtctgtcacccccatctctcagatgaagaaactgagccttgcaggggtggagtcccttgtccccacgtcataagggtagtcatagtagtaggaagaggaagcacctaggtttgaggccagggctggctgctgtcagaacctaggccctcccctgccttgctccacacctggtcaggggagagaggggaggaaagccaagggaagggacctaactgaaaacaaacaagctgggagaagcaggaatctgcgctcgggttccgcagatgcagaggttgaggtggctgcgggactggaagtcatcgggcagaggtctcacagcagccagtaagtgaacagctggactcgggctgcctgggcggcagggagaagcgggcaggggaagggtcagcagaggagcgaggccccagaggagccctggggtggagcacagccaagggctctgttccctttcctggactcggcttccacaggccctgacctgcctcccccaccctccggtcctgcccctgtgcctggcagcagccccacctgtgtgacatcccagcacaccccccctctccttgcaaaggagaagggagcggcctaggggaggccaggggcccacctgggctggggctgtggagagggagtggctgggacgggaggaaaaagagagacggagattagatggaagaagagggatttcaagacaaattgccagagatgcagtcagagagactgactgagagacacaaagatagaaggaattagagaaagggccacacagagccagacagagagagaagagtggagatggagacagggacgaggacagagaaaggcagacagacacatagggacagaaagagaaaaatcacacaaagtcagaattactgaatgacagggaatgacacatagaacgagacacagattcagagactcagggcagggaaaggaaggctgcagacagacagacagacagagggaggctgagacacagggagaagaggggcttggagaggtggcacaggcaggcagccagtgcctcagaggcctccggggagggccctcacacacaccccgccccggggcattaaggcagggcttggaggccagtcatcctgggcccgcccagggccgcccccctgccagcccgcctgcctggtgcctggcacctggcgctccaacccagcctacctgctgtagctgccgccactgccgtctccgccgccactgggcccccagagccccagccccagagcctgtgagtccaggaggaaagggaagctgcccctccccgtccaggtgtcagccctccccaaggacacctgtcccactcgggcacccatttctccctctgctctgtccttctctgcttgggtgggggttcctggcctctctctacacctctcacctccgatggctgtccgcagcctcagttacctctaatctccatggcttcagctgctgagctggccctctgctcccacccccgctggccagggcagcggagggcactggccctcccctcgaccagccccgcccagctttgcttggctgtccttcaaaagggcaggggtttggcggacagggcttcagcaagccgggtgatgggggtcccagacattgtctggggctgagccccctactcccctccagcagacctcaaaggctccatatcgctctgctgcgaagacaatgaaaaaggggtggctacggaacggtgtctggttccccttgtccttccaccccaagctgctggggcctggccagctctcaaggcaagaaggaaaacatcctctgacatgtgccggggaggtcccatggctgacttgaacagggccgaaccatggcttgacagctcaaagcccctcccaacgacttccacatggttcttggtatctcggaagcttctagctgtgaccaggccctctccaaggccaccctagacacctaagatatattttaagtgtttggagatctgagtgctgtgagaaacaggggatttccccaaccttgtttctcccaagtggggagcgggagcaggtgagggagagaggagagggcatgagccagcccccccctcccgatttccccgtaaagtgatgcggccccatgtccctccttgttcccagaggaacctggggcccgctcctcccccctccaggccatgaggattctgcagttaatcctgcttgctctggcaacaggtacgcaggggatgggggcagggcaggatcctccctcttgaatctctgggatcccctaaccctctgtgtctggacagtgacagggctgattccaaattacagaacaacccataaggcacctgaactggagcagtggtcatgagggcctggatgcccttctagataatccctttaaatgccaaaggaggagaggtcaagggggtcgtaaagggtcccgtggaggggctgaggaagctggagttgggggagcagtcactcaaagcgcccaggacaggggctactgaccaaccagtatggaagtatttccttttttttttttcccagagacaaagtcttgctctattgtccaggctggagtgccgtggtgccaacacggctcactgcagtcttgacttcccgggcttaagtgatccttaagccatctcagcttccccggtagctgggaccacaggcacctgccaccaagccaggctaattgtttaattgtttgtagagatgggggaggaggtctcactatgtttgcctaggctgatctagaactcctgggctcaagtaatcctcccaccttagcctctcaaagtgctgggattacaggcatgagccactgcatttgaccttatggaagtattttcatcctttaatacccgaccccagcatccagggcaacccagagggacaccagaccagggcccagaccacccactctctttctctcctccccacccccatttctgggagtcctcctggtctaccacctctccttcctgagccccttcttttgctctcaccccctccagggcttgtagggggagagaccaggatcatcaaggggttcgagtgcaagcctcactcccagccctggcaggcagccctgttcgagaagacgcggctactctgtggggcgacgctcatcgcccccagatggctcctgacagcagcccactgcctcaagccgtgggtgcgggggctggggcggtgccggggtggggggctgggaatggggagatggatggagagaagctcagggataggggtgctggtaaggggattagagatggggatgggtagtgtcagcaaggttgatgggctcgagttggtattgaaggtggggggatgaatggggttgggatggggctatggctgggaagggggcttcggtgggagacgtggaagaggttggaagcagagcgatgtttcttcatcctcaaaggtgtcactcacctctcccacccatgtctcccccgacctttcctcctccaactactgtctctcccacctcagccgctacatagttcacctggggcagcacaacctccagaaggaggagggctgtgagcagacccggacagccactgagtccttcccccaccccggcttcaacaacagcctccccaacaaagaccaccgcaatgacatcatgctggtgaagatggcatcgccagtctccatcacctgggctgtgcgacccctcaccctctcctcacgctgtgtcactgctggcaccagctgcctcatttccggctggggcagcacgtccagcccccagtgtaggagcaccagaggggaacctggcagggggtggtgaggagggagtggtcaggattgtggaagggttcagggcatcagagatgcggttcacagtgacgatgtgggataagttgagaggatgtgtggaaaacgtcaggataggggggtggggacaaaagttggggccttggagtcagacggacgggatatgcaatcatacatccataacctcctggttgtaagaccttaggcaagcagcttcacctctctgaatcttgattttcttctctataaaatgagaatgattatacccacctgtcaggattggattagagataatgtatatcaagcaactgacataaatcatttattggatagcaggctgggcaccgtggctcacgcctgtaatcccagcactttgggaggccgaggtgggaagatcacctgaggtcaggactttgataccagcctggccaacgtggtgaaatcccatctctactaaaaatgtgaaaattagttgggcgtggttgtgtgcgcctgtaatcccagctactcgggaggttgaggcaggagaatcgcttaaacttgggagacggaggttgcagtgagccaagatcacgccactgcactccagcctgggcaacagagcaagactctgtctcgaaaaaaaaaaaaaaaaagctggatagcattgctgttgctattgttacaagaagagaggtgagttggctgcgtctaaggacagggattcccccaggggcgggatcacagcaagcactgcattaggggaggtggcagggggctcattcccacagcccctcacgctgtttccacagtacgcctgcctcacaccttgcgatgcgccaacatcaccatcattgagcaccagaagtgtgagaacgcctaccccggcaacatcacagacaccatggtgtgtgccagcgtgcaggaagggggcaaggactcctgccaggtcagtgtggtctccaaccacagccccatccccatccccagcttcaatgacatctttaccgacatccacaatttcatccccaacctcaacccgccgacccctgcaactcccaatccatctcttcccctgttcccgtttctgacctcagcacaaacttcagctccatccccgtttccacaccatttccagctccaaccatccccaaactcgtttttgagcctaaccccatcctttatcccacccataatcccagctttatcgctaaacctatcacctttcccagtgcctacccatcctgtctcggccccactcctaagcaccgtccccacctcctccctggctaacaccatgctcaacgctttctctgaccgacattctctctccccgtgcccagggtgactccgggggccctctggtctgtaaccagtctcttcaaggcattatctcctggggccaggatccgtgtgcgatcacccgaaagcctggtgtctacacgaaagtctgcaaatatgtggactggatccaggagacgatgaagaacaattagactggacccacccaccacagcccatcaccctccatttccacttggtgtttggttcctgttcactctgttaataagaaaccctaagccaagaccctctacgaacattctttgggcctcctggactacaggagatgctgtcacttaataatcaacctggggttcgaaatcagtgagacctggattcaaattctgccttgaaatattgtgactctgggaatgacaacacctggtttgttctctgttgtatccccagccccaaagacagctcctggccatatatcaaggtttcaataaatatttgctaaatgagtg

SEQ ID NO: 417 - DNA, 294712 bp, Homo sapiens
ggagggagcagtcggtcgctgcgccccggcgggccactttcccgggaccccgctcgtcttccttgggccgagattttccactgcgcccctccgagtacccgggttccaaacccctagccacgacatggaagaatttttgcaacgcgccaaatctaaactggtaagttgagtgagcaaagctgtgtgtgtgcgcgcgcgcgtatgctaatggaaaggtggagaggaaaaggtgttgcagcagaggaggaagaaacaactttgccacggagttatcagggtgtgcgggttgtctcctggaagaaatctcaggaactctggctcttaaagctggcaatctgtctccagaatcctccaccgcaaccagacgaggtgcagagctgaaggaggttgtggcctggctgaagttgggtcgcttcagtccagcttcggtccctaaatcagcagtttgctcctgaaagctaagggataaatgggtgtggtcttccttgagataaagagcccagccttctgcagatgcattacgtgtaagtgtaaaaggaaaaaaagagacccttagaactgtacttcagctggaggtgacaaaagtgaggaagtcagggtgctgggtagcaaggacatgtgtggtactggagaatccacagaatagagcttgctccactgcaggagttagggatattctagtgtgtcttgtgtctcgctaattcctgttcacatctgtaaattggggcggaggcagaaggggaaagctctaactgttggtgttctggagtttaccagatcatcgttctcccgggagcagacctgtgtgttagcccatgtttaccatatcactgtccaaacagtgaatgggcaactccactgtgtatgttaacagttgctacacattctgaaacaacagactctagcagtttcttaattccaaactgttttggctctccagcacagcagtaataaacataatggaaatgtttctgttttggcagaaaaaaaaagaaaagcctgtactcatttagaagcaatatctttaaagaactgtaaaagcaccttttacaggcctggcatagaaagaaatgcataatttatgatgcctttaacctttaagccttcatagaagccaaaatgtaaagtctgcattaaggtaatgttttaatcacaaggcaggatatttgcagggttattactgtaactcatttaccctcgcacaacaaagggagtgcaggaagggagggcccaaagatgcctgaaccaccattcagagtgcagacggaagtgtgatccttacaatggtctaactgtaactatcttgtaaaagaccattaaagttgataagtgcttatataaaactttctacctgaaacctcccagagagttgaacgtttgtggagatttccgagttgaggaagtttgtgatcatctctgtgtttattgacccttttatagttttactagagcacatggatgaaaatactaatttcagaaactcaagtaagtatttggcatttctgatagtataagtacatgttctgttctttacctagtaatgaaggagaaatgttcaaaaatgaaagacaattttggcaactgtgcgtgtgtgtgtatgaaaatggtaatcaatgacaaacacagagttctgggctgtatctgtttttcactcccataacatttatttatcaatattttcacaataaacatttagactgtggggtctgatatgagcaagaggtttgtctcaattctgaggagcagttgctggaatggaagtttccctatttccgagtaatgagttgaaagtaatctgtaatttatttacccttcattagacgagcaattgctctacatcattaaaaaaaaaaggacaggaaagagaagcggttgtttgaaatattgttaccagtttcatgtcttagccagaacaattactgctaattttatcgtttcttggaataagcttcttctagaaatcatgattaacctttcacatccagccacagcaaaggtgtgttggtcacttttagtgtcatattttcctgagaagttacattttctaggtaataagatttttacttaatgtatgacactcaaatatagtagtagataacattctcctttagagggtagataacctttttcttggagaaaaagaattaagtcaatgtcattcacttgtgggaaatttatttataataaaaaggtaagatttggccgggtgtggtggctcacgcctgtaatcccagcactttgggaggctgaggcgggtggatcacctgaggtcaggagttcgaaaccagcctggccaacatggtgaaacctcatctctactaaaagtacaaaagttagccaggcatggtggcgtgtgcctgtaatcccagctactaggggggcagaggcaggagaatcacttgaacctcggaggcggaggttgcagtgagtcgagattgtgccactgcactccagcctgggcaacagagcgagactcagtctcaaaaataaaataaaataaaataaaatagtaagatttttaaaaattcagccaatcctttggaaaacattttaaggtgaagaaatttaccatgctgatttttacttaagccttattagaccagaattagaatgtaggagctatgttttaaatgtttttctttagaagtttagctatatgatacctaaacaaacaaacaaaaaagcctaattactagtttggtttttttttttcctatttggcttaattgctttgttattctgtgggcattatatatattttttaatggtttgaaatagttaatgactcctccaaagtcctaacataacctcatcatcattggggctagctaattccaataggcaaaaagaactttaaattgcaaaatggaattgctattagccatagatataatctccaataatcaaaatgttggaaaaattgtgtgtctttttttctgactgggaacatttattattcatctgtcattgtaaggagagaggaaactctgctattctaggccaggcccctaggttgaacagaagtctttgaaagaaaaggatattttgaatttttatcaggtagtttggagctgatttccaataagttaggagatcactctcaattctatttttaatcccagtctggccctactactctttaaattgaggcagattcactgacataatcccatcctccttttccctaaatctccctttctaatacctttccctccctcctgagaatactcagtatttatcagaaatggcaaaagtaaactccaggtgtggcctcagaggcatccctcctcctggggctcaaatgcttctcatgtgggcctgacttctgcctggttaggacaggctgggggctggagcatatttgtgaaaaacttggttggaggtggggcacggctagggaggtagttacttcttccaagcagtctccagaaatgctcccttctagacaaacaaggaatgacacatatggaattgacacgaggattgttaaagcaataataacagtaggataagcaatctgagagcaagccccgcaagcttgagatcgtaatcaaagagtggcgcttcctagttgaaatcacttccttgatgtgagaacccagccatatttttggtctggatacttactaccaaaactagagagagtgcaaacgtattttcttttttctcctgcccattcagagttgcagaaatcaaatcctatattccagatcagtccttaagttttagccatgctttctgttcttagttacatcatttctatggtaagagaagttgaaggagtgtagggaatgagggctccctgctctatgctgtgatttgggaaatgaccctcaacttcatagtggtcagctcaggaaagtattcaggacaaggacagtctcatggcagtaaatggtccatgttcccatgaagtttggggggaaaaaatgaagtacatgaggaatcatctggggatgggtagagagttctgaggctctggctggcaggaagccaggctccccacactgggcctctgctgctgagcctccctcactgcccagacccccccaggtgatgcaactcaagcagctgttaatgggtggagatcaccgcagccctcatgccctatgatgtaggtcaggagccagccttgggtggcgggggtggggatgttgtcagctgtcaccagcaagatacagggcacatcagtgtcccaggaatgctgttttcaacaagaaggtggacagtcactactgcagtccaggggatgcatctgctacttcagcagtgacagctgtggaagaagggctcatttctgcagtaggtattagttgatatgtggacttctacagaagaaaaattctaggtgacttgaatgtcagctcatactctgtgatatgtgccatagggacaagaaagtacattcaaaactctaaatgaacaactgcattagagtgattacaggagatggggttttaaaaagaaagaaagacggcagcatgtctgcagaataatcaacttgattggaaattgaaggcatatattcttcctgatttcctcttgcatgggaagaaagttccgcgtatcaataaaaaggatatttaaagtgaatgcttcataccttttaaagggctgctgtggtaaggactagtaatgatgaagaagctggcagagctgtttcatttcaggagctgagcttattctgatcagagaccatgggatcagctcctgccccattgcaaaccagggcaggtgctcttgagaccatgcctcttgccagagcatttatgagcaggaaactcaggaatccaaagcacttcccgtgaatgtgataccccttgcttaggggctgatgaggaatgaacccttgatttttttggtcctggagttagcttcatttctcactgccagatcattcagatgaacagctgcggattgtcccagtcctgggacctttggagaagagccatacttttttagtgtaaacagatcttcaagtggatcagtctgtcgcaaaggaagagaggtgctccctgtgattcagacagcaccttgggtcttggaggacatgggatcaggtgagcaaggtcaccctttaggcagtgatatggggactattttgtcaactaagtaaacagctgatggctttggtataaccagtttgtttctgtgtaacatttatttgggcagatattaacataattttgagtttggtaaactggtctggggagctcctgtaagcaatggcttggtgatggaggcattattcctccagggagggggtagagggaacctacccctccgtgaatgttacctgagcagtgagaagaatgagggaagaatacttggatctggataaaggctgcaaaagaggaaacaatatcaggggaccagagagaggggatgcaacgttagttactgatttttcttgaaccttggggattatgggagagtcctggagtttgaagtcttcttgaaaggaaactggggagggctgatgtattcaggaggcagcattcctatggacggtgatatgaacagtgccctctgagtttgtatagtacacaacctgcacagtcattcgtggctaccctgttaggggtctcaaattagcgtactcaaaatctctagcgttgtcccaaatccatttctttctgagccctgtggctttggactttggtttccagggaaaggaagtctttcttcttcagagctcttatgagactagtgggctctagatcaccctggaaaatcagacccacaaagtttgggttagaataatcaagctgataaacacagctttggtttcttaatctgaaaaatggaataagtgatgcctactttgcatgtttgttgcaaagccaaaatgatgtattcatagcccttagcacagaacctggaacaatggtgggtctttccacttgcctccaagcccgtcctcttctgtacttccttgtcttagtgaatggcattgtgattcatccagtttctccagctgaaaacttccttttccttcatctcttccctaacccaccctatccttaagtcacccagatgaccacaatggctggcaaactgctttcaccctgcttccagggagatcattttgagagcatctttcacacctttcctacccctcccttaaaacctcctcatcactttccattgttcttaggagaatggacacacttttcgtatgacctgatctgctatccagcttctttctggcttttcctccagctctccttggcttaaataattcctgcctcttaggttagacaaagaaaagactcttctaagtgagccccctcacctgcttcttgagtctaagtcaggtattttggtaattctttagatcacttatttccgcttgtcattatatctctattgggcatgtttgttcgattaatgccagtttggtgagagtagggaccagggtctgtatcattttgctcaccattgtatctcccggttctggtgcagtacctgatgctcaaagagtggttttagaattaataaaccctaaaggcaagagtcctgcacaaagcatgacactttgtagtggctcaataaaaataaataaacggagggccaggtttagatttttggaggtctgaatctgaagaaaggctattgtcaggaggcaggaagccatatttgtttgctagaagaaggtgaaggacactaaagtcaaggagcaccatattgtacttcatacacagtaagtacttaatacaaagtgttaagacaaaataaaaatctaatttttatgcatgactgcttgggatctataaatattggttgaactaaagcatgaatggagagaggcagaggagaggaatggggcactaaaagcctctgcaaaactgcattgggtagatcagccaacagtggaaccattggaaccgtaggttctcctccatgtggctcaaagactagaagttgggctcccccaaggccaaccactgtaccaagtcagcccagcctagtctcttgctgccccttgaccagtgctaatatcatgagagagattggcagggaagctgttcagagtccttgagagaaaagattaggcattccagacttcctgtccagccctggcactgcagacctcatgtgtggggtaaacccatgcatgatcctgagtcagacctctcgtccaactagtgggactgtttgtggtggagcgtgatcatggtcttccacttcatctaactctcctggatgtgaccagaccttcccaggttatttgttttagcctgtaatgccagagtctttttgaactgatgatgtctaggaaaattgcatatctttggctccatgcatttgatatttcttgctttggcttcccagaagcttaaagctatgttggtgcttcattttcttagcctaggatttccgaactaaggttttttttgttttgtttttttaattgttactacttagttttaatctcattatagttgttttaatttttttactttaatgtatatgcacttttattataagtaggttatccttttggttactgtcaagaataaataaatacatcttataataatatatatgatcttgagtatatattggtgaccagtctggcctaattcagggttcatctactcaaatttgagaattagctttttgtagtaatggagaatatagtgtgggacttcagaataagtagctgaaaggaaacatcaacacagtccaaagattgtctgtgttcccatccttgatgattgctgacctccctgagagcagcaatagccacacttccttatatctgagcccataaatggggaactgtgaggcagtccctggcagaggctgcctgccctaaatcagatcctgggagattttcctagagtatgagttgtggatttaggagacccttagaaggacttttgtcctccttcccacttcttgccccctaaaggcagtacagccgggcggctaatcatgtggagccagtgcctgatttcaaatcctaaccccgccacttttacttgctagtcacacaatcttagtttcttagcctccccgggtctcagtttcatcatctgtaaatgagaacagtagtagcactggcctcacagggctgctgcatgtgtgtatgccctgagacgaggacgtgatctccaggcacagtaataaaaacatgaaaaggccactagcaaacaagagccaggaagccctatttacatttcacagaaacaggaacaattcttagctgtcttgcaattcagttagaatttgtggaatatctgtcttagctctaagagatacttttaaaatttgatttaactcccacaatggtcttgtaaggtaggtactaatctccttttgcagttgccaaaactgaggctcagtgaggttaagaggtttgcccaggccaggtgcagtggctcatgcctgtaatcctagcactttggaagtcccaggcaggcagattgcctgaggtcaggagttccagaccagtccagccaacacggtgaaaccccatctctactaaaaatacaaaaaaattaactgggcgtggtggtgtgcatctataatcccagctacttgggaggctgaggcaggggaattgcttgaaccagggaggtggaggttgcagtgagccgagatcatgcctctgcactccttccagactggatgacagagcgagactccatctcaaaaaaaaaaaaaaaaaaaaaaaaaaaaaaaaaaaaagaggtttgcctaaggttgcatagccacaaagagtagagctggagtttgcttccggatcacctgacttcaattctaggaccttcttcctcataccataagcacctcttcccccaagatctcctggaacatttcattcttgttaaattaaaagtgaacagcttgacaagtttataggagggctgagtggtaagttagtgaaattgcacatatattgttcacgctgacccaagaggggttcattcttctgtgttgcttgttttatgttaaaatcttttggacaacagaatatcaaccaatgttactgaaatcctgctatgagaaaaacatggtgttaggccatctgagatttggttgaatacattgtgagattgttctcactgcatgcccatttgaaagaaaattaactgataaacgattgggaggagaatgtgtgtgattagcttttagagtaattagaaatgttatgggcatcatttggtgaaatgttaagaacaagaatgcatttttaaaagagtttaaatgcctcttatttgccaccaaggttatttggttttgtagtttcttcactgttgccactctcttattggtggccttaaataccactttgatggattgaccgatgtcagggggtctaggcaggagaagatccagggttagaacacagctctcggttgtgtcaagtccactttggctctccagtctgctggtttagcagcgccccagaaaactgttgattatgctcacgatacacacagaagtgaaggaaaggggaagaaaggaaagaaggaaggtggaggcagaattggaggggaaataggagaaaagaaagcgatgaaaggattcaagaaggaagcaagtatgaacatccttccacaattcaggacaggatgcgttgtaagtgcaacagttcttatgtccacggtcacttccctggcacatcagccaacccaaagttaccccaaaactaggaattgggcaaaggcaactaaagttgattattgaaaacctatcatcagttagttcttttctcacaggaaaattccctaagtgcaatctctgaggctatttgcgagatgatacttgtaaatcattcacagaaatgctgggagcatagcaaaacacatgaatgctagctaccatcattgaggttattatttaatgtgcactttgacacagtgttcaccaaccttgttttctcagaaggggatgatggaaagggaggtggctgccagaggctgtaatagatgatgacttacgatggggaaactacacaaacaaaaccaaaatcaaacaggacctataagaagcagacctgatggcaggcgtggtggctcatgccaataatcccagcactttgggaggcagaggtgggcagatcttgaggccaggaattcaagaccagcctgaccaacatggtgaaaccccatctctactaaaaatacaaaaattagtggtggcacacacctgtagtcccagctactcaggaggctgaggcaggagaatcacttgaacccgggaggcagaggttgcagtgagccaagatggtgccactgcactccagcctgggtgacagagctagactctgtctcaaaaataaataaataaataaataaaatagaggcagatctgggcccccagtaagtgtcattccatttggtgtcaggtaaataatcccaaatatctgcacagcccttggcagacataacatcactgacataaagtacatatctgatgctcatagtaatgaccctaaagaatcagggggaaaagatcatttaaatttagtgtcctgtttaagaagaaaggtgtggtgcataagcgatttcagaaaaatttcccactcagataattaacatagaaaaaaatagaaaagaagttgtggcttgcagggtaggcttcggttgtctgacaaagcctcttgcataggagaccttgttcttgagtgtagccagatatgtgaaacgtcatggtttataacaagtgatcatgagtcaggatggaaggtgatggtgcaaaaatgtgagtctgatgtggggaggcataaataggcctcagcacgtacaagatgtgagcagcctggcgccccactcccattctcagtggagaactaaatctggttcttgactccagaggaggcacagcaatgaccacagaggtataaaataaggtccctgagaaaagcccgtgagggaccagaagactgctgatggccttgcaattctttgaaaggttcttatggaagagtttccacccatggaaattatttcttcccctcagttgaaaaaacaggacttttaggatgagtggctttttttttctccctcttaaggaagcccattcattaaggtcccttttttttattttttgagacggagtcttgctctgttgctaggctggagtgcaatggagccatcttggctcactgcaacctctacctccctggttcaagagattctcctgcctcaacctcctgagtagctgggattacaggcaagcgccatcacgcccagctaatttttgtgtgcgtgtctttagcagagacggggtttcatcatgttggacaggctgatctcgaactcctgacctcaggtgatccacccacctcagcctcccaaagtgctgggattacaggtgtgagccaccgtacctggctggtcctttttttttttttttgctgcagaaaattaatgaaagggtgcaaaaagagaaaagtgcatgttggcttcctcctctccagcaacagcagaggcagaagatcatcctggaggcagaagcattttgatcctctttacattcctcagacacattttctgtaacaagtggtcagtggtgctggccagaccggcacctggctctgagaagatagaaatgtcacagcatgtggacagatcagctgctccctgccacgggtatgtctgagaggacaggacacgtgcctggctgctccctgagaaggcagtgtccctggtcctctctccaaggaggcaagaaggggcaaatcccgttctgtcccccattcttgattctttacagttaaatatgtcccttggcccttagcaagctggtttgtttttcatgcgacacctcctggtcaaactatggggtatgattctctcatccttcattggctacagtataaagagacttctggagctgcttccttttggaggactggattcttgcaaggaagggtgggcagtcttttagccgattcttgtggattaatttacaactttgattcaggttttgttttatcttttgagtgtttaccaagatcattgagagaactcgttttttctctttagatggtgggcaaattgcaagcatggtcttaagaaatgtatataggtcacagaaaaagataaacaagagggagacattttattccctaggtgaatctttcttctattgtttaattatgaatctgctttgcaagaccctaaaataaagccatccatgaagcaaagcaattttcgtggccctgtgactgatcatgtgcttgccacttggctgatacccctggaccgtggcctgaagtgtcattactcttggctccagtctccagaaaacccagacataaactcactgtggtggatgcagatcaaaatgccatcccagagctggcttttaaaatgttttgaaaaattcattatccctctaagccattagatcactttgagccttatggggaacaaatgcatttctcacttctgtggaattctttcatgccaaaatagcctcctgaccaagcgcaacatctctgtacaaatcaattcatacacaaagggtttcataggctggcatttacgtagatggctctgatgaatctcataaacactgagccacacttgttacaattggcccctttgttggacttctgctttcagcaggatttatattcagccaccctgatcaccatgtcaccctgggtacactctgacccatcacttcagggagggctgtggaaaacagccatcagggttccttgtgtttaagtacagcattctgtggccatcatcttttatttacgatttctcgttgtgtaactgtgagttattttaacaattatagaatcacagacctttacactggaaactactatagaatcataggggttttttgttattgttgtttgttttgtttttagaaccagggtctccttctgttacgcaggctggagtgcagtggcaagatcatggctcactgaacccttgaacttgtaggctcaagcgatgctcccacctcagcctcccaagtagctacgactacaggcatgtgccaccaagccttggctaacgttttgttttttattttgtagagacaaggtctcattatgttgcccaggctcgtctcgaacttttgtcatgttctttgtcatgaaggatctcaagtgatccttctgcctaggcctctcaaaatgttgaaattagaggtgtgagccactgtgcccagcctaatcacagatttttagcattgaaacagatgactttagacatctatttcagtttcctcatattatatttcaggctcagtttctttgtaaaataataaacaagcaataaggtatatttggcaaatagaggaaagctgaaaaattacccataaaaagaaaaaattaaaactaaaaataaaatcacccactttcattgaagcatgacctttcgtgatagtttggcaagtagttttctcagtctttcttccttgtgcacaggacttaagatatttgtatatcttgcaaccccaatttttattttacttaacattatttattattttcctaagttattacatagtattcaaaatcaacatcttaaataatggagcacagtttaataaagaagacctactgaggttaaaccttttcattgtccctcctttttgctattgttaattactacgacaaacatctttgcacataaaaacattttctcctgtttagaattatgtctttaaactggctttccagtatgcaatgattagggaaaaagatattaatattcttaagcttctttatacatctttttaaattgacttctgggtgaactcttcccaaatttcaagactcagagaggttaactagtcccacagtacattgtgacagagtcagacatagatttgaggtctcttgaccctgaagtctacaccccgacacgttagagaatttgtgcagtatgagggagaatggtgtcctgatggtatacattgtggatctgagcaaataacctgaagtggcctgcctgctgagttgagacaagcgtaacagaaactgtgccacaccagttacaactctgctaatgagaccagtaggtagaatctggctgggggggctactttctctttgtcttttcacttcctctctcaattatttcaaaaagattgagccttatggaacagtaaagctattgctgctctgctcggtgtggtcactcggagcacagtgttgcccttcataactgttgtcacctacttgatctcatttgattaaccttgaggagggttcatgttattatatttatgtcacaaatgaaaagaacaaggccagagaggttaagtccagccttgcccagagacacacagccagtaagtggcagaggtgggcgtagattctctgtcttctaattcccagcatctgtgcgaagaaaaattgatctgtgttttcaaaagatagtttgaaggtctcattgagagcatagtggtttggattcatctacataaaagaaaatgtccgagtgaaaatacagggcacttttctgagaggaggctattcaacggtgaaatctattcatcctgatgccgcttttctttgacacaggaaaacatacgcatcaagctttggagtttcgtgtgatggactctgatgtacagtatgcaactgtgagattaatgaatgtgtcactggtggaaacatgctgagcccaacaggctctggagactaagtgtcacctgtaatggaaagaaggcacctgagaggcagggtctctggagggcctgtgggcatcacctgacatgcctgtaatgggacaacaggtgactggatgtcacttatagtcatttcagctgagagttctctgtaatgtgggaaagaagtttaattgcctataacatcaactctttccctgctacagagcaggtgtaattctgtcaaattctctcttccaacctcctcattctcagctgtttcttcatttggatcatattcattaactgcccaaaagcctaaatgcatcccacactgatgcaatggggagtaattttcgtttagtgcagtttgatatcactgaagctaaattccgctctttcaaaactctaagaagcacatagatctccctaccaatcttttgtatcaccatagcatgacaaaggcaacatgattgctaaagccaatatgcgcaaagatgaagatgcatcagatgcattggcctctggtgagtggtcctgggttgcctgtgttttccaatctttcttaagcatttgattaattcacgctggtgaataaagaaaaccgcaaacataattgaaagaaaatctaggcagctggaagtcaaggttagtttggacttgtaattctgtattggtgagaattttgggttgatacttgccctgaaaacttaatatgattttttttttagagaagtctgttgtctaattggatgatttgtgtacagtatgataattcctttacagaccccgtgttgggaggcttcggtatatgccgagggaagtagacttgggatgatatttccttgtaaatgttgggtgggagtggaatcactgactctgagagactgatgtgatctgcatagttgttaaatcgtgcacacctgctaaataattagcatgctgtggggcagggggtcctggaagtaaatccttgcatgccccaatttttagttgtccaactcctttctgaatatacttctgctttattttaaagacagagcagaaagcattgagggccagataagagcagtcaaattaagctagtatctcaccatgactggtatcccatgctgggtctcctctcctgtccccatttcctcaaaatatctttacaccacttcttatccttatcactcccccttcagcatagcctgctcttggtcagcatgccagggagttaacatctatcagtgttttctgtgcagctacatatgttatttgaccttcaccgtcatcctctgagacaggcatcattatgcccagtttgcagagctggaaactgaggctcaaagaggtcaagtaacttgctctagggaacacaactaatgaatgttggagctaaatttctggtatgccattcctgagagtcttagcttatatttccacttcaacagactgcagggacataatatacttacttcaggaagagtggtcattccggcagcgctctttaaactttaatgcctattggagtcacctgggaatctcgctgaaaggcggactctgattcagtacactttggggtagaacccgggattttgcacttctaacaggctctcaggagatggcaatgctgctgtcccccagagcccacaaatctgagtagtgagtgtccagagcattgatgagccaggaggcaggagcggtgcattagaatctgagggggctgcacagctgggagaaggtgccctgcagtggaagtggcatgcttccccccgaggaggtgtggccttgctgcaatcacattgtggtgagacgcctgatgtgccgcgtctgttgctactgtatttcaggtaagatcattggtttgggaggaaaaaagaatctttttggccagacgaggtgggtcacacctgtaatcccaacacttcgggaggctgaggcgggaagatcactggagcacaggagtttgagaccagccaggtcaacttagcgagacctcgtttctactaaaaatcaaaaagtagctgggcttagtggtgtgcacctgtagtctcagctacttggggggctgaggcaagaggattgcttgagcctaggaggtcgaggttgtagtgagccaagatcataccactgcactccagcctaaactctgtctcaaaaaaaaaaatctgcagtcacgccaccatgcagagagccatgggttctaatgacccataaaacaggccctgcatgcaatacatatttctaatatgtattaaaatttcttcatatcccttatgcttttctcatacaaaacacagggccttgtgacttcacagtgcctggcagcaaggaaggaccataaatacgttaaaacgaccgggcacggtggggtcatgcctgaaatcccagcactttgggaggctgaggtgggtggatcacctgaggtcaggagttcaggagttcaagaccagcctggccaacatggtgaaaccccgtctctactaaaaacacaaaaactagctgggtgtggtgacacatgcctgtaattccagctacttgagaggctgaggcaggagaatcgcttgaacctgggaggcggaggttgaagtgagtggagatcatgccactgcacttcagcctgtgtgacagagcgcgactccgtctcaaaaacaacaacaacaacaaaaaacattaacaggctggagggagaagtagaagagaactgaaggaactggcagtcttttagggagtgcagagcttctgactgagctctttgaatgatctcaggaggaggaaagcacaccactcgccctacagaaaacttaatgttggaatgaaacttttctttcttttaagacaaaaccattcacagttcccctcaacaccttttggtctctttctctctttatctaaataataataataataatagttattattattattattgagatggagtctcactctgtcacccaggctgaagtgcagtggtgcgacctcggctcactgcaacctccacctctcgggttcaagcaattctcctgcctcagactcctgagtagctgggattacaggcctgcgccaccacgcccagctaatttttgtatttttagtaaagacaaggtttcaccatgttggccaggatggtcttgatctcttgaccctgtgatctgcctgccttggcctcccaaggtgctgggattacaggcgtgagccaccgtgcccagccatatctaaattatttaaaatgtttcttctctttatttgatgccatcttcccagaagtccttgtgactggatggccttcgcgtttgctttcttgtccccaccggccctattgttagtggtgcgtggttccatgtggtgcttagttatttatggtcctcctttattattcatgcctttcttcctttgttcatggctgttgcttagtcactgtgcttctctgatgtgtttttggttcatgcttcatttcctactgcccttttgtgcttttctattccttttcccttaacacagaattctgtttctcttaacatagtggggagcccggagtggtttgtggaactttgtttagcttggggatggtcagcaggcatcatagaggttttaggaatcattttaggtgcggttctttatcaactgtctttcactaggttatgccgtggtagcaaaaatccccaatgtcggtggctttcagcattaaaggtctatttcctgctcatgttacaagttgctgagggttagctgtggctccaagtgccttctgcattctggaatgtaggcaaaaggagcaacagctgtctgggatatgctgctctcatgggtagaagaagagagttagggagttggtaggctccagtaatcgttcttaaagcttctgctcagaaatggaatgagccacttccactttctcttcatcagccacagcaagcaagttacatggccaagcccaatagcagtggggtgggaagtatactctgcccatgggcaggcactgaaagttttatggcaccgtgcagggacggattattgtcatttacaggaaggaaagttaataattagaagtaatattgcaatctgctacgtggtgagagctagcattcaccatctggtggacactgaacagaaccacacttgtattctgttgatggccatatcaatgggtagattgtgaccaattaaaaaccttaaaaaataggagatttgggggacagtttcaattaatgaaaatctccagtagctatttagtcatctcttatgccttcagatgagggttgagcaggggttgttttcatttgggatgacttcaggctgcatctatgtcccaagttaggagtttggggaagctaggtgaattcctttaggtcaccagggaagcatttatggaatatgactgcctggaagatcttttaaattctctgtgctttagtttcttcccaatataagaaatataaattgggactaacaaaagacgctccttcataagggattctgaagataaagttagacagcatatgtaaagctcttagactatgtctggcacataatcagaatttttgagtgagtgctctaatgatgaggatgatttctactactgtgatatctcaacccctggaaaacatattgggaatccccaaaccaccagttttagagtcaatagataatcagatttatgttcctgagttaaaaatgtatttattaagataaataaataaaaccaaaattaacccagaaagtaggggcttaaatttctggcctcttgaaaaaactagccacaatttctcttaaagacattaatttttaggttgtgtgttcacccgcttcagtcattgtgtggagtgaaaatcctttaaaatatgttacataaagttcttggtttattaggtgaacacagtgcatttggggcttgtttgggtggggaagttgtgtggtttgctgggaaattccaagcaagggcagaaaggagaggcctccaggcttctgtccggaagtcagtggcttggcttcaagggacaagtcctggtagaaatgggtaaagctatgcaggttactgctgtgtggggtgtttactagtgaacataatgaggcttctggcctgacaactgtttttgtttcacatcccatcagctgagcctgagagccttaaggtgaaaggaaaagaacaagggtcgtggaattagaatgtcaagttcagttacttctcagctgtgtgaacttgggtatgttccttaacctctttgggtcttggtttattcataaatgtaatgctatgtaatatttattcatcatgatcacgtgtaagagcattgcataagttcttttttttttttttttaatttagacggagtctcgctctgtcgccaggctggagtgcagtggcacgatctcaggtcactgcaacctccgcctcctgggttcaagcgattctcctgactcagcctcccaagtagctgggactacaggtgtgtgccaccatgcccagctaatttttttttttttgtatttttagtagagacggggtttcgccatgttggccaggatggtcttgatctcttgacctcgtgatctggccaccttggcctcccaaagtgctgggattataggcgtaaaccgccgcacccggccgcattgcatagattctttaccctaaaacttaaagtataataaaaaaaaaattcactaaataattttattttcataaaagccctatttggtaggtactgttatccccattttgcacatggggaaactgaggtagagaggggtgagtaactagctatactcacaaaggcaggaaggggtggagtcaggttttgaacccaagcagtcgaactccaaagtctacatgcatagccatcgtactttgctgccctttgacacagtcagcctgtcaccgggggttgccgctctgaagagtaagtctgttcatttcttctaaatcctagtccactgtttatcatgtaggaagtagatgctctgtagacattaatggttgttttccttcccctttcctatttcctttcagctgtcctggtagacccaggtaatcaggacttagtgggtgcctaggaatggggtgagagatcttgagccccaattttccctgggcaagatctcacctgactctcaaattcaccttgtctcatttattgcatgaaactttctttcactttttcagcctttatagcaccaagctagaaggcattatgtcatcttataaaacaaaccctaaattgaaaggaagaatggcctagtttggtgtccctctcagcacacaccattatgtcttcatatgaagccgcctagtcaagtaatatgtgaatgagttttacacatattttaaatctgctttggagttcatctatctttaaaaatgtatttgatttttttccccctttattctgcatggtttcaaagtggggagctccttactccttccctttgggtaaataacctctatggtgaaaggtgtggcacacacagattggccgctgtgaaaaccagacacacctcttcagtgattctgtttctgtttcctcttactggtggttaggttccaaattgtccctgtggctggtgccatgttccagaagcagaaatatgtcatggaaaaagtaatggctccagggaataatgagaggtgggctttagtgctttcctttctaagtaggagctgtgttaccttagcaaataactggccttttctggaatcctgtttctttaattgcaaaacaaggaggcagtgttagttcaactgttccaaactagggactccaggattttgagatctcccatgcagggatccattttaatattttaaaactagtaatgccgttcaatgggaaataaaaacttttaagacatggagtccacagagaaaggagaaaatgaaagagatcactggcagtggaaagttggggaacaagaatcagttcttatgtatttttcttgcagcactgtgcacataaagtccttggtttattaggccaataaggcatatgatttaatctctaagtcttagtcaatcagacatattatttacatctccaagtcttagttttctcatctgttaaaatacgaggatagtatacaatccatatttggggttcagaagtttgttgtgaagattaaatgcatttgaagcacttagccaatgacgctcagtacactgtggctatttttctagttcttcagtgtgggtttaaatttacccagaagggatattttagattaaacgagcccccacccgattatgttgtaaatttccttagctctagggtggggttatttgggttgcagtgaaaccagggatggaacagttaatcaccacttccttaggaactataacccaagtgtgctttgtgcaagcctttcagcaggataaaccatcaactggttacatctgggcccaaccagaataggcaaatggagagaggagagaagggagagggaaacaaacatgagaccaaagcccctggaacagacaaggcattcctagtctttgctgtttattgcatacacactctcagtgataattgctaccatttaaccaggacttactatgtgccaggcactgggctaagcatgtctcatatactgttttaattttcttagacactctatgagccactctcccatccattggccaaagcaagtcacaaggcaagtctagattcaagggatggagaaagagacttctcttgatgagaggagcaacaacgtcacatggaaggggcacagataaagggtggggccacttttgtcagtttgcaaatctccacagtataagtagtagagaagatgatgcattttcctggaataacgtctgcacccaagaaaaagggagtcaggcgtcagtcaagtgcctccttgtgtctgaaattcctctcattacaaagagtccaagaggcagtataatggaaatgtggtaccattgtttgaactactcaggagccatattgtaactatttggagaattttgtgcttcctgaatttacccagtttctcctgttcaaaacaagccccaggctaaatgtcacttatctgttatcccaaagctctgctaagtgctacatggttagtttggtatccaaagctgcagacatttctaccagcttttccaaggtagagagaacaaataatgaatcttaacttctagaagtaatcaatccctcagcttattaattcatgaaagtggttgttcaaggttgaacccgaaaggtgcgatgtttttttactgtggggagtaagatggattcttggacgactcgaggttttttctatttgcaactgacactggctttctgtatttaatagtgacaatgtagtttttgtgaaacaattttgctatatgtaaaagtgagtcaactaaaatgtgagcaaataatacaggggatctatggccagggcaaaaaccacaaagatggtatgtgaatgattcttggtaaatggagtcacgtatacaaaagcttggaaaggcaaccacctagttgagaaaattgaggcctgaaagaaagaaaactgaggcctgaaagaggaagtgagctgctgaaagtactatacctaataaagagcagctctgggcttggttgcagccctcctgcctctaaattatttttatctcccactgtaccaaactactcatttcctctaaaccaaaaaccccaagtaaacaaaaattacctccatgcgtgacctggtttggatatgtgtccccaccaatttcgtgtggaattgtaatccccattgttggagggggtgcctggtgggaagtgattggatcatgggggcagatttctcatgaatggtttagtaccatcccctggtacggctcctgtgatagtgagtgtgttctcatgagatttggtccttttaaagtctgtagcacctcccctctctctctcttgctcctgttcccaccatgtgagacgctttgctccccgctttctttccacccaccttgccttccaccttgattagaaatttcctgaggcctccctggaagctgagcagatgccagcatcatgcttcctgtacagcctgcagaaatgtgagccaattaaacttctttaccagtctcaagtgttttttcatagcaatgcaagaacggcctaatacagtgtgcaaacacatattttattaggaaatgttacaaaatgaataatatttcctaccatttacagctaagcactttacatgcttggtgatgagaatggtaattataatcatcatatatgaggtgaatgtttaccttagtatttgggggagttgcctcataattttttcatggacttaccctataatcaaaaataaatttgtacacgaaatctgtaaatatactatgtatgctttgagaaaaatattaccttataaacacatactcatatatccacattagattagagagatttttcttaccagaaatcacatttacccttgaaagaataggtgaagattaataaattaaaaataaatatattaaattaaatactgatacatggtacaatgttgctgaacctcaaaaacattatgcaaagtgaaagaagccagtcatgaaagattacatattgtataattccttttatatgaaatgcccagaaaagggccaggtgcggtggctcacacctgtaatcccagcactttgggaggccgaggcgggcagatcacgaggtcaggagttcaagaccagcctggccgatgtagtgaaacctcgtctctactaaaaatacaaaaaaatagctggggatggtggtgcatgcctgtagtcccagctactcgggaggctgaggcaggagaatcacttgaacctgggaggtggaggttgcagtgagccaagatcgtgccactgcactccagcctgggtgacagagtgagactccatcttggggaaaaaaaaaaaaaaagaaatgtccagaaaaggcaaatctatagagacggattgtaaattggtggttgctggggcaatggagaatatgtatagggtgtctttttggatgataaaaatgtttaagaagtagatagagtggtagttgtccaatattgtgaatggactaaattccattgaattgttcactttaaaatggttaattttatgttatgtaaatttcacttcaattaaaaataacatatatatgtgtgtacttactcatatatactcataaacaaccccatgcatggcatttttattattttattagtatagtgcttctcaaacgttttggtcttagatccctttccactcttaaaaattaatgaggaagccaggctcggtggctcacgcctgtaatcacagcactttgggaggccaaggcgggtggatcacgaggtcaggagttcgagaccagcctggccaatatggtgaaaccctgtctctactaaaaatacaaaaattagctgggtatggtggcgcacgcctgtagtcccaggtacttgggaggctgaagaagaaaaatcgcttgaacccagggggagggaggtggaggttgcagtgagtctagaccacacaactgcactccagcctgggcgatagagcgagactccgtctcaaaaaaaaaaaaaaaaaaattaacaaggatgtcccagagcttctatttgtgtgtgttatatttatcaatatttaccatattagaaatgaaaaatgggaaaaaattatttattttttaatttgttaaaaataacataaacatgtttcatgttaacaaaataacattttatttaaaataactatattttccaaaacaaatacatcttagtgagcagcagctagttcagctcacaattcaaataatcgcacaattgcttttacttctagataatgcttcgtcttcaaaatgcaaaagacatgctttatgcgtacttcccatttgatcacagagtattaaaaaatatgtgtgtactcaaggtttgggatttaattaaattaatttattttttaatgtttcattgaggaaattcacaagtgaaactagcaattttggtcctgtgaggtcacagctgtgaagagtacagtgactactagcataatttgatagattaaggctctggcagttttactcaccactgcttttgtgcagacgtctacccagcaaaaaagccatcagtacaaatgtctacacagcaaaaaaggcaaatagtgtcttctaattttcatgaaaatagatttgacttcacagaccttctcaaagttacccagggacccccctgcggtctgaggaccacaaatgaaggactttgattcctcacagtgaagtacaggaattgtgaattatgtgtacttaaaacatggatggctttaaaaaatgacaggcctctggccaggcatggtggctcacgcctgtaatcccagcactttgggaggccgaggagggcggatcacaaggtcaggagatcgagaccatcctggctaacacggtgaaactctgtctctattaaaaatacaaacaattagccgggcgtggtggcgcgtgcctgtagtcccagctactcgggaggctgaggcaggagaatggcatgaacaccagaggcggagcttgcagtgagtcgagattgcaccactgcactccagcctgggtggcagagtgagactccgtctcaaaaaaaaaaaaaaaaaaaaaaaaaaaatatatatatatatatatatatatatgacaggcctctttcttacagaactgagtaatctttacagtggaaataaaaaacggggccttgtgttaatcagatttcagatcttcttttttgatatacctccacctcagggtctttgctgtaccctttgctgagaatgcttctcttccaaatgtgcaacaaaccctcccgcacttcctttggggccttacttaactatcattccaaggaggcttctttggtcaccttattgaaaatattgttccctttccaagacacacacacacacaattacttttccctgttatttttttcttcttaatattcatctctatttgatatgttacacatttcatttatttagtttatttccttgttcctcattagaatataagctacataaaagcagaggttttaatctattttgctaatatctcctggtttgctttatatctgctgtggtgttcagtaaatatttgttcactgatgttgagtaaacatttgtcaaatgttgttgagtatagcatagctaaaagtttgctgtagacattcattgtgtcttaacaaaatcggggtgtgcagatggccccaacatgtattacataagatatgcaatggaaaaatggttttatgatcaaataagtttgcaaaacatctctttctgtctgttttctttctctgtctctctcatacagaccacatacacgtggagatttacagtgaactaacatgaagcatctgagagggcctgtgatgtggccatgtgtttaaacattgttaaactcaatatctttcaaactgtttactagtgctcactggaacacactttggaaaatgctttcctatgcacaggcttcctgactcacttttcatcatggttgtgagggtcgactggggtaaaagctatggatttggttagtatattctgtaaagctattccaatgtaagattttatcattagttcaagtggaaaacaaaacaaaaaaatactttctaactcctaattttgtttgctggtaaaacagtttggtgatggaaaggactagaagggaagtctttgtataattatgtatttaataatatacactttaaaataagagtaattccttgtaattcagattgcttttgggtgagtaggtgggggttgtcaggacaaagtagtaggatttttttaagttttagaagacagcttaagaaatgctctaatcctaatggtacctgccacaaaaccaattaacccaggagaatgaataccttgtccttgcagattttacagatcataaaggaagaaaatctctaaagactacgtaatattcttacccctcctcagaaatctttactgaactctaagttttctgaagttggtgatctagcccacatctcttagtgaatagtcaacagagcttctctctaaggattcaagagctctctggacagtgggtcttctgtggtcctctctaagcaacttttcattgcacagatagaagcgacctgactctagatgagaaaaatgaagccaagagggcaatcgcttcttcataacagcactgtggttcaccttcttgctcatgacaccctccctgcctacaaagaattcccaccttggaacatgtccatgagctttaagagtggactcttccacctgctcttcccttttccttctctttggccatcttcaaagagaatgcttggttctctaactggctgtcctgtccttggggtcagcctgcattcttgtgcccagagtcatcaataccttgactctgcagtggcctcaaggactatctgattcaccatagtgctgacctgtcttctgcagaacacaatttctgagaaatcagcaggacctgcagcatcttgctgatgcagctattgattcctacctctgccttgcttgatcagctctggaatctattgataacactaccactgctaaatccccacttcctgctaagtccagattccgcatctctaccgcttagggtcatggtgtatcttacactatacctaagtagtttttatgttctgtcttgagcaaatctgtccactaaacaggtattctctctaagccctagtggctggaagtgatattataaaaggtagcagttgcctgcccctgtaaaaacatttaactgtgcattatttataacccagagaaaattttccttcttcaaatggcagattattcattcaccgatgcttgattactgtactctaatgtctcagtatttcttatgtattaatcaaacaaacctcaagagatattcagcagctggggggatcacttttgggtagtctgattggaggggttcctagaaggacacctcagagtcttgagtgcagcaattcatgaaattctaccattagaaagctgttcctttgtgtgtgtgtgtgtgtgtgttttaattgagacagggtctcactctgtcacccaggctggagtcaagtggcacaattttggctcactgcaacctccgcctcctgggttcaagcaagcctcccgattagctgggactacaggtgactgccaccacacccggctaattttttgtatttttagtagagatggggtttcgccatgttgcccaggctggtctcgaactcctgagcttagacaatctgtctgtcttggcctaccaaagtgctgggattacaggcatgaggcaccgcgccaggtctgaattttttttttttaatgaaaaatgtataggtcctcttttaaaatgcacatcttcctgggatacctcttctatacccatgttcttttgtagacttgttctagagcattaaagcttgaagggaatcttaatgatcatttggtccagtctcattattttagagatgaagatatgaggctgagaagacacatatatctagatcaaagactcactgctagttagcagtagagttgggctcagtatcctatgtctcctgcctcttttccagaaagctttatgtgtcttatggtatcctgaggagacaactttctttcagatgtgtcaacctgtattatattccatgcttaaaaatatctcatgtaatgcagtttgattagcatttctctagagtcactgtaattctagagatggcaggcactggggtaattatatataaaatttcctcttgggtttaagtcacttccaagatccaatggttattttaaaactagtgtgggaagtagcttatttggctagcagcggtattagaaacagaagagttagaatgactggcaggtgctgatgatctctttgttgattccactaaaaatggtgggacagtgttgggcctcattcccacccaaaaacgccaccaagtgtaataggtatgtctaggtgggagggaggagccccgagtagcacagaaagagggaataggtcaagggaaagaaagagaaaattttaaatctatttgtttatgtaggtgcctccatggaatcaatatcacccattgcctgccttggaaaatttctgaaaagtccaggggaatctggcccccaaaaagggtcagtattgtgagcaggaggaaccctcagtgcctctagcattgtgggtcatggacatggaatgcttttccttgcagaaaaacaggaagtgttccaagcagaacatgctattccttgcttcgacaattctctgtaattcacttgagtcaaatccagagaaattttgagttctgcttattcattgtgtatttttatttccatctatctacttaaatggttttcttctaaaatccaagacggttcctctgtgtctagttgcttcatttttcttgaaacagattttgcaagcagatttgtagagatgattttctctacctcacaggaaataggaatttctactactagtatgccatagagccatgattcttaaatgtttgtgcgtattgcattcacctggggagcttgttcaaaacacagataactgggccccactccagatctacctgataagaacatagcagaatgggaccagggctatgtgtttttaacagttattcttggtgccttctgcacccaccctatgattttgatgttctcccaagtttgagatacgtgtcaaagggacatagataggaagaaaggatggatagcagtggtatgacttgggtgttgagagaacctctgtgcccacattccctattcattctattataaacatttattgagtcactatttactatgtgcagagaacatcttgagactttggactcacacaggtggctaaaacacagagccggctgggcatggtggctcacagttgtaatcccagcactttgggaggccaaggcgggcagatcacaaggtcaggagtttgagaccagcctggccaatatggtgaaaccccgtctctactaaaaatacaaaaattggccgggcatggtggcacgtgtctgtagtcccagctactcgggaggctgaggcaggagaatcacttgaacctgggaggcggaggttgcagtgagccgagatcatgccgctgcactccagcctgggcgacagagcaagattgtctcaaaaaacaaacaaacaaacaaacaaaaaacacagagctagccctcaagttgctcacagtttgggacaaatagatatgataacatctatttacaacccagaaatctccagtactgaagagtattgaaggtggtatgggtggggaggtcagtgtagatttcacagaaaaaagtgatatttgagcagagttttgaaagaagagtcacagttctctgggcagacaatggggaagggacgtctaggtagagggaggtgctggtgcaaaggcttgggggttgaaaagtgtgtgagattgggacctggaatacaggtgctgtctgtatggttgaaacacactggggtgtgtgtagcgggagaaaagcttggaaaaaaaggcctcagaagtatagatttttggaggcagattatagcagaaagatcattgacaagaaaataggttgtatgcaagtaaaattattgttttataatttgttactgacattttattgttgactcattattaattaatgtagtcccctgcactacagcactacctcagcccacttttgatctcatctcatgataattaatatactttgtctgctgcaaactcattctacccttttaagaaatttcttcctttatttttctctcatgctctggttctgaggcgatgcttgagcctgtatttcctagcattatttctgttaggtttgtgaaccatcttattaaaatttatgtctggttcctttaaatgttaattctaaattaagcagcaataccaaatgaagctcgagcgatgggatggaaaatgtccactgtctttttcctattagactgacctatgaatatatctcagatttttttttaagttttcatttctttttaatgtcaagacaacttagtaaagctccatctagagttttaacttaatggctgtcagaatcagccttgataattgcttcttttgggttatctgcatgtcttctttccatcggtaacaaaatcaatactgacaccaattcagagcattagactccccaacatgctttcatgtgcactttttaaatggtttgaccagcaaccctctgaatttcacaggatatcattattattgttttccagtgtaacaggtgaggaaacagagacttagcctcattaaaaatttgctgtactaatgatattttttgaatatttaatatggctggtattttatgtgactctttgggagacagtcagttctccttccttttaaaaccctcaataatggagccaccaaagccaaagctttaagtgctggtgtggccttttggtattcatgattaagatcacatttatttgtactaatgattcagtattacatctcccgaagagatgtactgagcaagcactgcagtgacaagataagttgccctgttttgttccatatgtctgtgctctaagtattccatagttttaattggttccctgcagaataacatttataagcatatggtatggaaaatgctgactgcttttgttatcatgtattttagtacttgcggtggccccagttcacttagcctttaaatgtgattatgaggttatttaatgcactttatggagtacttttccttaacctgcctaccaagtgttaaatgccatcgatattgtgtatcgggtagcccgtccatagttggccagagcacaaattcacaaaagctttcatcatgggtttgtgctgcaaggatgttctctctctcctcgcctcatatgcagttttcaaaggcactgtgaggctgccttcaattatgcttgagaggaagacgcgctgttgggagcccgaaagagccaagaggcacacaatagagctctctggcgcctcgtttgggagatttaccagcgatcccttgaaaagggaaaagggattacagatgtgaaattagacacaaagattgaagaggggaccagctgtatttttggatattagagttactttggcacttttgggtggtttcctcgggaagtacagtggcagagtgtagctgaattattaatatttctgagactatatacaaggcttcttttaaaaaaacttttattatggaaaatctaaaacatatacaaaagtggaaaaaattgcgtaattaatcctcagtggacctatgacttagtgtactagttttctagggctgatataacaaaccaccaaaaatggagtggcttaaacaacagaaatttactgtctcacagctctggaggctggaagttcaagatcaagatgttgtcagggccaggcttcctcggaaggtactgaggagggatctgttccaggcctctctcccagctcttggtggtctcagatgatccttggtttgtggatgggcttctccctgtgtcttcacatcaccttccctctgttcacgtctctgtgtttaaatttccccttttcataatgtcacagtcatgttagataagggtccatctaatgacagcatttcagcttaactaattacatctgcatgaccccaggtccaaataaggttatattctgaggcactgggggataggacaccaacatatgtatttggggaaggacataatccataacacttaccttcaataattatcaatgttttgctaatcttgtttcatccgttccttaacacacatacacacttttgtttcctgggatattttaaaacaaaccacagacatcatgtcattttacctgtaagtttttcagtatatatctctgaccaatagggagttttgaggtgtgagggtgtgtgtgtgtgtgtgtgtgtgtgtgtgtgtgtgtgtgtgtgttttccataatcatcatgtaaaattgtttttttaacttaatgagaatcatgaaaagaagagtagaggctcctgctacttttcagcctgggaaactcttatctttcttcccttgaagaaaggcaaaagtcacctcctctgtgaagccttcccaacacttagggcaattaatggctcctgtccactgcgcccccacattgttcttccatgacttgtaatgcgtaagtaattgtactgtatttgtagcagggtgcagcagaggtgaaaaaagactggcttttgtgcatcgttgctctgtctctcttcctccacttcttagaagagacgtttctagaagcccattgaggggcaaagagctgaggaggagctcagggaggggatgcggtggggagggtttgaatgtgcctgtgacgatgcttggaaggtggggcttgcagatgctgcaccctcagtggaggttgctggccatgagggcacagggttccagggcctacccttccaggtgccaaggactcttgtgggtttggcatggtatctgttgtttctaggtggggccaaacaatagaagccttctatgtatgcaggtgtttgtggtcacctgtataaatgttgactattttcattttttacaatgtcactatctacagcgtaattttaagaaaattgtcgtaactaggctggacgtggtagctcacacctgtaatcccagcactttgggagcctgaggcaggcagattgcttgaggccaggagtttgagaccagtctgggcaacatggtgaaaccccatctctactaaaaatacaaaaattggccaggcggggtggcatgtacctgtagtcccagctactcaggaggctgaggcaggagaatcacttgaaaccaggaggtggaggttgcagtaggctgacgttgtgcccctgcactccagcctaggtaacagagtgagactctgtcttaaaaaaattgtcatagtaatttatatttgccccaagataatcaagattgaccactgtaagtttaaaaacacatataaaatggctagcagatagagtgaggaagggctgagcagggccttggaggcccaggattaccaaagcactagacacagctgttagccaacatagttcagttatctcttggtttccacagggaactggttccaggaccctccctggataccaaaatctgtggatgctcaagtccttgatataaaatgaaatagtatttgcatataaccgacatgcttcctcctgtatacattaaatcatctctagattactgataatgcctaatacaatgtaaatgctatgtaaattgttgaaggaataatgacaagaaaaaagtccgcatatgttcagtacagatacaaccatccatttttttgtttttctttgagtgtcttttatgcctggttggttgaatccatgaatgtgaacccagggatatggatgactggcagagagggaggtggtccttaaatgcacaggctttggtgatcctcattctaggacagttacagtctatatggaccaaatttatctgtcacatagggataacgtaggattcccacacagggttctgagaattttgtgaaatgatgtcaggctcagaaaaacaacatgatccatagtagctgcccagcagttgctttgtaggcaccattcactttggattttatgtgaatggcactccctggagttgtgcaatggtgaggtactctttgctgccgtattgttattaactggttgttgccacttaggtttctgtcttcagttatggggatttgcttcagttatggggatatgatgatgtcaaacctgcctgtcttctcttgccctcactccacatcttactgtcaacatcccctaccaccacatctggaaaccaacccattgaggattttttttttttttttttgagacagaatctcgctctgtcacccaggctggagtgcagtggcgcaatattggctcactgcaagctccgcctcccgggttcacgccattctcctgcctcagcctcccgagtaggtgggaccacaggcacccgctaccacgcccagctaatttttttgtatttttagtagagacggggtttcaccgtgttagccaggatggtctcgatctcctgaccttgtgatccacccacctcggcctcccaaagtgctgggattacaggcgggagccaccgcacccggccggaggattttttttttagcatgttctctctcctttccactctgaggctctaaagagggaactaaattatcagcgaattaaattatgagtgtattaaaaagttactccttgttgcaaaaaaaaaaaaagttagggagtcttgctctcttcttttgacaagaatttatatttaataggacctattttacagctatttattatggcaaaagatttgggtgatccgatgcatttttattatgtattgttaaggttttcataatatttaaaaatctttttcatgtgttaatctctggatatgtatttttttattcaaagtccaataaaaaagtaaagcaacaaaatattcttctactataacagcattctttttaatgtggctgacttatttagaacatcaagatagaaaacatttctgtattaaaggtcccttccataatctatttagttaatgatctcccttaaaattacaaaaataaaattcaaattgataatatcaaaaaattttccaattgaggggctctggagacccaagtcagttctcctcatagaagagagaagacaaaaggaaaatgtttgagcagctgaaaaataggttatttactacttagaatcataaaaccgtattttcccaaggtgggaagcctctgatgcttagaatactttaaactttcctttgggagagcttgttcttaatagagcatgatactcagtttatatcaacatgtttatgcttttaaaatatcagtgaaataatatggaatttatatatgcgtgcatttctatatcttgctgcatctgcatttactttctattgcactgttctctgctataaaatgtgtattttaataaacattttttgaatatctactgtgcaccagatactgtttagttttaaaagggttttctattttgcaaaatattttgaaagagagagagagagaaagagagaacgatcctgagaggtcacctggaaggtgagagttcttctgtcactgaaaaacacacagtgtaataaataatggcatcattaaaaactgtcgtctttgcaaagtacagtaattgctctgcagatccctcgcacatttccctgtgaacctgcatacctgcaccgtactggaaacaatcttctcctccctcccacttccagtcgcttatctattcattactgccatgtctgagtgggtttcagacatgccaggtgtgtggtgtcactggcctgacgtccattccaaatgcagacatttacactcgtgagtattaaagcaatagatcttccttatgacaacaaaaagctgactgcagaaaagcaaagcttctgggaaaagtcttcgagcgcgtcttggcttgttcatagggggagaagacctgactaattagctccagcccttctaatccgaaggagcagaaataattaaagtatctggggcaagctgtgccgcacagcagcaggctacagaaggggcgacgcggtaagaggacgtgatcttaacacaggctcacaaaagaaagttctgggaacttagtgtacagcggcagaagcctttccttcccccccgcccccccccccaccccccaaggatctgttaaagtaaaattatttatgaatcacaatttttttcaataaaatgaaaatactttaatctagaatagaagggaaattcctaccaaaaattagggctgcttaattattaagatactagtcttcagggcaaatttgagaagtcgtaacaattttttctgattgctattgcatattgacgctaggtgagttggctgttgccctgggcagaagtcctttgtcttagagacactgctgtgaatgatcatgtacatgtgattgtgtaaatattaggggagaggggagggttctatcctacagaattccctaatggctgttaactaacttccgtggtcctcccgtatgcaccttgtccaggggattgctagggatggtgggcacagtaaaccagctcaggcctgagtgtatgtgtggacacctgcaaggcagcctcatggcacatgtctgtgcaaagatgaacagtttgtttttcagaaggttctgtattctaagtggagggcttggaaacgtgtttggaagagtggaaaaagacaggtggaagagtttcgaatggtatcatagctttgttattttggatgtttttctccatttttgatataagttactataaatgtcctatgccaccatttactgcctgtcatgtatgtactgagtcatatgaggttttttcttgatgtattgtcaggaaacagttaataaagaaatctcgtctacacccacctcgcatatagagtgggtttctttttcctgtctacgggaaaaaggaatgacatgaaaagcaggaagcacccctgagtgctctagtgaattaagattggaaccagaatttggggctatttctccacatcttattgtttttgtcttaatttgtagccaggataaatatttagatacatgtacacaagagcctaggaataacattaggctgtcaagattaagagaaaaaagcaaaaccggccgggcgcagtggctcacacctgtaatcccagcactttggaaggccgaggtgggcggatcacaaggtcaggagttcgagaccaacctgaccaacatggtgaaaccctgtctctactaaaaatacacaaaaaaattggccgggcatggtggcacgcgcctgtaatcccagctactcagaaggctgaggcaggagaatcacttgaacccaggaggtggaggttgcagtgagccgagattgtgccaccgcgctccagccttagggacagagtgagactccgtctcaacaacaacaacaacaacaaaagagcaaaactgcaaaaagcaaagcaaggtgagggctctcagtccttacttttcctccagtcattttttctgatactgaatcaacctgacagctcttggaagtattgctgatgtagccttaaattctagctccactgagaacaatttccttgttcagttatatcacaggagatggtgtttgaatcatgtcagcgtggtgtgtgatcgttttgcgtggtctgatgcggttcgttttttctttgttgggtacccatggtgtcataaacacactgttgttctcccctaccctctccgcataagataaaagataaaaaagaaagccatgaacagcatgaaacacctgctggcgggggcgggggcggggggttgatggtgttgtgggagaggacagagcagttggtgggggaggagaaaggtgcgtgggatggcagacaacccattcccttgtttttgctactctaatctcagcctaggctatagctgcccaggaactcagaatttgggcttcttatttattgctttgattcactctttcagcaaatatttggttgactaataccaggcacaagtctgagtgctgattcacctccacagattgaaaccgaagacatgacccgttgtcaagaatgtgcacacaggggcctgggctgttcacagcaccgggcggaaagggcattccctccctcctccctcccttctgaccatccgctccctctctccctcttaacttcctccctacttccctccctctcttcctcttccttccattctctctcgctctttctctcgctctcttttctttcccttcctcctttcttacccacttccttccttcctctcctcccttcctccttcctttcctttctttcttccttccttccttccttttttgtacttaagttttcaaacatacgtcagcagagaggccaaagagaactccacgtgcccatctcccagcttcaaaaattgccagcgttttgcaaaaagggctaaagttgaatacttaacaacccttggggaaggcaggcgtatgtcttgttgtcattctacttatgaataggcagtaggaagttatttgaactttacaaaatatttcccacattttgtcaaccgaatgagacactataataactacaaaatatcgcaaaaaacactatatgaagttttggaatttgttagaaatcactgtatgtaaaatcagtgcctaagggcaaaacccttgtacctctgattattaatataatggatatagtttttgtcttgaaatcatttaaacttgaatttcagagtgactttatgctagacatgcattgatcatgcaagtgttggggacagagctaagaaacacctggtagctaattagaattatgcccttctaatttggtggtttctgtatctatgttaggccccaggattgggcctgctggatgtgcatgtactaatagcaagtcatgttttggtagagttcaatagtgtacctgtacacactgcttgagatatttaaaaatgaaattattgcaactgctatatcttcagaataatagatgaattagaatgtggtagcaactcagaagtcaagaatcttgtcttgagagaaaagaggaaaatatgtgatgacttaatactcataaaatccattactttataaaatcattttaattcagttttggaactttagatcatgaagtgggcataatgcacatgtcataatgctctggtgtgtgtgtgtgtgtgtgtgtgtgtgtgtgtgtgtgtgtgtagggagagagagggagaaagaagggagagaaatgagagcctgttaaggttgagacaggaatgattatttgcagcctatagtataacttttgacttttgtgctattaacaaggttttatcccatgatactgttatttcataagaacatgacaaagacattacaagaaagttaaaaattatcttctgcccaactattatatccgatattatcattttcactgacaaaaattgattggagcatctcctgtgtgcagcacgctgccttaggaagtcttggggacacaaaggcctgaggatctcagttggctgagctgtaaaaaccagtctccaacccttgttcattgtacagtgagattagtaatagtcttttgaatactttatcttaatgcatacatttatttctgaattctactgtgtattactgtactagaatataaggaacattgtaatacattttttattatttatttttacttttgtagcggcagggtctcactatgttgcccaggctggtctcgaactcctgacctcaagcagtcctcctgcctcagcctttcacagtgttgggattactggcatgagccaccatttctggctgtaaaacatattttaaaaaacagaaaatgtaaaaggatgacataaataggcatttgcattgtttcttctctaacactgaggtgcactacctcattttggaaatcactgaagggtttcaactgggtgaatcctgaggcctctgctaacactgaacttcagcaaatctaaataacataacagcaattctctgaaactgtgcttgatctagagcaactcaagcagtgcttctcaaaaaacaattgcagatatattctgcagttgacagggaccacatggtccttgagagcttatcgtgggtcctctttaaggcaattgttcccagacctggctgctcatgacaatcagtcataatatttctatccatctgatgagccaaaataaagaagacattttattgttggtctaatttgcatttccatgactactaatgagactgaatatcttttcatatattcatttcttattctcttaattgccccgatcacatccactgctgatgattccattgggttgtttgtctttttaaaaatcaatatataggaaccctttgtgtgtcagaaatattgcccttttaatggcaaaatggtacaactattatgcaaatattatcatcccctctgttatttgccttttatcattctttttggtgctattgtcctaccaaaatgttcttacttttaaagacatttgataatgaactgtttgacaccttagatttttatttatttgtttatttatttatatttatttatttatgtatttctttaggatccagggaatacatatgcaggtttgttacatgggtgtattaggtgctgctgaggtttaggatacagatggtcctgtcacccaggtagtgagcatagtacccaataggtagtttttcagcctacaccctccttcctgctaccccctctggtaggccccagtgtctgttgttcccacatttacatccatgtagagtcaatgtttagctcccacttataagtgagaacacacagtacttggttttctgttcctgtgttaatttgcttaggataatgtcctccatccagctccatacattttgctgcaaaggacttgattttgttctgttttatgtctgtgtagcattccatggtgtgtttgtaccatattttctttatccaatccacgtttgatgggcacctagattgattccatgcctttgctgttgggaatagcgctgtgattaacatataagtgcatgtgtctttgtggtagaatgatttcttttcttttgggtgtatatctagtaatgggattgttggttgaatggtagttctgtttaaagttctttgagaaatctccaagctgctttccgcagtggctgaactaatttacattcccaccaacagtgacagtttagatttaattttaagttgcattatcattttgacatgaggcaaagcagaggagcaaatgcagtccagtcaagagctagggaacctaggctgctcttagctcagtctgaagtgtattgttgcaacattttcaggaagcaaagtaggtagattggggaaaatattgtacagagtgtgctgctgttgtttagtactcaaatgataatgtcatattaaataatgcatgcttattgcatacttaatgcaactttattgaacaagttgttccataatgcccaaggccagaaaacaaaatagttttttattgatgttaccagagttgaatatgttaacaatattttagcagtttaatcatcaatgagaataggataaacatcctgaaagatacacagagaaaaattcacaaataatatgtttatatgaagacagtaatgtttttgtgtccatatataaaagtgatctaaagcactcataatcataataaacatgcattatacaacattaccgatcaacatgataatgttcaaatacacaaggtttgaaaactaggtatttttatggatgggaaggtaaatttctataactttctggtgaacattaaaatatattctttgacccagaaatttaagatccaggaatttatcctgaagagataactagggatagatacaaaaattatcttctgaagtattcactgcagttttatttataccacaaaaaataaataattataaatttaatctctaacaatagaggattgactaaagtatgaagatccgtattaagaaatactatatctgttaaatgttatcatcattcactcattcatacattcactttttcaatagttattgaacacttactgtgtgcaaagcagtaggctggcagctggagttacaaaagcaaacagaagtcatctatggccacaacaagatttaattttagaagttgaaaagaatgcttagagggctgttaattttgaaaagagaagttaaaaaatattatgtgtaatagggtcacactattgcaaaagagaacactcatagaagtacagagagaagatgagaaggaatacatttaatatagtaattaactgggaattaggtttttttttgtgagtttctacaaatgttttataatgaacatattttatgaagtcattaagatataaaccttaggtgacgtgagtgtagggtgctatgtgtgtgtagcgggggcattctttctcatttgggctttaaaactcttggactgcctttgatgtttatcatttagtagaagaagctcttctagcttttcctaaggctcagttgtttcttagatggttttgcatgactccaacctggaggcctgagcacagtaaaaggacacaggacgccacaaggtcagaggatacaaggaaaggatttgtgacctagacatatgttcataggaggctaaatgaaaaagactgcagctctctcttttttcttttttctgcctcctgggttcaagcgattctcctgtctcagcctcccaagtagctgggattacaggcatgtgccaaccatgcctggctaattttgtatttttagtagagatggggtttcaccatgttggtcaggctggtctcgaactcctgacctcaggtgatctgcctgcctcggcctcccaaagtgccgggattacaggcgtgagccaccgtgcctggccaagactgcagttcttgaggctgaaaaaggaaaggtgaagagattataaagatctgtgaaaccatggaggtcaaactcctagaatagggcacctgtttcagctagaaggaaccagtgggtaataaaagcatgcatctccccacaacagtgggatgactggaaaatgaaaacatctcaggaggctatgcaggacaattcccttaggagcccttcagggaagttaaagatttgcggggctcatccctaactttttgtgatggaagaaaaataatggtgctgcttccaaaactgtcctttgaagccatcgtcagagcgaggatcctgaacaaaaatacaaaaaaaaaaaaaaaatgctgtaaataaaataatacttcttggccacatcgtttttatgatccagaagatataaactatatccagaagtatataaatgatatttgaggtcactcgatttgagaaaactttgttttcaagatgggcagcaaacaggctaaggaagaatggattaagctgagaagttaaaaaagtggattagttgatgtccagtgctccaggcttcaagaagcctgaccggggggaactgaggctttgggtttaggttttgcctcccccatcgcctacccacaatggcctcttacatatgagaacacagaagaaggcccaaatgcacacggcctgaacagtttatagctgaatttgttcacactgatgcctgtctcctctctttctcgaataacagattttaaatttctcataattacatcattacctggagaacatttgagacccggagggagagaatggtgttggaaacaaagaacaaagagaaattcaggaggaggtcaggagttctcaaaatcatctcaaacccagggccagtatcaagaggcatctcgtttatttaccaaaccagcaaagaatgtgactttatccctgcacagcagagctgcagagggggtgtttgcctcgcctctggacatctccaggcctccctgtggcccctgctgctcacttggccatggtaccatctgctgcccctcccacctggcttccttggaggctgtgactgggtttgagttagggacctgtagggttgtgagcagcacgttaggtctcctccttcccatccttggaagtcttcttacttagaatcgtggcagccacaggtgtttggggtctcctggggaggggctgggccctttccgcatcaccctgcagccagtcttctgggaggaagacaccctggttgacttggagctagtaagtagtcaagggactcactggttcaaaggccaccttctttctggttttctttggagacaccatcctacagtttcaggaggtttatttctctcttgtttcttcatttttttggttagaaatgagggaccaagaaatgtgcccccactttagtgtgtgtggaaagtgaatctccaacttctgtgggttttgtctgaaatatttttaaaacaaaattcgtttcaattaattatttttgaaaaaagtgttccaaaaattttcagaaaaaagatttggggatatttgagcatgagtattgaaaagtcatcttataactgtattgcaagggctccttgtgaaaccaccgttgcagaaatgataacagtaacggaaatctgccaactgactccatcttgcttctaccaggctgaactgcttttgctcatacttgttttaaggcagtaagtcatttccttgaactaatcccctccttgttaaaaaatggaaactgtacttgtaaatactaacaaaaattcacaaggttagagttacgggaagggcttgaactttgctaaggaatagacatactgctgttgttttcgtattaattgcttactgcctcagcaattaagggagtcacaagatcgataacttccccaactactcctacagataacatcactattgtaaaacctaagtaactggtctttgagatatgtttcagatttggcattttggcaggctgagaaacaccccctggtcctgagactccctcccggaaactgactcagctatgcaaagacagtttagacacccctgtgagttcatccccagccaatcaattgtttcagctttccagcccctgcccactaaagtaccctgaaaaaccctggcttcaggccgggcgtggtggctcatgcttgtaatcccagtactttgggaggcctaggcaggtggattgcctgaggtaaggagtttgagaccagcctggccaacatggtgaaaccccatctctactaaaaagaaaaattagctgggcatggtggcgggcacttgtaatcccagctacttgggaaactgaggcaggagaattgcttgaacccgggaggttgcagtgagccgaaatcatgccattgcactccagcctaggcaacaagagtgaaactctgtctcaaaacaaacaaacaaacaaacaaacaaacaaacaaacaagcaccctagcctctgaattcttggggaagcagatttgagaactacctcctgacctcccacttggctggccctgtgatgattaaactctttcatggctgatatatttgctattctcggtgcattggtttttctgggcagtgggcaagaagaatccataggattgggacattttattaaaaggtttatggcagcagcaaccttgcttctaagcctgtggaggaaggaaagagcaaatggaggggcctaggcttataggagggcccaggaagccctctttctggtcaattcttctgggtggcttgaaagtgcttttgcctaacaagtgcagcttcatttaatgggccattgaatctgaatatgtaggcattttgtaggcttttaaaaagagataagaagttaagaagtctcattttagcggtatataggattacactttgaaagcatattaaagtgatttggaatcctggcatagtcaatatactttcttttttacattgattatgaaaagattctgtccatctattttggaagtgtatctagatgacaaagcagtgtagtatctctttcaatccattatcatattccattttgtattgggtttggggagcactgggtttaggcattcgcaaagggttgcctgtcttttgagattccttgatgcttggtgtgcttgtgtaggttgatattagggaatggatatttactcagcagactgggtccctccaacctaggagtttacagagtcacatttggaaaatgtatacattaggcaataattatttgctgaacatgctgggcctgctctcacctcagggccttggtacctgttctttccttagcctgagacaccctttagtcccacttacctaacctacagacctttactcaaatgccactttctttttttttctttcttttttttttttttaattataccttaagttctgggatacatgtgcagaacatgcaggtttgttacataggtatacacgtgccatggtggtttgctgcatccatcaacctgtcatctacattaggtatttctcctaatgctatcccttcccttgctttcgaccccttgacaggccccagtgtgtgatgttgccctccctgtgtctatgtgttctcattgctcaactcccacttatgagtgagaacatgcagtgtctggttttctgttcctgtattagtttgctgagaatgatggtttccagcttcatccatgtccctgcaaagaacatgaactcatccttttttatggctgcatagtattccatggtgtatatgtgccacattttctttacccagttgatcattgatgggcatcaaatgccactttctaatgaacctcacctcagcatatcccatccccgttttatgatttcatcttctccatttaaattatctgattatttggttcatcagttcaccatgcactaaattgcaagtgcagtgagggatgggatttttgtccatttggtttattgctatatccttagagcctagaacagtgcctggcacaagcagatttttattgttggggtgacaatagtaaatcaaattgatgaaactgtacatttatcattattattgtcccttttatttgggcatgatttgtctgtttgtgaatcatccatagcacaatttgaactgtatcaagggacatcagtattaagattgggcacctgagagtctctgaatatgtggatatgtgagataggaaggggcctacagaccttcagtgagcagtgcagacgatctttggggtcaggagtctcttttgggttccgtgaactagttgcagcccctatagatgggcccattccctcagggtgcaccagaaccgtggggacctcccattacctgccccagacacctgaaatcagtcctcagaattttctgccttggcttgacccctgtgtttgctctgtttgcacaaccaaggtcatttgtggggggaagctcaagagtgggccctgtattctctggttcttaattccaatttgaagagattgagctcacgtacagggtgagtctacatgactaattttatgttttattcctccaagcaggcaggagtttgagcatggttaccctttgctgccctgcaattctatcttatcagtggttactggtaggaattgggcacttaggaacatctgagatattctgaggccaagcctatctctttcagggcttactggtggcacaaaaggtaccttctggttgggctgtccctttctgtctggtccaccattctaagctgggtcatcttttttttttccagtcatctttttggattatggcatgatttctggagggtctctttacaatgagagcatattacattggtgacacgttaactcaggagtactcattggcatatattcttcattggagttgctggtggaggagcagtgggtccttgagagcctgggcaccaagatggtacattttgatggatgggggtggagggggaaagagagtgctgaagcctggaaactgtatatgcgctggggatggcaaatatgggtaaatggcattggaagaggccatgaccatgaaggaacttgatgcataggatgaaggaaagtgaggagagaaatgagagaccatgaaaaaagagacatgttggccaggcgcggtggctcacgcctgtaatcccagtactttgggaggcaaaggcgggtggattacctgaggtcaggagtttgagaccagcctggccaacatggtgaaactccgtctctactaaaaatacaaaaattagctggatgtggtagcgggcacctgtaatcccagctactcagaaggctgaggaaggagaatcgcttgaacctgggaggcggaggttgcagtgagccaagatcacgccattacactccagcctgggtgacagagcgagactccatcttggaaaaaaaaaaagaaaaagaaaagagaggcatatgacaccaaggagaaccctcaaaattttgcagtggggtatgctatggtccttacccgttatacctttttctctttaaatggaaagagatatgtcagcaaggaaagattaattcatttacattcaatccatgtaaattaaccttataattatcttacagggttcctgagttgtgagagttcgtgtagcatgctttggggttgcagtcttcatttagcaccttttcttccttaagtataattggttttgggcttggtaatgaatcggcacacaaatcttgctacactccccatgtcttctttcctgtaagttgagggtggaacacaaagctatgtcagggaatgatcaagcctagacaagaagcaaataggtcagctttgggggtaattttgatctcacaaatgtctgaagtcttgctgtatttcattctctcttctccctgaattccgtgctcacttgtgtggacgctgagatcctcatagtgttgagaagtcattatggcattaatacagggcagaggagatggggctcactgcactgtgctgtgggattctgggaaccaccctggtccatcacagactcctctgacctataaaaagtgctgctaatcttcttactgtctgccttataagatttgggaagagaaatgaggtaatgtctacttagatctttgagcttctcggaagaatagcattctgcagtaatatgatttcctaatgtgtttgtttgtgttgtaatagactgtaattccatttacctacctttctttaggagcttctagaatatttgactgtgttgcacaggggaagcagtctgacattgagagtgagaactggacctagactagaacccttaaagcacatttagccaagtgagccaactataaatttatgagtgtaggggaaggaaactgggagaggaagaaatggaagctagatttggtagtgacaagggaggggattgtaattatcttcagagagtttatatcatacttttaaatcatgctgttttgccaaggatcaatatctcaattttgaaaaaaaatttattttaatttagcaatgttacatattggattatatctgcaaaattgatactgctttcattgtctataatgatagactaacctagccccctccaagatttggtttgttatatttattgagccacaacctattgcgtttgactctgataccagcagttccatataaacactgacaaatttttagattcatttgtaaaatatgtagtagataactaaataatacttcatctttgttctgcatataaacacttttttttttaattaaaatagtcatgagcaatctaaccttttatatagcctttggaacagtattacaactaagttggctttctaggtagttctaaaatgagaagttaaaacaagtgatgaaaagtggggaaagtatgtacatatgtcatctctgacataccgtaaagttgttaatttatatgacaattatctgtattggatagttttgctatgacatttactagaagcagttggttctttggaagttgcaaaagaatgtcagccttccacaaaggaattttcaaataactatttagttaaccagaaaatgaaatagcaagtcttctcttccagaggggtgactatatatatatatatatatatttttttttttttttttttgagatggagtcttgctctgtggccaggctggagtgcagtggtgcaatctcggctcactgcaacctccgcctcctgggtttaagtgattcctctacctcagcctcctgaatagctggaactacaggcacgtgccaccacacctggctaatttttttttattttttagtagacatggggtttcaccatattggccaagatgatctcgatctcctgacctcatgatccacctgcctcagcctcctaaagtgctgggattacaggcgtgagccaccacgcccggctgactatatacaccttttaagaacaattaatttttattttctgacagacaaaagtgttacaagtttcatttactaaattatagaatagaatacagagagaacctatcttgttacccaaaatgtgacataaaaaaataaatccttaccaaactctgtgtctgtttgcttatgttgcatgccagacacatatgaaaaaagtcattttgtttgtttcttaaattaagaacatcttatataaagaaatgatatagaatactatgccccttagaacaaaatgatacttactaaaaaaattacgactcagagatacagttcatatgaagttaaattatgtgtaatcttaataaaaccacattttctcttccagaaagtttactagagtttgagtgaatatttcagagtgttaaacactttgtacaatttttatgttctcatgtaaaacttcatgataaatttatgattctctgccattgtgtatcaatatggataaggcatacttttttaaaatattaaaaatatgtttatattaatctgtcacctgttaaattgtgatgtttcctttgaatttgtttcagaatcgaagcaaacgcttggagaaggtccatgtggttattgggcctaaatcgtgtgacttggattctctcatttctaccttcacatatgcttactttctagacaaggtgagggaaaaaagggtaatactccttatattttgaattattatgtaacttttaagaataaacattttctctaaacaaaggaacctattaacttaatttttaatgttctgatatattgttgcagagtataaagtattatcatccatgaatcaacaaatatttattgggcacctactatatgttaggcattgttctagctatttcttaccaactctccttataaaacattatttcaataaggtcaatgttttcaaataaaacatttaaagtgttcataatagttgattaattttatggaaattcatagaactaataaaagtaagaatcagatttcttgttttcctttgtcatccttgctgatagtcctgcccttgggagcagaaaaatacgtgcagaataacttgtgtgaacagtacataaatggcagagcacattggctagagttttcagtgacgagtattacatgtcaaatctacatcctgtaggtccttgtttggttttgccttgtatccctgattttgtacagcgagatcatccttagttagtgatcatctcccttgaggaagactctttctattctgtgaagcatatgatgcccctgtggaagtggaaaatacctttcaacaaattgctttaaaacttgaaatctataaaattcatgagctcatgataatgggctttttattaacgtaaagcctaaaaatgtatgttatgagtgtctaggtgttattttcaatgtcacacaatttttaatttttcagaatctgatttgttttgttgcaattttgtttggatccttggcccctgacagtaggcagagctggtctaaagtgatttaaattcacacgaatgctagtcttccagaatgagctgtgggtggcaagaactgctctagggcagaagctgataaaaatgctgggtaaaatattctgatctctacatgtgggctttatatcaaatttatcttaaaatttgttgaactttacaagggagattaattggtatgaggagataaatgtgcctctgttaagacatgcatattaacactaattttgttaactggtattttgactcctagaagaaaatgtcacttatctagagaacatagagttgacaaaaccagactgatgtttagagtgatagtggcgtggacttcaaaatgatataacaataataccaccactaccacctacaacaatgtcttgacatccaataaaaggggtagaaaaagtaattgtgatagataaaacacatggatagatagatagatagatagatagatagatagatagatagacagacagacagatggctagataaaaataaaaagacatgtggattctcttcttcttcaaaggtttgccagtaagcatggagatgaatgtggaattactgaaaggtctcatactaagaatttggttatatttctctgcctttctcgtagtttactgggccccctgctagtggtctgtgtctccatttaaattttcaaaacccaactactccctctcagagtatgaacatgtaggataagcaaagagcttttctgcctcatgcgtgtgaccccatttaaatccttctcactctggtaagtgagccgcattttcagatggggaacacagagtctcagagaggaaactggctttctcaaagttacgtggtagagactggggctggaacctagttcttgtgacatcaacttcagaacaggtcctgccaggagaggcccaggccacatgcctgatttacatattgattcttccccactcaagtttcaatatcaggagttagatagaaccctccattcattaggaaaaataacttgccatacataagttgttaacacttattatgcaattgtggttcggtattagcgtgacaggagggagaaaacccactttgttggagtggctttgtgctttgtatgctatagcagtggctgattcctttctttcattcaacaaatatgtactaaatgtttactatgtgccagactggtttatacactggaaacataactgaacaaaaccatcaaaaagccctgccttcttaatgctagaaaggggagacagatgattaaggtgttaaaactgtgacaagctggtgatggtgtgagagtaaaggccatttatgttatgcacaaattccatgtcactgaaccccacattctctcattgatagttaggattattgctgtacattcacagtaatttttaaagcacctttatttttaacattcccgtacaaaaacaagtttattattgtgactacaattctctacctctctcctatctcctgttttctctggttgccacagatctgttttctaagagacttgttaataaaaaatgttttttatgatttaagaaatcaatagagatcacgatctgatagtctgtaggctgaagctggcttgtaaatgaatttctactgactgacgttctgaatttttaaaaatgaattgtaataattaaatttcacaaataataccccaaatctagatttatagctgctcttgggtaattaaaagtgtgtgtgtgtgttttttttttttccgagacagagtcttgctctgtcccccatgctgcagtgcagtggcacgatcttggctcactgcaagctccgcctcccgggttcacaccattctcctgcctcagcctcccaagtagctgggactacagatacctgccaccatgcccggctaatttttttgtatttttagtagagatggggtttcaccgtgttagccaggatggtctcgatctcctgacctcgtgatctgcccgccttggcctcccaaagtgctgggattacgggcatgaaccatcgcacccagcccgttaatttaaagttttaactacactgggcctgaatttttacatgtgaaccattggctggagctgagtgacaggcatctcatttagatgcaatgtatgtgccttcccctgtccccacagtccccacccaccctgcctcaattgtcctaattttctgccaatcttataaagatatgtgagtttgttactcttaaagaagagaatgtgtattatatataaatgtatttatttacattttagcccctgcacaatttatatatatgcatatatttaaatttatatacaaatgttatctatttaaattttaatcatatgtagtatatatttatatatacaaatggtgcagggtctaaaatgagacataaaataaagcatgagatgtttcaagtagggtaacaagaggttaaaaaatgttaggggccactcagaggaaaatactctattaattgggttcaggaaaatttgattatgaatgccaagtggtttagtgaggccagaagactcctattccttttaccagttacccccaggctggagaaaatgtaattgtattctttcctcctgctattttcagtaattcagtcaacttttttcttggtaggtcagtccaccaggggttctgtgtttaccagtgctgaacataccaagaactgaattcaactacttcaccgagacgaggtttattttagaagagctaaatatttccgaatcattccacatattccgggatgaaattaacctgcatcagctaaatgatgaagggaagttatcgataacacttgttggcagcagtgtgctggcgaggtaagatccactgtgaagctctgaggtttaatccctcaatgaaggttctactgggcaaagtgtcactttactcaggacttttgtggtttaggcagatgtattaaaagcagaggacatgctggtcatggtggctcacgcctataatcccagcactttgggaggccaaggtgggcggatcacttgaggccaggagttcgagaccagcctgaccaacatggtgaaaccttgtctctactaaaaatacgaaaatgagctagggtggtggtgcatgcctgtaatcccagctacttggaggctgaggcacgagaattgcctgaacccgggaggcagaggttatagtgagccgagatcgcaccactgcactccagcctggatgaaagagtgagactgtttcaaaaaaaacaacaaacaaaccccaaaatcccaaaacaacaacaacaacacaacaacggcaaggcagaggacatgcagagaaaagggaatatctttttcttctcttatggcaaaatttgggtcatgctaatccttcatttttacttttgcatttcagatatgaaatctttaagtgtaaagttcttataaaattgaccaaattatagggggttttttgttttgttttgttttgttttgtttttttgagacagagtctcgatctctcgcccaggctggcgtgcattggctccatctcggctcactgcagcctccacctcccaggttcaagcgattctcttgcctcagcctcctgagtagctaggattacaggcactcaccaccacgcctggctgatttttgtagttttagtagagatggggtttcaccatgttggccaggctggtcttgaactcctgacctcaagtgatccgtccacctcagcctcccaaagtgctgggattacaggtgtgagccatcacacctggcctaaaattatagtttttgaaccatttcaaacactttcttatagcaatacaatagtcttatgtattgatgccaaacatgtgtattaaaaattgaaattaaacactggataaaactgaatggttcttaggaaagaaatctcagtagtgaaatggaaaaatacatagagatgggctatgaaggtcatttgattattgatttattcattcatagcatgttatactacaagagaaggattgattttttttgaatattcatgtagctcaaactttttattttacggacaagaaacttgaaactcagtgtcacaaacgacttgtccaaagaaccacatgcaggcttgacatggtggctcatgcctgtaattccagcattttgggaggccaaggcaggaggttcacttgagcccaggagtttgagatcagcctgggaaacatggtgagaccctgtctccacaaaaaatacaaagaaattagctggccatagtggtatgtacctgtggtcccagctactcaggaggctgaggtgaaaggatcaattgagcctgggaggttgaggctgcaatgtcatctcatggttgagctgtgattacaccactgccctccagcctagatgacagagcgagaccctgcctcaaaaaacaaaacagaacaaacaacaacaataaaaacaaagaaccatatgtagttagtagaagagtggggattagaacttgtatcttctgactctttcaataaatacttaagcattgctaactcatgcaagaatctacaggtgcctaaggaggaataagacaaattctctgccatcaaagactttatgaagatgtccttttgataagctttccactgctactgaatgaaggttcaccagctaagcacttcagtagtttaaaatgttagtttttcacagtttggcaatttgcaagttgttgataaccttaaccagtggacactgaccttagcatacatgaaataaaaccttttctgtttaataattttgtatttaactttttaggaagcatatttaggtatgaatgtattgtgatatctattatgcaattcatttacttatgaggagttttgaaaataacctgcccatgtgtggctgcttttatcttcatgctgtttgaaacaaatgaaatttttttgaataatatttatcaatcattgacacgtggctaaaagttccgggtagtttatttgactgacttcaattattggtattcaggaaatcatatgcttgactaaatttacatgttaactatttcttttttctttttttgagatggattcttgctctgtcacccaggctggagtgcagtggcacgatctcagctcactgcagcctccatctccgaggttcaggcgattctcttgcctcggcctcctgagtagctaggattacaggcatctgccaccacacccagctaatttttgtatttttagtagagacggggtttcaccgtgttggccaggctggtttcaaactcctgacctcaggtgacccgcctgcctcagcctcccaaagtgctgggattacaggcgtgagccaccatgcccagccatattaactttttgaaaccagcaaatacaaagagacacagataaatacaatcaattggaatgtgaattgtggaacgagtgtgtgtcaatcaaaatctgaggaatagttttgttaccaattaaaatggaaaaatttagactgattttgaggctgggattgtgaactctagctctagaattgtttatgaaatagaatgcttttcaaaaataaatagaaatctttatttctttcattgccattcacttattttttgacaggcagaaagaataaagttggattgatccaaacttttcttcctgcctttgctaaaagccagctctgtctcatgtatgaagaataatggtggaaggaaaataggcccagtagtgttttctctacaccacggtgactggatttgcaagctttggagccaggttattggctagtctactcactagtctaccagctagtctactcactaaatgtgtgacgttgcacaaatttcttaacctctttgtgcctcagttttttttttaaatactttttaaaagtattatacaatgtataaattgtattaaaaaaaacttatacaatggggatttttctagtgtcattttctagtgtcatttttagtgcattttatacattttatagaactcttttttttttttttccctgagacagattctcgctctattgcccaggctggagtgcagtggcacggtcttggctcactgcaacctcagcctccatggttcaagtgattctcctgcctcagcctcccaggtagctgggattacaggcagctgccaccacgtcaggctaattttttgtatttttagtagagacgaggtttcaccatgttggccaggctggtcgtaaactcctgacctcatgattcgcctgcttcggcctcccaaagtgctgagattacagttgtgagccaccgcgcccagcctgtagaattcattttatagtgttattttctagtataaaatatgataatacacctaaagtatttataatagtatccggcctgtggtggaagcccaatagtgttagttactattattttccaagagcacagcacaggataaagctgggaaggtatgtacgtattttaagaatttggggaaagtaaatagttttaatgaaatgtgaaaatacgtagaataaggctcccgtcttctgagtcatgtgagttccctcatatttttggtcattgagaggaagccatttgtgtgagagcagagatttaaacattccaaaaagtaataagacatgccatatccctttctcttcctcccctccatttgctttacagtgaagacaaaactttagaatcagcagttgtcaaagtcattaatccggttgagcagagcgatgccaacgttgagttccgagagtcttcctcttctctcgtgctaaaggagattctccaagaggctcctgagctcatcaccgagcaactggctcatcgcctcagaggtgagagatggctcttcctattaaatactggaaggcttaatggagtgtctcccagcctgctcatgtagaaagaatgcgatccattcttgggttaacaatctctttaaagaccacgggaagcttcatcagagaggcagggagtaaagagtttgttaaagagtagcattatactgaatattaaaaatgtgcatttaaaaataggcatgaggggcctttgctgtttcactagacaagaatattaaatggaactgctgcacctctgttagggagctggaatagcacctctggcaattttaatcactaccagaggtgattcttgccccaagacagcatgatagggacgagaatgccaagttcccaggttgaaatatctgctgatactcttccatgcttggtttataccatactgtttggatggcaaaatacgtacccttcattttggtgatactgtgtcagggcttttatagtcagatgtcacctcctttgctcccctgtcttgtaacatattctgtcttcactcaaactgtttcaagccctggggtcctgaacacaccatcatcagttactctagtaatctctctttcatctcgatcagtggagccacctgcttccaaagagtggttttcaagctagaaattgtcagtcgactttggaaccacaaaattaccacagaaattccattattgacttacagaggacactgttctggtttttgtataaagcatttccctccccgcaccaccaatccattttgaacacggtagacagagaattttctcaaaagtatttaacacaggaaagtgaaaaacagtgatgaacagattgaaataattctaaaagaagaccaaaagtatgttgactcaactcttttaaggactctgtccttcaattcctctgtctcttccacagtttggaggggaaaaggtccaagaagtgtataattcttgtaaaggtttagaactgatggccttcgtaaacctgccttaaatattttcctggcaatgaatgtcggtaaaaacgctctatgggaaactgtgccctcaactaaactaagtaagcacaaccatttatctttgtgacagagcagaaggaaaatgaaggtaattggggatctcagccaagaggaaagttgttcaacagcacaaatgtgtggtgcagccaagcactagagaatattttgtttaaatatcttgtaaactaagaagtttggttaattgttgtgaaaatacatgcgttatttagtagaaaagaaatgtagtcagtaagcagctcattatcataattttctacaaatagtaaaataatatgaaacaaatacattggcacaaagatatgactgttattggtagtgataacaatgatattcagatttagggaattagaaggaatgcagacccttttgttaattatcttggttttagtttgcagagctaccaaaaaatgaacaatggtaaaagattttgcttctttctctttaaatttttttgcttttttttttttttttttttttttttaagagaggggggtctcaccatattgcccaggctagtcttgaactcctgggctcaagccatccaccggcttcagtctcccaaagtgctgtaattaaaggtgcgagctactgcacctggctggattttgcttttcttaacatcagatgtttttcttgaggttaggcttgaagtggcattgggaagctggcagaatgtgggcatcacttccttatctcttggaaactggaatgtgagaggatgaagagcttctacctgtgaagcctgccaatactgttactgtcataaaagagccagagtcattaaaccctgggaggtagaagacatagggggcttcttatggtggaaagagggctctggagaccttttgccaatgcatatgtgtgtgtatgtatgtggaggggagatggaacactctctaaatagctttggcaagaaggactatattagtctgttttgtgttgctgtaaaggaatatctgagatcgggtaatttagaaagaggtttatttcactcatgcttctgtaggctgtaggaaaagcatagtgctggcatctgcttctagtgaggacctcaggaaacttccatgcatggcaggaagcaaaggaggagctggcatatgacatgggaagggagggagcaagagactggggaggtcccagaccttttttaacaaccagatctcaggtgaactcattactacagggagggtaccaagccattcatgagggattggcccccctgactcaaacacctctcaccaggccccacctccaacattggagatcacatttcaacatgagatttggaggggacacacatccaaaccatatcacggaactaaaggatggttaaatagggaatctgccttttaaagaggtacctcaaatgttcagaggtaaaaactatgttggagtaataggtcaatttttaaaagctcctgaattgttagtaaatacaaaaaagaaatcaagtaggctgggcgtggtggctcacgcctgtaatcctagcactttgggaggctgaggagggcagatcacttaaggtcaggagtttgagaccagcctggccaacatggtgaaacctcgtctctactaaaaatacaaaaattagccggtgtggtggcggacgcctgtaatcccagctacttgggaggctgaggcgggagaattgcttgaacccaggaagcgaaggttgcagtgagccgagatctcaccattgcactccagcctgaggcacaagggtgaaactccatctcaaaaaaaaaaaaaaaaaaaagaggaatcaagtcaaattttgctgtcatcactgaattcaaacttagaatttatggttttccagttatgtagtaacatcaaacctaaaaggacttgttttctctgttcctataaaataactttagcattattttcataatatgggcagttctctttagaaagggttctctttataagcagctaccatgttactttggatttttgggtgctgtaaataatcatcactttgatgcacatttttagaacttttttaaaattataccttaagttctgggatacatgtgcagaacatgcaggtttgttacataggtatacacgtgccatggtggtttgctgcacccatcaatccatcacctacattaggtatttctcctaatgctctccctcccctagcccccatccccaacaggccccggtgtgtgatattccccaccctgtgtccatgtgttctcattgttcagctcccacttatgagtgagaacatgtggtgtttggttttctgttcccgtgttagtttgctgagaaatggtggtttccagcctcatcagtgtccctgcaaaggacatgagctcatcctttatttttttggctgcatagtattccatggtgtatatgtgccacattttctttatccagtctatcattgatgggcatttgggttggttccaagtctttgtgaatagtgcggcaataagtgtatgtgtgcatgtgtctttatgatagaatgatttataatcctttgggtatatatccagtaatgggattgctggatcaaatggtatttcttgttctagatccctgaggaatcgccacactgtcttccacaatgctggaactaatttacactcccaccaacagtgtaaaagtgttcctatttctccacatcccctccagcatctgttgttacctggctttttaatgattgccattctaactggcatgagatgatatctcattgtggttttgatttgcatttctctaatgatgagtgatgatgagctttttttccatatgtttgttggccacttcttttgagaagtgtctcttcatatcctttgcctagtttttgttggggttgtttgttttattcttgtaaatttgtttaagttccttgtagattctggatattagccctttgtcaggtggatagattgcaaaatttttctcccactctgtaggttgcctgttcattctgatgatagtttcttttgctgtgcagaagctctttaattagatcttatttgtcaattttggcttttgttgccattgcttttggttttttagtcataaagtctttgcccatgcctgtgtcctgaatgatattgcctaggttttcttctagggttattatggttttaggtcttatgtttaagtctttaatccatcttgagttaatttttgtaaggtgtaaggaaagggtccagtttcagttttctgcatatggctagccagttttcccaacaccatttattaaatagggaatcctttccccattgcttgtttttgtcaggtttgtcaaaaatcagatggttgtagatgtgtggcattatttctgagggctctgttctgttccattggtctatgtctgttttggtaccagtaccaggctgtttggttactgtagccttgtagtatagtttgaagtcaggtagcgtgatacctccattttgttctttttgcttaggattgtcttggctatacgggttcttttttggttccatatgaaatttaaagtagtttttttgaattttgtgaagaaagtcagtggtagctttcttctcaggtggggattcaatagggatagcagattcaatggggatagagccagcaggcaggaacgtttaaatctgctgaagctgctcccacagccgccccttcccccaagtgctctgtcccagggagatgggaattttatctataagcccctgactggggttgctgcctttctttgagagatgccctgtgcagagaggaggaatctagagaggtagtctggctacagcggctttgcagtgctgtggtgggctctgcccagtctgaacttccctgcagctttgtttacactatgaggggaaaaccacctactcaagcctcagtaatggcggactcaagcatcccaggttgacttcagactgctgtgctggcagcgagaatttcaagccagtggatcttagcttgctgggctccatggggtgggatccactgagctagaccacttggcttcttggcttcagccccctttccaggggagtgaacagttctgtctcactggcgttccaggcgccactggggtatgaaaacaaaactccttcagctagctcagtgtctgcccaaatggccactcagttttgcacttgaaacccagggccttggtggtgtaggcatccaagggaatctcctggtctgtgagttgcaaagaacatggcaaaagcatagtatttgggctggaatgccccgttcctcatggcatggtccctcatggcttcccttggctaggggagggagttccccgaccccttgtgcttcctgggtgaggcgataccccaccctgctttggctcaccctccatggctgggctgaccagtcccaatgtctaaccagtcccaatgagatgagccaggtacctcagttggaaatgcagacatcaccccccttctgcattgatcttgttgggagctgcagaccggagctgttcctatttgatcatcttgccagccacctagggacaatcttttttttttttttgagaggaagtctcgcgcttgttgcccaggttggagtgcagtggcgcaatcttggctcactgcaacctccgcctctcgggttcaagcgattctcctgcgtcagcctctcaagtagctgggattacaggtgcctgccacaaagcccggctaatttttgtgtttttagcagagactgggtttcgccatgttggccaggctggtcttgaactcctgacctcaggtgatctgcccgcctcagcctcccaaagtgctgggattacaggcctgagccaccactcccagcctagaacaaatttttatgtattcttctaggtcttgaaagaatgccgatattttatgcacatctttgccataagaaatgttagcaaatgtctgtttccagatgtcatgagactagatatttatggctgagacttgaaagagtctttaaaagcatcataattagacctcagtggacaatatattagtataaacattgtaccaaaaaactctacattttctatgagctaagtacttcatcaatttgattgtactttgcttttcatccccgtggctgtatcctagaatgcatcatgcttgggcatgctggtgtgctgtaaatggatttcaggtgggccaagatattgattcctttggttcttggagaaggccctgtgtatggctctgagcccactgtgctcaaaagtaaaaaaaggtcactttcaatgtgttccttgatatgcaaaaagttgggcctactcttccttcatcttacttgttagctccttttcctctgctcagttgctaagtgttgggtgcctaaaacttgtcctttttctctttttttgctatctttaagtgactttgtttagttccaagactttaaatattatacacaggctgatgactgcctgtatctccaactgtgacctctttttagaattccagatttatatccaagcccacgttacatcttcacatgcttgtctaattagtaccacatccttaacacggctgcagtagaaccttttagtttcttgtacctccaaacctgcttttattccaatttcttcatttcagtaaaccacccaattgcttaaaagccatcatctaggagttatacatgattctttcctttgccttctgcaaatccatcagcagtcctgctgaccctccatctagaacataacatgactccctctacattttccatgatcactgctagtgactcagttcaagcctccattctgcctctctttgactactgtcttagctgcctgactgttgccctatctcctccataaaacctattgccatgaagtcttcagaatgaccttgtaaattgtaagtcaggccatttcaacctccggcttcaaacctgtctcactcaaaatccaagcatcctacctctacccctagagaccaccacgtcatctctcctctgcctattctcacatcccttggtaagatttcccccttttcccactgtgttgcagacacaagagcctttcagcttttcaaatatgccaaactctttccactcttgatgatttacataagccgttccctccttctggaatgcttgtttcatctatagtatctcgtcatctctctttctgcctatcaggagcctcctcttccctcttgcttcctcactccaggatgtaacttcatgagaaaagagactttctgtgttgtgtgcactgcttcactgttgtgtctctggtacctagaacagtacctggcacagagtaggccctcgataaacactgtcataaaaggaattttgcaacattgtttatgtgctctctatttttatgactgtattgattcagttaatgctataatactttaatttccgtccccttcagtccatccttctaacattcttaatgtgtaaaatttggacgttgttccttctagtttaaaaaaaaacaaacaaactcctatttttagctttaagaaatcctagtgttttgcaagcatttctttttattttcaccatttggttatataaataaataagtaaataaataaatgtattttagccctcttgtggagtataatactttgcaccaaaaagaatgcaaaacatgtgtataaaaggacatgtaaacagttcaaggaattatcacaaagcgagcacccttttaacaattatccaggtaaagagaaagaccttttggtgctccttcccaccactgctcactccctccctaactagcgttaactggtattcccatttttgtggtatactcttctttgcttttctttatagttttaacatcactgtgtgtaccccatagcagtacagatgggttctggctgtatttgttttttttttttttttttttttttgagacagagtttcgctcttgttgcccaggctggagtgcaatggcgcaatctcagctcactgcaacctccgccttctaggttcaagcaattctcctgcctcagcctcccaagtggctgggattacaggcatctgccaccatgccccactaatttttgtgtttttagtagagatggggttttgccatattggtcaggctggtcttgaactcctggcctcaagtgatccacctgcctcggccccccaaagtgttgggattacagacatgagccaccatgcccagcctctgcctgcatttgtatgatatataaatggcatcatacagtatatattactcattgtttttagatctctacctttgtattaaatggagaatctacttgtctaggtttatctatctattttattatgtttgcccttccttcttccataaaatatttgaggaggcttacaaaaatgcatgcagtataataaaagagaaaaaaaaaggtcaagatcaggaaaaataaaaactagtacagaaaggaataggatcagatacaattataaatttggaggaataaaaatagtatttggtggctgggcacagtggctcacacctgtaatcccagcattttgggaggctgaggcgggcagatcacgaggtcaggagatcgagaccatcctggctaacacggtgaaaccccgtctctactaaaaatacaaaaaattagctgggcgtggtggcaggcgcctgtagtcccagctactcaggaggctgaggcaggagaatggcgtgaacccaggaggcagagcttgcagtgagccgagattgcgccactgcactccagcctgggcgacagagcaagactccgtctcaaaaaaaaaaaaaaaatagtatttggtttgaaactttggatacgagcttcctggagccaatgaaaaaattaaaatatgattaattataatcatttttactgaaataaacacatatactagtttctcattttaaaaagatacaactaagtctaaatttttttttgtatcagtcttgaaaagacacctgataatgccatagaaatacccctgctctatccttttccacatgcagtgggggcatatacaggaattgtgcacagcatgtcagatacttcctgctcctcaatcagtgtatgggattgctttaatagcattattattattattattattattattattattatttgagacagagtctcactgtgtcgccaggccggagtgcaatggcacaatcttggctcactgcaatctctgcctcccgggttcaagcaattctcctgcctcagcctcccgagtagttgggactgcaggtgcccgccaccacgcctggctaatttttgtatttttagtagagacggggtttcaccatgttggccaggatggtctcaatcgcttcaccttgtgatccgcccgccttggcctcccaaagttctgggattacagcagagagccactgtgcccggccaataacttcatttttttaatcagctttacctttagtctagcaacctcattttctgctccaaatttcttttctatgcatgctgatgtttttctctaaatctaaaaaatacatatttaaattcaatcatatttgaatctttttagtcttatacacagctgtagctacatatcaatgtttgcattatggtatattattttattcaaacattgaggtagaacttgattattacggatgtcgttaaaaagatcatttgtatactaattagaggtatgtgtcatgttgccagcatagaaataacgtgcttgtgtttttctaataatgtcccccgtcactctgctttgggccctagcaggacagtcatggataaatgtcaacaggtgactcatctatgaccaaaatgtgttcaggctttgtgggggatttaacaaaatagaaataatttgcacttttcaaaattaatacttcttacaatagctaggtcttgctgttgccttttagtaggatatacccccaaacttagaaatttcaggaaacaaatcattagtatccactttcatttggaaaggcacgtacttatgtagcattactttctaattatttgtgtaagaagggaacgtgctcataaagatgagatcataaatggccctgagttttggaaagaaaatcttttagcttctccccttccttgcccacctatttttgctgaggttcttctttgtttctttgctttctttctcttctctcttttctccttctcctgttcttgggcttctccctccccctatctgattctaagatttttttgtgttcattttccaaggcatgaatgttccataaagtcacatcatacagtcatggtggctaaagttggtgcttagttatgccctgggtttgtgccaaaagtgaacagttacagacccgccagagtcctcacctgtattcgtttatttctccagagatgtgtgctagaggactactgccaaatttaagatccattaaattgctgaatcatcacattggggattgtatgcgtgcacatttgtatttgtgtgcgtgtgtgtttctgggaaccagctggcaatgaggtttcagccactgattaccaggcatgcttagatcaagaccacactttacccaaatggcctttcacttttatttgtgtaaggccttgacaggagccacaagacaaagagagaaagaaaagcgactgttcttagcctaggactaagtgaaaaactaatatcccaggtttttaaaatttaaacaaactctctccttcctattggtagtttcatttgacctttaataaagaatagttgcttgctattttagtagcctggattaacagcttcaaaaagatccttttaaggaggtcaaataggaaaggaacagagccagatattttttttctctctctctctcttgcccaaagagtgaatcatctctctcctgaaatggttacaaaatccagagggaattacattgcctgttttgcttacgaagacggagggctgtttcacttaggaagaagatactaggggtagggggaagaagtgattgtttctgctagttataaaaccaaaatgattcctcaacctcagagtgttcactatttcttctgtcacacaaagataatctttattcttaaattcagacattttaaagttatgaaaatagtaggcagttaataaaatagtaggcagtataaaaagaggcttctttttatacctcttcagacaaaaacgtaaactaagttgtatttctttttcctccttccattttcctcctccctctttctctctgttattcattccttacttttttttcaatatgaaaaaaatcaatcctatgtaaaagaaaaaaagatttaagacccttcttttctgttaagaatttgtcatgcagaatacgcctttactgtgttgaatgttttccccaaacaatttctgacttcattagatcatatttaatattaatgcactgcaattgcttttggcaagaggtccttcacttctccattcttttgagcaaagaatattgtgtttgctttcttttctaatggaatgaagtgtttgttactatttcctcataattgctttctttgttgcttgctgttaatcgctccttccctctaccctgcctatgaatagctaagatactttggggtacgtccttatggatttcagtatttctttcattctgcaaaatttgctgtaagttaggtcagtgcttgctacaaaaataggtttcaatttgctgagaggtgtctctggctgctgtaagtcatgatacagaaaaataagtttgtaactaaatgggtttctaatgtaaggtagaaaaatttgccaaagatgagttcctgggataaagttgggctgtagctgtttttgtgcagtcaaaatagctcagagtatcatgagcatttttctgagttagttttcatacttttatcagtatatcatctcctttgtaatagtcatatcaaacttaactataagccaatatcagatgtctgttttcactaaattattccataggtctctgtttaatgtaatatctgttaggttaatttcttaatactgcctttccattttatgtctttaaaaaataagatccccaaatcaaagaaactggattcttggtttgactgtaagccagggcacattaagtatttaatattttgattctattgcatttctaaatttttgatttttaattgtgattatttatggaaatacaggtaattttgtattattgaccttaatgcagcaaacttgctaaatttactgactatcctgagttcatttgtagattctttgagctttttttgcacacataattgtgtcatctatgaggaaagacagtgtttattctttattttcctttatttatactttctacttcttttgcttgccttattgcactctggttaggattcagtgtggtgttgagtaagaataagaataataggcatcttggggccgggcacggtggctcacacctgttatcccagcaccttgggaggctgaggtgggcggatcacctgaggtcaggggtttgagaccagactggccaacatggtgaaaccccgtctctcctaaaaatacaaaaattagccaggtgtggtggcacatgcctgtaatcctagctactcgggaggctgaggcaggagaatcgcttgaacttgggaggcggaagttgcagtgagccaagattgcagccactgcactccggcctgggcgaccaagcaagactccatcttaaaaaaaaaaaaacaaaaaaacccggcatcttggtctcattcctgatttgaagtggaagtctttcagtattccacaattaactgtgacgtctgctttctgtatttttttttaaattttttatttatttatttttttttatggagtcttgctctgtcgcccaggctggagtgcagtggcgcaatctcggctcactgcaagctccgcctcccgggttcaccccattctcctgcctcagcctcccaagtagctgggactagaggcgcctgccaccaggcccggctaactttttgtattttaagtagagacggggtttcaccgtgttagccaggatggtctcgatctcctgacttcgtgatccgcccacctcagcctcccaaagtgcggggattacaggcatgagccaccacgcccggcctgtatttggtttttataaatgccattcatcaaataaggaagttgtcttctatttctacttgactaagatttcacataatgattaactttgggattttctgaagtagttttactacttgatatctgtctatctaggtgatcataggatttttcctctttattaatatgatcaattataactgattgctttttgaatgttaatttgtactttgattcttgggggagccctacttggtggctatgcaatatcctattataaattgttgaatttgacttgggactagttttaaaaactagtattagtttaattggtattaaggttttgctagattcataaaattcataaaatgaagatataattccattgtctttagacttttgggaaatctctcattttctattctttgggataatttgtgtaaaattaacatttcttaaatatttggaattatggacttaactatggattcatttttaaatagatacaaaactagtctagttttttatttctttttctgccaattttggcaagttgaattttcctagtggtgtccatgtcttctaaaatttaaaacttattaaaaccaagttgttagtatcttttaatgtccgtagaatctagttatgtcacgatttcattattaatattggtaaactatgtcttctttctctcctgtctctttttttcttgaattgttttcaaaactccttatattagttttttccagaaatccaagttttgttttattgatttcttccatatgtgtttgtttccttcatctttaactttggccttgtgtttattatatttgtccttctaccttttttttaggtgaatttaatgtgtgtgtattttttttaacacttaacgcttttaagggtataaaatttccttagagcacaacttgagttgaatctcacaatttaaagtgtcatattttcattctcatttagttaaaagtattatatattctgatttacattgtgatttcttcttttaccatgagttatatagaagtgcattgtttttactttgttattgtttttagactatttttcaagtaaccacagactataactctatagtggccaccttttgaaatttattagaacttaaactctgcttcaacagatggtcaattttggtaaatgtttcatttgtactagaaaagaaagtatagtccaccactgttggtaacaatttaatatatgttaattaggtcaagtttgttactcatggtggtcaaacgttctatatttttgcatactttttcctgctggttcttagagttgctgcgagagatgtgttaaaattttccactgtgactgtgtatttatctcatttttcatctagtcttttcagtttttgctttatatatttagaagctatgctattagtgcatacaaatttagaattgatgtatcttccagaggattgaccccttattaatatagaaatatttatcttaatctcatgtaattcttcttgttttgtagtccgttttgtttgatattagcatattacaccaactttcttgtgattggtgttcgcatgtttatgtttttctatccttttaccttcaaccttccgatgattatatttaaggtgtgctctggtaagcagtatattgtcattttggtttctaaaattcagtttgatgatatttgtctttgaatcgaagtgctttgtctctgtgtttaatgtaattgctgttacatctggtttaaatttattattttgatgtttgtttcctacttgtcacacattttcttcttttcctctcatttctttactgctgtatactaaataagtgtttttgatattcttttagtggttatgatagcaattacaacatacagttaaaatatcatataaattgataattttatcatttccctgacaatcttagaacctaaaacagcttctctctacttagcctctcctcagtttgttactattaaaatgtattttaattatccatatataatattttaaactttaaaatattactataattctaaactctttaaaatattactataattgttttatacagtgaatattgaatttattcttacccacatatttacattgtccaatgtttttcttttcttcctgcatttctttgcttccttatgagataatttttttctgcctttactgtttcttttggtgtagatcttgtgacgcatactttcagacttctttcatttttttctgaaatgcctttattttgccttcttttagaatttgttggctgggtgcggtggctcaagcctgtaatcccagcactttgggaggccgaggtgggcggatcacaaggtcaggagatcgagaccatgctggctaacatggtgaaaccccatctctactaaaaatacaaaaaattagctgggcgtggtggcgggtgcctgtagtcccagctacttgggagactgaggcaggagaatggtgtgaacccgggaggtggagcttgcagagagccgagatcacgcaactgcactccagcctgggcaacagagcaggactccgtctcaaaaaaaaaaaaaaaaattgttttcactcagtatggaattctagatgggcaattgttttatattagccctttgaagatgtaattccattgtctttagactttcatcattttagttgagaagtcagtcatacttttaatgccctttttactctgattggtttaatttttattttttctctccataatttttttagcagttttactatcaggcacctagaggtgtttgtctttgtctttatcctgatttgggctcatagtttttctttttctttttttttttttctttttttgtttttgagactgagtcttgctgtatcgctcaggctggagtgcagtggcatgatctcagctcactgcaacttctgcctcccaggttcaagtgattcttgtgtgtcagcctccagagtagctgggattgcaggcacccaccatcatgcccagctagtttttatatttttagtagagatggagtttcaccatgttggccaggctggtctcaaactcctgatgtcaaatgatctacccacctccacctccaaagtgctgggattacaggtgtgagccaccgtgcccaacccacagtttttctttaacgtttgaataatgtctttctttcattaattttgaaaaattagtataccaattgccttttcaaatattgctacagctccattctctcctttccaaggggaactactgcctatctgttagactttgctccatttctccatctctcttaagctcatctctgtatttttcatcgctttttctctccatgcttcagtatggttgttttcttctgacctattttctaattcactaatcttttcccccatgcatctaatctgctgtaaaaacatttgagttcgaaattaagttattaaattgacagttttaaaatttcatttgattattttacttacagattctaattctctattgtaattcttcagctatttttaaaatcccctctgattctgtttctattcttttcctcatgagtttattcttctagagtttccagtcatttcttctatttcctttgtgattggcaatttgttatggatggctgaatagtgtatatgaaaaatgtggagatgatgagactaaagatgacaaaattattttgctctcaagaggatttacttttgaaccccaaaggcagtttgaagagtggcagattaaaaaaaaaaaaacaaaacaaaactattctctgcttaagccaattcaaatcaggatttcggtcctcaggaagactgatccatttttgcttcacccttctccctaggcaggggttggtataggtccagatagtaaatatcttagggtttgtgtgtctgcagtctctgttgaaactactcaactctgtcaatatagtacaaaagcatctataaacaatatgcgaattaatgaacatggctgtgttccaataaaacttcatttatagaaacagacaattagccagattttatctccagactgtagttttccaacccttgtcctaggatataactctctaggggtcctgtttcaaaaccgggttacttaactaaaactccttttctgtagagggccctaaactttagtttttgtctccataggctgttaaacttctgttagatttgctaattttttcagcctattggcttattttatcacttatgaattagcaaatatcctaagaggaaaagcaacaccaaatgttgggctcacttctgtgcacttaccctctctccaggaccttagcttccaagacagttacttgggtaactctgtgatactttcacagatttttaaaaacttgatttagcttttatccttgttcttagtacaagcagtctatcagagcgagaggcagatgaagatcttttctgaaattcatatttaccattgccttaataaagaggggaattttttttttttttttttttgagacagagtgagactctgtctcctaggctggagtgaagtggcgtgatcttagctcactgcaacctccgcctcccagattcaagcaattctcccgcctcagcctcccgagtagctgggattacaggcacccgccaccgctcctggctcattttttgtatttttagtagagatggggttttgtcatgttgggcaggctggtcttaaactcctgacctcaggtgatccaccagccttggcctcccaaagtgctgggattacaggcatgagccgctgcgcccggctggaaaaataatctttatagtatgagttttatgtcagagattgacagaccacagggtatacacaaaatccagctggctgccctccaccttcaaatgactgttgaaatggaatctgtttagttctgtgtgctgactgttctttccttttttcttatccaaaacagcctccttactgattctccccatattccttatctaaatttttctctgcatgatagccagagtgattcttataaaacataaatgtgagcatgttactttccctacttaaaactcttgaaagattcctcatccctcttaaaatataaaagacaaactttaaggcggcttgtaaggcccttcatggtcccgctatctatctctatctctccaacctaatttttcaacatttcccttgctaaaatcataccatctacctgtaattaattgctttctgttccttgaactggcccaattccctcccacctcagtgcctttgcacaggctctttctggatcatgacctccctcttgtctttgccttaagtccctagttatccttcaagctcagcttaggttaactttctctaggaagactcctctgaaccctagattttggcctagattcagagtactatgtatttcacccataatatttcttattctctgctattgaaaatgtctgtgcttacttatttgtaacctctaatctcccgtgagcttcaagaggcaaggttatctctagcctaatcttgaatcgttagcatagagccctgcctggccgataaaaggcactcagtaattgtttgtgagggaatgaatggatgaaatgctttaaatatatttagcaatatttacttttctttatgatgtttacattcatttgatgcttagtataacactgtgagctgggaaagcagtattattcctgttttaaaaatgggaaactggaaacggaggccagacgacttgcttgggactttccagcatgtttgatggtaaatgtagacctcatctctaggttctgtaggtctcaggccatgtgtttggattgggtaccatagttttccctcactggatgctttatttccccttttaccttctttcctcttttatttattttccattttccctcccccatgactggcgttaaggctacactgaaacagagacggtagtactttgattagtcaacagatttggggatttttagagagcttaatcatttgtcattaagcgaaacttctctctcccatggtgactctgtgttaatctgggcttggaatgcagggaagagtaagagtacgtatggggtgctaactcctccctttcaagatgagattatccacagaagtcacaggagtttgtgcaaggtccttcacactggaaaattactttgtaatttaaacctgtgatttagacccagcttgtgagtccttataattagataattgtaaatgactttaaaactgtgtatgatgcttgggagatcagaaatggacgtcaggttagccaccttgtcagattcctcagctgttgaccgtgggattatacattcatttagtgtgaaaaggaagaagtttgtatgtaaaattaataatataatgagtggaaacagtattctttctggtcctttaaaggaaataaggctgattagacttttaaatagtttaccactaacttcctttttgaaatcatttaagaccaatgcatatctttttgtgtgtttgtgtggggttgggggaatatacacatttttttcctttatctgtgaattctgtaccatagagtatgctagggtcagttaagttgtagagagcagtacttggagaataatgaagctggatgatggttcaattgttttctaaaaattggctcttgaatgttacgtgtggaggactctggtccaggtgagagacagaaatggaaagcttagattgagaggccaggaaacactgattttcttggcccctgttctggcttggctggaaagctttaagagcatttttattcatacctttcaggtagcattcttttcaagtggatgaccatggaatcagagaagatctcagagaagcaggaggaaattctttctatcctggaagaaaaatttcctaacttgcctccaagagaggacatcatcaacgtcctacaggagacccagttcagtgctcagggtgagtgactctgtccccagctctcttgtccctcccgagtagggatggtttgtggcatggagcatcatcagacctgagaaggtatatttgtttctttgtttgttttttatacagagtctcactctatcccccaggctggagtgcagtaacatgatctcagctcactgcaacctcgacctcccgggttcaggtgattctcatgcctgtctcccaagtagctgggattacaggcatgcaccatgacagtcagctaatttttggcatttttagtagaggcagggcttgaccatgttggccaggctggtctcgaactcctggcctcaagtcatccacctgcatcggcctcccaaagtgctgggattacaggtgtgagccaccatgcccagctgagaaggtacatttgaatgtgtttcaccttcttcctattgcttgtgctggtggaaggttttcaggcacataatgttgactcccctgcaaatagacagcttgtactgtggcctctcctccgaggcctttgtgtctggatgtgtggttaattcatgtctctagtgcatatctcaggtgcattattacatgcaatccttatgctgataggattctattttgagaagatggaaggagcaatatcaagcacaatgggatttcataaatcagttaatttgagaaggaaatgagtgagaagatggctatgttgaagaaactgttgtcagagtctaggctttgtcaggacagtgaatttcctggatcaactgttttacaataacaaaaggctataattcactggatacctactgtatacaggttttgatggcatagcttggcaaggatgttcttgctgaatcctcctcatgacaaccccaagagtcagtgctttgacgtcccagtctgcaggtgagggaggacactgaagtgcagaaagccttcattgctttcccaacatcaaacacacatagcaggcaggtggccaggcaaggcctaaacccagcctatatgtctttaagatgtaaacactaaattacataactttctctcttagttcaggaaccccatccccaggggcaggagggggcagagcctgaggcaaagtggtttatgtgggaggtggttccagtcaacactgataggggaatggaatgcttcagcaagcaagttggctccatgggaaaccagagcttaatcccaccagagaccatgagaaagagtgtaaactctgtcccacctgagggatgcagtggtgtgctcatctcggctccaggagctgatggttaaatgttcaggaattttgtgagttgagtgatgattggtagcttgagatcagccatggtaggagtatttagatccctgaaattgacaaacactacaaatcaggatttgttactggccgttaaacatttaccagcagaccactggaagagtgtgggctactcagacccagggggccttaattctccagtgtaggctctggtggccaaggaaagccctcaggaaaagagaggcaggtgctggtggtggagcatcatgctgggtgcactgggatgggaaagtttgaggaaatggggtggggcctttgcagcgtccattgcaccttctgttacctatgcatagatgtgcatgtccttgtgtgtatgctgcacaagggaatgtgttttgtcattcattttcacaatgacaccaaacttttaatgtcacaatgtcttcaatgaatcattttacgctgcattgtgaaagattgtggcttttcaatttttgagtcaaagaaaaatatttagtgcctgtctgtttcctcatgtgattgacagagcattgtaagtaggtagtgcaagcagtggtctctgaagccttaacatacgtctgggaagggtgcagtgctttaccaggctttattatagatcttcctcccaagagagtaggcctaatcagacgtaataatgtagcgcgagaattaaatgtcgagccagatcctttgctgctttactgtgatagatttcattgagttccattggtcaactgactacaactatgcagttctggataatttagccattctggattattactcccattaattagggaatttaataactcttattgtcagagcctattacgagggtaagcaacttaattaagatagtcttacgagtcacatttgtaaagtgcattttgaatgaaattatactagaaaacatgggggcttacctaaatgcagcctgaaagccagttttggctttctttggtgttacttaactagtttgcatggtgatgttaatttttcttcatttgtccaccgccacccttttattccctgcctttgtctgctctggggctccagaggtggacccctaagtatttaatcttatgggctcccacaacactggcttctggttgggtttgaccaataggaagagttaggaacaggtagggatggaggcgaggagaagaatgagactgtagtggatcttccttgccttcttcctgcttaggtggaagtttctgcagccagtcttctcaagttacagatctctgttttctttctgggtccctttgctagtctctggatgcctcatcatcttttattcactttctcacccagcccacatctctgtaagtgtcctgccattaacacatcttcttttgcagcaaaagaggtgcatttttcctattgggatcctaactgatgcagacgtgatgtgattattgccttagtgtgtgtgtgtgtgtttattgtggataaaagtgacatttgaggggcaaagaatgaaatttacagagtaaattcttcaaaacatcgcttgatattacaaaaaaaaaatccctcaagtataacataatgtttttttttcctgtcatccacaggtttaagtattgaacagacaatgttgaaagatctaaaggagctgtcagatggagaaataaaagtggccattagtactgtgagcatgaaccttgaggtaagggtgggaatgcttttttagcattgattgatttcccacaattgcagtctgagcaactggaatgtaactctctccattggataagtccatgatagtcctttgcttctttgtgatacatttgacttggaatatagtggcaggttattatttgggtgaaaacactatgctaagtcaatgaaaaatgccaaacctggattctcaagatgaatgctctttcattcatctcagtaaaacaaagcctaaaacaaacactcagatgtgggtgtatatttaacctgtttaatagcaattatgatatgtgtgattaggttcacttccatattttctgtgtaccaccctgtattgttcatagaacttttcttaaaaaaaaaaaagaaaaaagaaaaaaaagcaagttgtcttttgatcttcaaaactatttgaatgcatgccattttggtaatcagtggtgacaactcaagtattacttaacaaggaacctccttccaaactgttaactgaatggctcagagcgaatgctacttttgtctttatgtgtttccttggtgagttatcttttgtctactttgggagttttcaatgacttatatgttaatcttaattaacctaactaatgggaactatattttacagaggcacatttgtgcatttgtagaagtctgtgtatttctttactgttgtattgtctttaccaggttatctacatttggttgggcacttagctcttaggtcgagtttatggagatgaaatatgctctataggaatttgtgttttggtttttagaattgtgtgttgccattcttttttttttctttttctttgaggtggagtcttgctctgtcacccaggctggagtgcagtggcaccatctcagctcactgcaacctccacctcctgggttcaagtgattctcctgcctcagcctcctgagtagctgggattaaaggcgcccgccaccactcctggctaatttttgtattttagtagagacagggtttcaccatattggtgaggctggtcttgaactcctgacctcaaatgatctgcctgccttggcctcccaaagtgctgggattactggcgtgagccaccacacccgacctattcttctttttctcatggtgatgttgactatatcaatgtgtatatttctctggaatagcaggcactcatattggtgtctacatcctcagaaaacccaagagcaagccaggtgctttcttttcgtgatctttttgtcaaatttatttccagttcatacgcattataattcagcttataaatctgtatgaaaactaggaggcaaactgtgatgtttggtggcacctcacagtttacagagcatgttctcattgtatgcacttgataaattgactcaactgtttctatggactttcagattgataagtgctccatatgactagttattgatgtgaatcaattcaacaaatatattcaatttgtgaggtagtaactatataatcaccatcaattagaactctgctttgtgcctaagaacccaaggaaaacatggatcttgcaagggtcagtagctctaagaatcatttctactagttcaagccttagggttttctttctctgttcccctctcctctgtcttccttcatttaatggcatcttattaggttttaaatgccttgtttggaattccttcctaaattaacatagaatgtcttgtaattgcttagggaactgtctgtaattagcaaattattttaaggctattcatattacagacttactgtagctttaatgtacctcaatttatattataggggtatgcaaatggctttgtcagatgtgttaaactgtaaatgtctatcaagcagaataagtgataaaataatcatcttaatcttgaaagtaatttacagaggtccagtaattaatcaggtggttaagcacatctctgaaagtgttatatgatcttggaggaaaggaggacatttgtgtataataaagaagggtacacagtttaaactcttataggctgaatgagaacttttcacttttgcataatggggatattaaagatgactgagaagtggaaaaaaaaaacctccttagtaacatcctgtatcttccttgaaagaaaaaatgcaaatcagttatccaatctgtctgctggaaaaattcccaagttaatgtcagagtttaattttctctgtagattgtcctgtgatgcagtggtattttcccaatccctactcatatttgattatatttcagcattcctttctcattcccattaacctcactttaaaaaatattgacagaatcctcacaatcttattttgtggattttggaacagttatataattgctctttgaatctaggtgtattctcaaagaaaccttcttagttcctatgactttccgaatcttgctcatcctccaaagcatggtcaaccaaggtgcatcatgataactcttacagattcactattttttattaccaccctctgaactctagctaaatgtagtctaggtgaccaacttaggacttcactctttacattagatcttccgttgcttttgaatttgtttaatatttctaatcatggtctgatagtattttaaattaattgagggtactgatggtatctgacttctctctctcttcagttttctgtaacagtgatggcacatagtagatgcttagtaaatgcaaatatttagttaatacttatgggtgtttgcagttcgcccctttgctatctgatttatatttccttttggatttaaataaatcagctaggaaagcaaagccacttagctaggcatccaaagcagcctactttttcctctcccaaccagtttcttccagacaactatggttgaaggataacatcaagcagatgaaaaatggcccacatatttatagaaagtatgcttatcccgctctccaaaaacggagtgggaggctttgcaaagtcgttagctgttgtcactggcagaaatcaactataggttctgcagcatgtcggggatatgggaatgaagattccttgcattttcaatggttctttgcaatgctgtaattctaccgttgtgtaagtcatggcctttatacggctgatgacccagttaattttcttgggtagaagtattcagaaaattagaaagatttatctccctgtaacttacacagcatgctcttcagagggaaccattgagtttgggaggtagaaaccactgccttcaatagttataggttatctggcactctgataagaagaaagcttctaaaccccttgtctctcatttttattgtagttatctcacaaatattcattgttatataagttactgaatgaaatacataaaaagcaagtaattacaataatagagtttcaatgctttgctcagtacaggaagtcagaatggatgagattttgaggggcggtgtgtagaaatggccttatcagaggcatggccagaggggcagctcttcttaataaggggactgtgggaaaagataactgcagtctcatttcgctcagcctccaagccattccaagtgtgaaagtagcatgcgtcttgtgggggaatgcacatgacatattggaatcccctttgttgattattgttacacctgatcctttgtggcctttttgttgcttgttgatttgatcatcagaagagaatttatggatatcaaagagcaaacgttgcctttattcccttgccagcagaactggtaatgattatacttcttgggcctagtttactccctagtaaagcagtatattaaaacgttaaggggaagaaacatcttttcattctaatgaagtgccactgaagcaaggttgctcacggcagtacattaatggttcccttgctgacaccaaatgttattacatcttctttaagcatctcccaaaagactgttagtcattattagcgtctttactcaggaaggacaatagccatgcactgacttgatcactttttattatgatcaattgcagtatgatttattcttgtgtatgtgctgtatcagtgtgctagagctggcataacaaagaaccacaaactagacgtcttaaacaatagaaatttattgtctcacagctctagaggctagaagtccatgatcaaggcgttggtaggataagttccttccaagagctgtgggagagaatctgctccatgcctgtcccctagcttctgatggtttgctggtaatctgtagtgttcttggtgcatagaagcatcacctggatctctgccttcatcttcacatcaccttccctctatgcatgtctctgtgttcaaatttccccttttcataaggatacataatagattaggacccatctagtaatcttatcttagtttatttatttatttttttgagacagcgtcttgccctgttgcccaggctgtagtgcggtggcatagtcaaggctcactgcaacttccacctcccgggctcaagggatcctcccacctcatcctcctgagtagctgggactacaggtgtgcacaccacacctagctaatttttgcattttttgtaaagatggggtttgccatgttgcccaaggctggtctcaaactcttgggctcaaacgatcaactcgcctcagcctctcaaagtgctgggattacaggcatgagccatggcgcctggcctcatcttagtttactatgtctacaacaaccctatttccaaataaggtcacattttgaggtgctgagagttaggacttcaacataaaagtttttgtgggacaaaattcaacccctaatgtatactactgtgacagtagtcatttttcagacaacttaaaagaataaaacttaaaattttaagattgcctgtatgaacctgctgcctggtaagcatatttcatctgttgctcccacatttttatttcatatcaatttcctttaaatgaggaacggtgaggactttcagctgttggcattttatctcctttcttcagaactggagtctgagggaattgttcagggccgttttctctctttctttctgggctgttctgctgtgctctgggcctcagacctcctcatgaccagccactctgctgtgtgaagcctgggatgcatcctggtaaagtgactcagaggccgctgactcattctgccctgcacagagattaccagccatactgcaccttggagtactgcccaggggaaaatactaatgttttccattagcattcaaagcacagaccagaatgaattcccaagatcactgctaaactccttcctgacaaaagggaacgtttactcaggcctcagtgaagcataagtgagccactgtaaccaaggatttgagactcagcgcaccagtctgaaatctggtttaccaattttatgcacacaatatgatttctcattgagcttggagtttgttggtggccaagatgaaagtacctgtagagtatttaactctcttattttgtgaaagagtgcatagcgtttcttgggggagcatatgttagttttgaactggtcttgaaccagttcaccttttcaaaatatgtgaatgatttgattttggtcagcaaatcactagtaaatctttagcatattgcttagcatattggtgagcatatgatttgcatattgaaatattttgaaaagatgacttttcaaagccattttgcccaactaatagaaatatgtgaaaactctcctctaggttctaaatcctgagtgcatccatttctttctgggttcaggtctgtaaactcttccttgctacagtaaaagttgatgatggtgagtgcttaccgtgtacctggcagttgagtaagcattatctcacttaatcctcccagtaaaaggtactatgattacccctgtattggtgaaggtagctccagcagctggaacagataaacaagtctcagtgactcagcccagaaattgtttatttttcactcatgtagcaatcctatttggtgttcccagtcaggtggccaggggtgattcagagaccatcttcaatatgtggtttccaaggttgctcaggaggacatctccagtttatctgtcaacagggagaagagcttggagggccaagggtggagttttttatggatctggtctggttgtgacactcatcacttctgctcatatttcattggctcagtcacatggtcacatgtaactggagggaggctgaaaaatgtcatcaaatagatgtgcccatgaaaaggaaccaatttggaaaataattagccagtgtctgccataatctctatcttagaggtaaggacattggaatctaaagaggttaaatcatttttctaatctgtagagccaggacccaaatcccaggccagtcctattctagccctgtgtatactgcttgggtcatggtgccagcatgcaagactaattagaatttgagcccactcaggggttcactagtaagtcatcagctatcagtcattgccccaaactcagggtgtcagacagcctagacatccttaagcaatccttggttagcattcttctttccctactctttgtaccaaactttcttcctcttagtcttcacacctttgcttcctgaaaaaatcattttaatttttgaactataaacataatccaagttctaggtgctcattgtgaagctaattattggtgcctgatacagagaagatttggcaagataagtcaagtagataaaagtaataggaaaaaggattatggaaagaaggattggataggacagatcgtgtaggaaggaaaaagtctgtttttttctcagactgtctctagaattcaaggatgtgggtgttctggtttttcttgctgtgatttagccttttcaaatttgtgttcaaaatatagagcatcccagtcagttagtgaaaaattttaatggtagagattttttactgaaatgaaaacagcattacttttgagcactatagtaactccaaataaccaaactccgagtagctggggaattaggagttcttagttcatattttgtcgaaaattccaaaagcacttaaagcaaatgacaaatacagttaggtaactttgattgtgtggatttaacagtcagtcggtgtgaggcatttgaagtgtgaattacaattttaaactaatttagaacggataattcctagcttcttgaggacattagcaggataaaagagtgaaacatggacccagaaaagtggactttcgttcctattgagctatgagtggttcttggtaatgagatgtaaccgagatgaaagaataaaaaatccctgtgtaaagaatggtttatcatatcagcagcaacagcactttgtctttggaaaattgtactaagtggctgaagctgataatatttagaatatttacaatttgtatgtaggtagtgccttctacagatgtccaaaaatagtctgtaaaatctctttacctagaaatgcttataatataattctttttttttttttttttggagatggagttttgctcttgttgcccaggctggagtacagtggcacaatctcggctcactgcaacctctgcctcccaggtttaagtgattctcctgcctcagcctcctgagtagctgggattacaggtgcccgccaccacgaccagctaattttttgtatttttagtagagatggggtttcatcatgttggccaggctggtctcaaactcctgaactcaggtgatccacccgcctcaacctcttaaaacgttgggattacaggcgtgagccaccgcacctggcagaattcttattttgtatctccagctaaactcaagttggagacaacttgatgtttctgttgacaacttttctctgctttacctattggtcagtttcaaatggacttaaatgaatcacaaaacttggtctatctagttatgattctctgtaaataaacagtatttccctaagtggtgcaaaatacctgagtactttttctagctatgattttgcaacagggattatataaacactgctgtagtgtgaatgtttgtgcccctccaaaatgtatatgttgaaatttaatccccaatgaagtagtactaagaggtaggggactagggaggtgattggatcatgagcattctgctctcatgaatgcatgagtgcctttataaaacggcttgcggggacatgtttgtcccttttgccatgtgaatatgcggtgagaaggtgccatttatgaggaacaggctctcaccagacaccagttccaccggctccttgatcttggatttctcccagcctctagaactataagaaataaatgtctattacttatacattacccagtctaaggtgttttgttattgcagcctgtatggactcagacaagcagggatccaaggtttagccatcatgaagttacacattctgcattcatgctttctttggcatagggtggtgctctggatcttcctcctctcctgaaacactctgataaaaatgtattcacacagagcaggtagagaagattggggcgggggtatatgaaacatagatcctccccagatataaaccctcttcaggtcccagaaatctccactgactctccttggcaactgtgaaatgggaatgaaacagtgaaataaggtatgatgaggatacgacttcatcaacaggctgcagggaactttagtgactctagccacaaatacagttatttggcttgatctagaaaggaggaaaactatgggaggagatgcatgccattttaggaagcccaaatacggttgactcgtagtgagtgaaataggtacagttagtgtttcattaggtggtattttatttgatacatgtaaagaaaagtgttaggtgatgcagatttatatgcaaatgtggacatatattattcataaccatttcccttttcattaagtcccccacccccaacatgcctgcatgtgtgtttttgcactaaaggcatggaataaaccaggactgcaataccccaaccttggattcctgggatcttgatgcaatgggcccaattagctaccccttcactgtctcctccccagaataaaatggtgtttcagttatctattgctgtgtagcaggtcacccccaaaacctagaggcttaaaaccacatatcattatctctcatagttttatgggtttttagggggcttggctgaggggttcttgctcagagtgtctcctgcagttgtgttcagatggttgtcaactgggaactcaattggtacttgtcacctggcttgggctcctcagagcataacacttaggttctaaaagagtgccacaagagagtgccacatgttttctaagagactcagatggaagctgcaattcttcttgtgacctaacctcaggtgtctcagaatatcactaccagcatattctgttattcatgtgagtcccgaagaccagcccagattgattataaggggaatcagcagtggtatgctagtaaatgtttaacaacaggttctcaaaaaaacccactcttacatattactgatatgaaggatatatatgatacatggccgggagcagtggctcacgcctgtaatcccttcactttgggaggccgaggcgggtggatcacctgaggctgggagttagagaccagcctggccaacatggtgaaaccccgtctctactaaaaatacaattagccaggtgtggtggtgggtgcctgtaatcccagctacttggggggctgaggcaggagaattgcttgaacccaggagacggaggttgctgtgagccaagattgtgccattgcactccagcctgggtgacagagagagactctgtctcatataaatacataaaggatatatatgatatacacaatatatcatatatagtatacaatgtatactctttattcttttattgtaaatttcgtaagaccaattaattctcatagaatgaactagttaatttttgtgtaactcttgcattgcaatcgatgaatgagtgtaattgcaacaaaaatgtagttgatgtttttgattctccctttacaagaaactgaaacaatgaagaaatatgcttgaacttcatttgtttgtcaacaatataagtgacttctttgctgaattaaagaatagttttcaaatactggaagaatatttccttatttgtgtgtgtgtgtatgctagtcacaatgtgatgactagagacacaacacacttttatgttttatctttagtatagtttttctccatgactttctcgagtctagacaaggggtcagcaattcttttctgaaaagggccagatagtagatattttaggctttgcattccaggagcccaaactgaggatattatggaggaacttaacaactatttgaatgtgtttagtgcatgggctgttcataaataggcagtgagctgaactggtctgtgggccagagcttgccaacacctggtcatgacaatcaataaaccaataaaacaagctctgatttgtagtattttccaatttccatagcgtaaatgctcttaccatggccaatttcaaaataccaacaagacatcatcaaaacagatttgggaagagatgtgcagaagtatatcattatatagcctttctactgtacagatgtaaatgaccccaagaacattgataacagtagatataatggcacgattaagaaggggtgagttttgagaatgtattacttttgcttttaacataatttacttaacacaaattatgtaatttaatttttataatgactgtgtttaacttgcaaataacgggtttgcaaattgcctgaaaatttaacagtcagctcttgccaacagttacacgtcagctccggcacagcactgcgaaattagactccagttcttgctgtgcagagacacatgtgcatctggggagggatggagctgaaggtggccatcaagagaaaattgcttccggtcacattctcttctataaatccttctgttatttgcctaccacagtctggcatatacaggggctgttagtgtacaatttatgtggtgttgggcataagcataaggtcgctagaattttagcatgccaatcatttgtgtgtagtcgaagtatatctctttgtgagatatcgtagtagaagtgctcatagttttttttaaaatgcaaaacaaaggaattgtgatttatttaacaatcaagaagaaagtagaaccttgatttctgattcataatttacttagttggtttcatgtactttggccaatggtattgtattccaatagttaaccattttaattcagattaagagaaagtagggccaccctgcagctaagataacaggttgtgtttaaaggacaaataaaattaaataattagtctttagattcttttctttttggacacaaaacatcacagccaccatagcctccctttgttggtcatcatgcatgctggggacttaggctcatgccttggaagccctgtcttcccagctctctgctctcttctattcggctagagacacagagcttgctctctgcaatgatgcatcctggattatcattttcctcccgagctttcaccatcctggactatacccgtgagttctgataataccatctggacaacatcatggattttccatgtcagtttgatcacttcccctctttccttttcttagtacactttgcacagctttttcctcttccgtatgtccacatgctccttttcagcaactacagcgccattcttcacggctacttcttctgcctaggtagtactgtactgccttctagtaacttcgtaatgcaggttaaaaagctatgaaaaagtctttccatatgtcaccaaaatgcctaaggctttccctttaaattgggtatttctggcacctctggctccttatttaagacttctcttttaagttcacagtcacctttgagggcatgggcgtattgtcagaaagcatttttgaataaatttatgcatcactgcaccttatataaataaaatttgtatgtttctagaccttcagaaagtctagaaattgaaatccttgagcaggaggagataagttggccttttactcatgaaggaaatgaggtctcaatgtctggctttctgagaaacaagctccacgacactggcagagttcagcacctctatcttcattcattgcctttgataccagataccaataactgttggtatctggaaaagtcattggtagacttttgttctagtcattttagtcatcccataattgggcaaagaaaccagaaaccagcctattgatttaattcattctcaactttagcactgctgagggaattaagacgtagctttttacaaaatatatgtgacacttggaactttcttcatagcacaatatctaattctgtctacatttttctttatgagaagggaaaccctcaggacatagtgatatgctaggatgactgctctttcactctgtaaatacatttttaaagtgtactataatgtcattttgatggtttaatttctggaaggatttggctaattacatttttaggaatgtgctcagaccagttttagctgcctagtgttacttttaatagcagctgttgcttacttcttctcatttatattctctctcccctcccttcagagttattttgctgatttggggacctgaccttggtttaaattagtttgtctgtaacgctcctgagaatcatatgcaatattttaatggttaattactacattgtatcaacctgtcatagaaaagcaggctgtgaaactagaggaaaattgttcccttttcttgtgacagagaaatctatataaaagtgaaacagtggactacatttgtgttagagtgcctgtttcccatccatggtcaatactgaattggttccctaagtaacaaagactttttttttagtacacgctaaaatgaaaaaacaaatttataccacatagccagtggcaactcagagaaataaggagagtcaaacaaaggaataatttaggatagttactgtgtaggatagacatctcttttactgttgcttaattgacatgattgctaaggatggctgtgctgagcctgttggagaagagtggattattacaggtcagtggtgtcgcctagtggtggaaacaggaaaacaggtaagatgctacaactaagctttggttgtttattattgtcttcttgtattccttcaaaaggataacttgatgcttattgtattcatagcatggtgctagtcaataccttgaataatttgaattttagcaaatgaacataatagtagccaacactcattgaatgtctatcataccttttttgagtgtatataccttacatttgatttttattttctcattgaacctccatgactaccctttgaaataggtctgttattattttcatgttataaatgaactttagaagactcttctagaaaaggtggttcatgacagtgaagatttgtgtctatgttttgcccctcaacattttagattaacattcttttcatgataccatgatgtaatctagttttcagtttctctgcaaatgcgtatgccaggcgcacctgtggatgatgctccattgttctggcacttaacagtgcttgctttttatcccaaaccaaaagggaaacagtcatgttgaaccttcctgcccgtgaagcccaaacaatgaagctctcaacctacactatagtcattgacaccaccagctcagtctacagccaatctgaccagttgatgtgtccttgggacaccagggttgacaaggagggcttgaatgcatgtactcactttatccatccacttaatcacccattaacgtggtcatttgtcatcaaacatttattttatttttaaatccttttttatatgtatgaatttatgggttacaagtgcaattttgttacattcatagattgcatagtggtcatatcaggattttttgtttgtttgtttgttttgatggagtctcactctgtcaccaggctggagtgcagtggcacgatctcagctcactgcaacctctgcctccctggttcaagtgattctcctgccttagcctccagagtagctgggactataggtgcgcgcgaccacgtccagctaatttttgaatttttagtaaagacggggtttcaccatgttggccaggatggtctcgatttcttgacctcatgatccacccacctcagcctctgaaagtgctaggattacaggcgtgagccactgcgcccaaccctgggcttttaattcatcacccaaatgacatacattgtaccaattaagtaatttctcatcatgcagctccccctcccaatcccttcaataaaaaaattattgagtagctattatgtccctgaaatagaggttaaatattgcagtgcaatggtttctgtcttccctaagcttacggatgattggcaattataattggctctaatgggccactacctatacgaaagaagcacatagcctaatttgggaaggggaggtagatcagaaagtgctcccttgagaagatgatgttgaaactaaatgtaaaggacatgcagaagttggccacgtaaatgaggtttgttgtgaaggagggggtggtagaaggtgggtggcaaaggaaaaacattccaggcacagagaagaatatgaactaggagggaggagagagagcatggttattgatgttgagttaaaagcagcagtgaaatggacttacccctagtgtttgggtcccttctggattaagctctgggaaacctggtgggttgactcatgctgtacaaagacaggaaagaatgcaaatgggagaataatgagcaatgtacgacaggctgtggcaggcgtgcattgaggactgtgagggtgacaacagagactgggatgcctgcctttggctgatgggtggtggggggaccgtgtaatccagttaattagtgaagcacttgcctgattcttcctactcggtccatcagagatagagctggagtctttgtctcttgatccagagtaagccagcacggcaggatgaggatcttctgacagattatttcagagtgtgtaggagatggagaaggctgggtgatgagaggggagcaagaataatgtttgagtatcagaggatctggaaaataggctgagagcttcaaatgtagatcaagtttaaaatcccttgaaccattgggaggagccccagaggcacaaccggactcagattgggcaaaagagatgggaaggacatgtgcaaacccaaaaggcacttgttgggatatccccacacaatatcctaacgtgatacaatgtgaaatatgaggttacagaaaatgagcctcttaacttttgaaactttgaaaccaagtcaacagtcctttttgtttggtgacagagacaacacaagcatcacatacctttcatcaagttagaaatttaaaacaaagcaaagcaaaaaagctggaaggtgtttttgtttttgttttttgacacagagtttcgcttactctgttgcccaggctggagtgcagtggcatgatctcggctcactgcaacctctgcctcccaggttcaagtgattctcctgcctcagcctcccgagtagctgggattacaggcacctgccgccacaccaagctcatttttgtatttttagtagagacggggtttcaccatattggccaggctggtctcgaactcctgacctcaggtgatccacccgcctcagcctcccaaagtgaagggattacaggcgtgagccaccacacctggcctgtaagttctttctaatggagaaaatgacagacagacatcagtatgtgctcgattgttttataattttgttctgctacccagcttccagtgggacgagagctttagttaattctccctaattgtaaagggaatctccctctagctgcaaaacaagaattcctaaggccctttcctggtcccagctctgggttttctcagtctgtgaaaatgccatgaacatcacactggtccctcctctctccctgtgtctatcttgggtgtttctcaggattaaacatgaaatggatgctcaagagagagcattaatccatttttaccactctgctgtttgaatcttcaagtaaaagataaattctagttccccatatatgatattattgtgtataatttgtataattacctctttattatatcatggtgtgaaatactgagtagctgctgaccaccagggaatttgtgaagtgttgcaaattgctgacccttccttgacagaaagcaaagatcatagtacagggaggtcgaggccaggcattgtggctcatgcctataatcccagaactttgggagtccgaggtggaaggatcacttgagaccaggagttcgagaccatcctgggaacatagggagattcttatctctaccaaaagaaattttttttttttttaaattagccagacatggtggtgctagctactttggaggctggctgaggtgggaggatggcttgagcccaggagtttaaggctgcaggagctgtggtatgccattgcactccagcactccaccctgggcaacaaagcaagaccctgtctaagagagagagacagacacacgcgcgcgcgcacacacacacacacacacacacacacacacattgtatgaggtagtggttaaaggtatggaatctacttgggttggagtcttcgctctgacacataccggcttctgatcctccaccagttacttaacctcagtgtgttccgtctttgaaatggcatcatactagtaactacttccaaggattaccctgaggattaaatgggttaatatttgcaaaaagcttagagtggtgcctgaggccgggtgcggtggctcacgcctgtaatcccagcactttgggaggctaaggcaggcagatcacgaggtcaggagattgagaccatcctggctaacacggtgaaaccctgtctctactaaaaatacaaaaaaaaaaaaaaaaattagccgggcgtgttggtgggcacctgtagtcccagctactcaggaggctgaggcaggagaatggcgtgaacccgggaggcggagcttgcagtgagcagagatggcacccctgcactccagcctgggcgacagggcgaaactccgtctcaaaaaaaaaaaaaaaaagaatggtgcctgacacatggtaagcccctcataagtgttaaattaaataaagcaattatttgaaactgcctatccccaaaatgtttacagacagaaaaccttagagtctttctgcacggagtccagtaacaccataacagtgtatccgaaagcatttttcaagtgcaaactgaagaaacatccaaattgttacttgcttttatcctgatttctcttagcctagagtagtggtttttaaagtctagtttgcataggagtcatctggagggcttggtagaacacaaatttcccaggccccactctcccactcttacagtttctgactcagtaggtctgggttggggcctgagaatttatatttctagtaagttctctggtgatgctgatgccgctggttcagagaccgcactttgaaccactggtttagagagagttgattcaggtttcaacttttggatgcatgcatatacacagatactgaggaagggagctccccttcattgagtacctactatgttcccagtacagtggtaggtgctttacatgaattatcttctaaaattctgacacccttctaatgacataggtgattatatctattttataggtgatgaagactcagagagagaaaatactctacctgaaaccagaaagtggcattccagtccagggacatctgattcaaaagtcctgttcttacttcattattctatgttaggtcacagaagaatcaattaattgttaccattgatgattacctagtccatagtagtctggaactgcctggacaaattagccagctgtggacacaatttagtagttctggtgtcagaaacaggaaagcccgtgtttctttagctactgctgtacaatagcacaccagaatttttatgttttattttttattttgttttgagacggagtctttcgctgtcacacaggctccagtgcagtgatactatcatggcgcactgcagccttgacctcccaggctcagacgatcttcccacctcaaccttctgagtagcagctaattaaaaaaaaattatttgtagggatgaggtctccctatgttgcccacgctgctgttgaactcctgacctcaagtgatcctcccacttcagcctctcaaactgctgggattacgagtgtgagccaccgtgcgcagccacaccacaacttactaaaacaatgtagtattctcatgattctgctggtcttgcctgagctgactcgtggtaggagtcgggctaggacaggctaggactggctgatgcagggtggcctcacttgcatgcggtggggggcctcagctgggaaggctggaacaaatgcgggggcagctgggcctctctccccatgtggtctttcatcccaggcttcttatgtgggaacagaaaccttcgaagatgtcagaagtgagaactttgggggctgagactcagatgtcccacaagatcatgccacattctatctgttaaaggaagtcatggagccagtcaaagagtgaggaaggagactggcctcccaaagtgctggaattacaggcgtgagccactgtatccagcccattttattaaatgaagacagtgtgaggaatactgcaaggaacagggtggcatcctggaagttaccaccttaagcctgaaaggaagaggaagagagaagttttcaaaaaacttggaggaaatggttgaaaagaaaggatcacctctagagggccttttggtcaaggaatggccaagttcatgctgaccccaaccaaaaggaaatgtaggaacaagcacgctgcccccactctctttctccttcccagcacccactggggctttctgttggctgaaactaacaggaagtcagcagccagaagaaactcaatgctgtccataaagtcgctgtgctgtcacagagaacagggtggaggaaggtaaagcctggctctggagggcacatggaagacaccttgcagagaaacattctgttagaaggttatgttgaagcaccaagatgatagctcactcttcccaaagtgatatgggaccatgacacattttgaaagaagtagatgaaatctcagtacactgcttttaaacctctcaccctcttagagggaatgaaaggactggaatttggaaatagaaaagagaagaaattttgaaacacatgggttccctgtgaggaagggggcgggggcatcaatcggtcaaccgaagcctgggcaatagtttggaaagcccgccaaagagaggcccgtgtgccccgtgcagtttgggggacacagtgggcatgtacctcacttgtggaaatctaaagtgaaaaaaatgtgctgactagctggcgtcacagtggggtgtagaataggtggctgtcctgagcagcctgcaccctggaaaaattgtcagactagtagacaggctgatctgggccatgtgtgagagaggcagtgtgcatttttcttagatctcatccaagaggcctgacttagagtgaacacaatgcagttctcggcggagagatgtgagaggcagagccagcttcccaagcgctaggaaatgaggaatagaaatgcattccagttgtctagggccccaggggagacggaagataggagctctgacagatccacaggtgacccatgagacaaagtgtcagtataaacacctgcgaagaacagacagtctaatatttacagactccggaaagtaacagcgaagtgctaagttttctacccctcttacctcatcttgcttccttgtgcaccaacccaagtgggtcaggaatctacagctaggaagataaatgagggatagaaggaacaggtggggaaagaaggaaagggagagagaccacatccccttccaccagcagccagcctagctggggcaggggagaggctgaaccctctctgagattgcagttttgactacgacacggggttgaacattttgattatgaaattgagactcctattgtgaactgaaatgcctggggagttatgttaactaagagtttctagaaaaaatcatggggattggctgagtttttacctaggatcagggcaagaattagccccaagcaggaccctgcaaatgcaacttacaagtactgcttgttctgcttatctgtatatgtcctatagagaaaaataggttactgcttcctccaagataaggaaggtggtcttgtcccttttcacattccacacattcttccatgctaggtatttgcgtctttgtaaatgcttctgttagaaggtttagttgaagcaccaaggcaatgtatcaccacccttcccaaagtggtgtgtgagaccatgatatcacaacattttcaaagaagtagatgaaatctcattacgctgcttttacatctctcaccatcttagaaggcatttctccttgaaaaccttcttgattttgactatctgaggctgtcagaagttagatggagaggcattgagggaaagagcgaacaatgtgggtttgcttatgttcctatcacctacagatattggatatctctggaactgaaacattttggttgtgtgaaccaaaatcaagtgatttaatagaaaatcacttgacaacaaagtgtgtcgatgtcagcatgaatattaaaaaccaatatgtccagggctgagttttgtggcatattttaagcatgttatacaaagggggaaaacaacctttactctttgaaagagcaagaacacactcttagaactttccaattattagtactttttttttgtagacaaatttaaagtgcatgaagctttctctctggtatttaattgagattaatttgtaagttcgaacttttgatactcatccattgtttgattttagttttggatatttgcaaactttctcccattttatattcatgtatgtgtcaggcaccaagatggtacatgaatttgtttttgttgctaaagaagcaagtaaacatgttaacatttaatcttccagtaatggaattggaaacaaaaatctcagcaacttacaatgctgttcagagatatttttccgctgcctgttgtgagaagttagggtatgtaaaataaatgatgtatggagctgtaggaatgcgacttttccagactaccttatgtctaaggaacattaaacatagggttctcgtttagcaaataaataaccattcatttcaatggctgcatagtctggactttcgtgcatatttttgcaaagataaggagaggccattagggatttaatataaaataaatcgccaaggggtcttcttgtagtcctagtctttctgccacatggtgtgttactaatgtgcataaatgggcttaaatgaatttgttatctgtattacatttgcagtatgtatatatttatatattattttttaattgtgtttaaaaataaaacattaaatacatcattttggagagttgagaacgtaaaatacgtaaatcaatcagcttcaattagtattaaaaatgtcagtatgttagatttgcctgtgggtgtatttaccccacagagtttaatatattttagttttgttgtctacgaggtagccatatggttaatttgtcaccttataagaatacattgctacaatccaagctccattaatgacataacgcttttgtgtcattgaaagagtccctgtcttagttgttttattgatgccctaggtcagattctgaacattgtctgtacgcagcactgatggctttgactaaccaaggagctttgctgctttacttccttctcaagttactcttaccacatttaccattatagaaaatagcagagaatgctctgtattatatgaaactatttaatattacttattattatatccacaaggtagtcgctaccagagtttacctttaaacttttttttaacaataagtggaaattaataaattataacctggtaagatttaagagataggtatgttcgtttttagattagattccagaatgattccaaatggttttgataatatatttgaaaaagagttgctcatttcaaaaaaaaggcccagtagaaatagctcttattaaagaaatcatttttaaaaattagagatgccaattaattttctattacttttcattaataatctgctaagggatgttgaattgttgtatccatgccaaattttctagatctattttgcattccaaacatagactatggtataaatatattcttctaatattctttactgctaatcagtttcacttgaggctatccttttcaaagagagaaaaaagtttttaaattgcatgcagtgaatattttcttttcaagcagtcctaatgcaatactgtcatgtgtagaaacatcattcaattaaaatatttgttagataactactagaccttggttaatagcttttattcatatttagttcctacacaaatgaagtcattgttttataatcaaaaaacaaggagagggcagttggtgagcatgtgtgtgtaacctttgcgtttgactggtaaggaaaacactgcttagttaggcttctctaaatttgaccaatttatcatttggaggttgttattcttgcttttatcactgctttactgaagatgtttatgggacatgggctttaacagcaggaggtgttttttgaaaaatgttaagtataaaatatatcttgtaatttattcagatgttattcagtgtttgtttccactctatgacagcgtatgcacacaattcaacattttatgtgtaatcttcaatagatgaaaattgcccttgcttctctatccatccaggtgaacaggggtgtgaggctcgctgtagaggtgaattctatatccagaggagtagggcgcaatgtcttccttttctgaaggaaattacaaaatcaaaaaatccaaaagttatttaacctcacagagattagcaatccattgtcaaaacaccaaacagcactttgggctgacaattaaaggtgaaaaagaagagttggaaaattaatctggatcttttaaatttcaaattgttattattttattgcacataaataacaattttaaaaacctcatttacattttgctttgctgtttccaaataaattctcaatcatgtctctaatagaaagctagagggctgattaaaaaaggatgaattcatgtcctttgtagggatgtggatgaagctggaaaccatcattctgagcaaagtatcgcaaggacaaaaaaccaaacaccgcatgttctcactcataggtgggaattgaacaatgagaacacttggacacaggaaggggaacatcacacacgggggcctgtcgcggggtgggggtatgggggagggatagcattaggagaaatacctaatgtaaatgacgagttaatgggtgcagcacaccaacatggcacatgtatacatgtgtaacaaacctgcacgttgtgcacatgtaccctagaacttaaagtataattaaaaaaaaagaaagagagagggctgagattttcatctggggtctttggtctcttggccactgctgctgcccattccagataggtatttgccactaggggacatttctagaaaacaggcatttgagcagcgggtctcacagcctctttttctatcacctatgggtaggtggtctaagcctcttctgtggtcactaaactcttcctaataaaaaatattttgttcctgtcatatttgagtgtcaataaactataaaccataccaaacaagtcagtattaactgcaatacaattgctactaaacaaaacagagttttatggtatctataaagatatctacagtgatcacgcagttcttttgtttgccttcttgttggagcagaaattttattgccctgacaacccaggcttaatatactcatggatcaaagttgtttcatgttctgataaccacatgctctttctctggacccaacatgatgtaacagggcactttttatgtttaacttaggacaaatgatcctgcctctttcccccaccatgcacacatcctgaacatcatattcttccttgttcaatattaaattaaggctctgtagtaataatgtgtatgctcagtgtggcaaaaataaattttacatattgatcaagatttggcagtacacctatggattgcacatggtacactcattggaaaatcactgatttttttttttttttttttgagacagagtttcactcttgttttccaggctggagtacagtggtgccattttggcccactgcaacctccacctcctgggttcaagcaattctcctgcctcagcctttggagtagctgggattacaggcatgtgccaccacacccgactaatttttgtatttttagtagagatgggatttcaccatgttggccaggctggtctcaaactcctgacctcaggcgattcacccacctcggcctcccaaagtgctgggattacaggcgtgagccaccgcgtttggccaaaaatcactgatcttaaattctgatcacattgtcccacataagaagcctgccagggtgatctggactggcttaagtgtaattctccaaaaagttcttttccaaagttatcagtaggcagggcagtaacttgtgtcccttttcctcaaagcctcctctcctgatcttggtccttggtatcttactatttccaggatgcagaagagtcatgggaagtcaaatccaataagagattctggaccaactcacaccgtttagtataggacccttctcctcttagatctgcagcctggttgtgtgcttaaggacgctctaataatagagaagatgggggaggcttgtggtttatgtggtcatgtaaggtgctctggtgtaggcctctgagaatatgccactgtttaatttttagcatttttttttcatggcaatcacttcaaaaatgactttagaaatatttgattgttcatccatgttcatagcagcactatacacagtagccaaggaagcaactcaagtgtccattcacagatgaacggttaaacaaaatgttgtataacataccatgggagagtactgagccttaaataggaaggaaattctgacacgcgctagaacatggatgaaccttgaggacttgaggctaagtgaagtaagccagatacagaaaggcaaatacagtatgatttcacttattgaggtacctaaagtagtcaaattcataaagacaggaaccagtatggtagttgccaggtgctgggtgaagaaagaaatggacagatgttatttaatggatattgagtttcattttacaagatgaaaacattctaaacattggtggcccagcaatgtgaatatacttaatacttctgaactagatacctacaaatggttaagatggtaaattttatgttttatgtttttttaactacaattaagaataagaaatttaaaaaatagggttgttatattgaaactcatgaaattcagttccatgttgctttaatcatgggagaggggagaaaaggaattcccttctgatggtgcttctcatcctatgtgtttatcacatgggtaaaatctgtaaagacaaacagggcaagatttgaactaaaaagtgagctccaacaaaaagcgcagctaaagagtgtctgctcttaggaaggaggagggtggttgccaggcagcacccattcctactccccttcagaccctgcctgtatgtttatgaatatatcaggacttctgtttaaaacaccggatggatacatcaaccccttcccctctctaccattccagaaacatagcaccagaactgctgctgctttttagcgggcaatggctaggccccttgtgatcctgtgtacttggttgcggggggcagggtggggggcggttcaagatctatgaaaaagacaagttaaaaaacccttgacatttgcaaaggaaaccacatttcacctatataaactgtatggtagaactattaaacaaaggaaaaagacggcttggtgaatgtaacttctaaattttcagacttttgggaaacaatttttaaaataataactatctagttttctttctcttgaataacaataaataagcatataattatattatctggtaaaatatgcatatgttaccaagaaaagaaaactaaccaaacaaacaaacaaacaaaaacagctgaactcacccttgactatcatcacctcaatctcaaaccagaagtaattgccaatttggtatatcccttttcagttctttttctgtgcatttttatatatttatacctatagaaatattttttttcaattatatagaacgtaaaagagaaactataactaatgaaatacattctttctgacctgataattcctattactatttttaaactaaaaataatacatatataaagttagaaaattttaacagtacacagtgatcaaaatgtaaagtaaacccttttttctccccaattcctctcccagtagtaacactgttaaatgcttgtgtgtgtgtgtatgtgtgagtgtgtgatttcattttggaaacaatctcagtaaatgggtgtattggtcagggttcttcagagagacagagccaacagcgtctagattaattttgatctgaaagctggcaggatcaagatccaagaagaatgaatgtttcagtttgcatcctaaggccagaaaagactgaagttctgcaggagaggctccctcttcctcagccttcttgttctatttgagtcttcagttgattggatggggtctacccacacgggggaaagtggtcagctttacccggtctgctaattccagtgttaatctcatgcagaaacaccatcagagacatacctagaatgtaatgtttggccaaatgtccggacatcccatgtggcagtcaagttgacacatacaaaattaactatgacaattaggaaatgcataaatgccagctgtaaggaggcattctttcagtctacccattttatagtaaaacaggttgtgtgagtagcataaagtgcatgccagacacttgtgacaccaatcaggggaagaagtggtgggggccgtgccaaaatgaggatcttgatgattcaagttcttttacagaatcctctcagatttctgctttctcaccacgcatgtttctttgcctatccttcctggggcatgagggcctcaggaggagaagcatgtgtgcttctcctgtgccctggggtaatgatcgtagcgaggctttattttatcagcccttgtcatttaatgatattgtcattgaaccagtccattgcgtggtcccttctacagttcctcttcttgcttatttaaaaaattcctttggagctagcaagatttggatcttaggttgctaatagaagagtgctgtgcgttcttaagcaatttacctggcaaaattttatgagtgatcatatatcttttgtaaagaaaagcattttatttacccaaattatacacaaacttgatttaaacattagagcctgggttaaactttgaaatgaggcacctgtgaagtgagtgattggaacagtaaattagttcccttgatttatcagattctgcagttgttttacggtagtcttatagtcccaataccaatatctatctgtttgagtcttattctctcagaaattttctcaatatgaaaagtcaatgtccaggcagaagtacttcaatattaaatggtttctggccatttgttaaaaaagttatgtgtgatttttatgtacacctggggctttgaattaatgggatgtactaaccaccaggtatagaaggtggactacatgattcattaaaagtaccgtatttggatcctgtcaataaaattctgtatttttacggtgaacaaaatatttgcatttatctccccttccttcctctgcccctttctgtgccccctctttccccttttaggctcgtgtacaagaaaccataaggcagagataacatgatcacatcacttttgggagaacatgctcccccccaggggctattagtaactcaaaatcaggttgaatcacaaaccaagacaagttgaattgtgaactgtctctgggctggggctgtttcaagatccaatggggtctgctaagatgggattcacagaatgacattggagggatcagaaataagacccctctcaaaggcaggggtctgggtctagtgcctgacttctctcaatgtttgtctgggtctccgcagtttggtgaccatagttatggtgttttgacggtgtgatgtctttgaagcccagtgttactgatggtagcattatctagaaggcagatctgctctttggacacatgtgtgcccgagatactgatagggtatgatactgagacctagctagagtaatagttcatgcatattcattctggagattggccaaagcttcctctcagcatccgacagctggaacccagtcaccctggccagcgtcattcaattaggcccccattcccaggtaaggcttctctgttgtctctgaccatatgttagagcagtgggagtccagtaacttctcttgccttccttcgtggcaggcagaagagcattggagggtattttttccttctagtaggtctacatcaacagactgataattcaagtaataataattataataattggtaatacatatcaaattctgagtatgttctggacactttgcttaaaacttaatgtgatttgtcctatttaattcttagggccactccatgaggtagttacttggtatttgcattcccattatacatatatagcagatgactgaggcctggagaaggtatgtaactttgctcgaggtcggacagctactaaatggtgaagaaactaagctttctttccagggattccccttccaggtgctgcactctttctttttctttctttcttttcttttctttttttttttttttttgagacagagtctctctttgtcgccaggctggagtgcagtggtgcgatctgggctcactgcaacctctgcctccgagattcaagcgattctcttgcctcagcctcccgagtagctgggactacaggcgccggccactacgcccagctaatttttgtatttttagtagagacagggtttcactgtgttggccaggatgacctcgatctcttaacctcgtgatccccctgcctcagactcccaaagtgctgggattagaggcgtgagcgaccgcgctcgctcggaggccgcgctctttgccaccaccttactgcctccagatacctcctgaggctgagccccagggcctgagtctgaaatcctggttccgccatttgccatatcagcatatttatttattttctctgaagcaccgtatctcgttggtgaaaaagatacttaaaaacctagttcataggattgtttttaagatttagtgtaggtaaaattctcagtagttcctgatatatattaagtgctcaataaatagtaactaggcttattaaagtaggccttattaaaacaataaaaaaaacctgcttggcttcagacaaagcaaagcattgttaagaaacaaagggatatctgtggttgcccaagcccttactgggtaagttcataatgtctttatagcccacgcctttttgaaaagcaggccggaagaaatatcagatttgctgaaatgctatagaccatgttgtatggaacaaagaactatgaaatgggaattaaaagactgggattctagacctagatttgtaatgaactagctgggtgaacataagataattgtgtaacctctctgagccttttttttttctttttccttttttcaagaacaataatgggcagggtgtaggaacagggctgaaaattagatgtgtgtgacctcttgagtaaaaacttctatgattctaagtctaagccaattcaaactggtgatatgtagttgagcaaatgatgcccagagttcctgctcccttcacagttatttctggtttgaatggaacctggtggaaggtaagagagtcacccttctaagccagctgcagggtctctcagtacagtatctgttgccatcagtggctctaatgagatggcccctagatagccataatggaccttagcttagcttcattcattaacttcattcactaacatcgatttcattctgttaatcattgaggcaaatgttcgtcaatcctccacccctttacagaacacatttacaacttttgcttgtaaacctcctcttgggttaataacgatcatgtttattgttcattattatttattgttcattgtttgctatgtgcagaattatttacattatttacttaactctttgtatacatatctctcagtgtttgaaacggtgtccctttattctactaatttgccacttcctccagtataagaagccacagtcaggaagctccttctgcactctgctttgcctgtatattataattgcagaagatgtaccaaaccccacatggcataatagacttggatttggattccttatactggcactttaactttggacaaattctttagccctaagcatcagttttgttgccagtaaaatggactagtaagccccccctttcagggacaccaaggacattagagaaaatgtaattaaaatgaagtaccttgctagcatatcatgaatactgtactagcatttgctagatagctagcataatattgcctgaatctagagaaacaaatatgtttacattaaaagaccaaaataaaaataaagttgagaaaatatttgctattattggcaaatagtaacatctttatgaagaatctttacaaattaataagaacatagctaaatctttcatttaaaaaagaacaaaagacttaaatagctaataaatctgtgaaaaaatatttatctttaagtagtggacaaaatgtacattaaaaccataatatgttagttttgctgatagaattatttattttttgaataatgcagatgagaatgttgcatcctgatgacccggcctatttctctctgcctaacaatatcacctggggggcatgtggagaagcatcctgcagccctctcattcctctcgttctgtcctctgtgagactttagtcctgacctgcctcagtacctgtattagtccattctcacgctgctaataaggacatacccgagattgggtagtttataaaagaaagaggtttaatggactcacagttccacatggctggggaggcctcacaatcatggtggaaggtgaaggaggagcatagtcacatcttacatggtgacaggcaagagggcatgtgcagggaactcccctttataaaaccatcagagacttatttactatcacgagaacagcatgggaaagagccacccccatgattcaattacctcccaccaggcccctcccaccacacatgggaaatatagcagctataattcaaaatgagatttgggtggggatacagccaaaccatatcagtaccccacttatacactgctcccaccctggcctcgcacaaaggcacaggaaacactgatgttgtctactttctcagaccctccttgggagcatgcccctgcatgctcaaatctgtctgaagtgttcccttccctccctccttctccccagcccctgccctttctcaggtcctaccagcatctctcccaaggcctcaccagcctctcagctttcttgctttcctttcggattctttccccctcccttagtcaggtgcttctgaatctagtcgggggacagggtagtctggctctttatctattcttccaaatccattgtactccttgagtcctttctctgctatgcagttgtatcacctcagccatgatcagtggatgccccgtggtcttcctttgatgagataaaactcaggaagtcagtattattggtacagtattattgtaccaataataattggtgcagtattattgtaccaatgataattggtgcagtattattgtaccaatgataattggtgcagtattattgtaccaatgataattggtgcagtattattgtaccaatgataattggtgcagtattattgtaccaatgataattggtgcagtattattgtaccaatgataattggtgcagtattattgtaccaatgataattggtgcagtattattgtaccaatgataattggtgcagtattattgtaccaatgataattggtgcagtattattgtaccaatgataattggtgcagtattattgtaccaatgataattggtgcagtattattgtaccaatgataattggtgcagtattattgtaccaatgataattggtgcagtattattgtaccaatgataattggtgcagtatatggtacagtagtattaatacagtatattacagtatgtagtcaccattctgtgcattaggtccacagaacttactcatcacatagctgaaagtttgtgccctttgaccaacatctccccattaactgcaatccctcaacctctggcagtcactgttctgctctctgctgttacgagtttgactattttagatttcacgtataagtgagatcatgcagtatttatctaaaagaatcagttttaaacttgaattccaaatagtagtaaaatgtgcttttcttgacttcaaaaagtttggtcattaactgtcttccattgtatttggaagcctcattggatttccaatcatgttgtttcttgagtgcttattgaatatgatgacactccaaataaactgaatggaattaattcaagaataaaacatcatttcttgttgtgtgtctcaatctgatatttgccagatgggaaacccagcatcattctcacagcaggtctcatttatggcaaacacacatccacatccagtgaatatgagaaagcacaacctttctccttcttatttttataagatctattgtggacttttttcctttgcttttcctgcaccgatcctaatttaattaaatgcagctttcctgggagtcagggtgggaagtgggttactgctggtgggtacaaaacaaatggcaactacatcaaatggtacctagagagagggagagtagcagttttattgtggcctgcttcttagatttgagaatacagatgtcagaagtgactgattatatgttcttatgttttactggcatgaaaattccccattaactagttaactagaggtcactgtggctagaagtgctgtagttttctataattgacatatcactaaataatctattgattaattcattattgcaacaaactgggccatgtgctagcatgggaattgttgggacacaaagacatggcctctttcctcaagctgctctcagaaggtagcctagcttttagaaaaccgccttctagtaaacctgcatgcttacttggagtatgaacaaagtcagcctggagggttcagaggaagcttcatggagaaaaagagcattcaaacccttggaacaaggactctttatcagttcctgcattttattggcccatctggaaattcatgttgcaacttcccaaggcttaattaacttagaagtggccccacccctactacctttgctttttgacccttgttcatgataaagagggggttgcacatttatctgaggatcttcttgcatcattcttagaaccagggccatgagctcctctaagaagaatcccctgcccagcccctccatatctgatgcatcattagggaccaccaagatgttaatgaagattcgtagacaataattcctggttgtcaatcacccaggactttcaggatgtgagaggagagaggagaggcccaggcaggagaatgttaatcaatggtgaagcagaaaactctcctcactgaccatagccctgtctcccagccataagtgtgtggggaaaccttgcggggatgcttggtggtatctaattgaagagttcctaccttgctccttggtcgactcctaatggagggccttctagggaagctgcatgtgccagtagtcgtctctgttttgaatattgctgctgatccaccaagtgctatttgcagaggagaggcctccacattggagccccctagagtaacagcttttatttggaaagaaggtgtgattcctggatacagtgagaagaccactggatgagagatttacagtctgggagtcgagtcttggctccatgatctactagtgccataaacttcagcaagtcaaaacctcttcaagccccatttcttcttttgtaaaatgggaataatagtgattgctatggttacatcaaagagtcatgatgtttgaaaggtcagtggatatgaagcccatcgtcacaggtaaaacactatcaaagcaggaggaattatctggaaggtgaagtttcttgatttttatattggctcaagatggcaatataaatacttgaaggggcttgtcttgaagctgtgcatgcaaagtacttttcacaaaaatgtaaacatatctattgtccatctgaaaatatgagggtggaggctgaagaaaattatgaggaaatacctcaagctcctactaggccctccctcccacgagtcttccctgggagagaaggatccttgagagtttgtatgatacttgctcttcctaacaaggcacagccaggatagagctaccttaactccatcttgaagcttatatacataccctttcctgagattcacattaataaaacagagacacagattgggacctgactcatttaattccatgaaccagacctgttttgagtgctaaccaggtgtcaagaattaattagtttctctctacttgcaaatatgagtctctctctcttcttataagatttgtgatctctgccatctccagtcaccagatgtggccccactcaggttgtcttcattgtcaaattggaatagtgatgataatgaacaaatttcaaatgtttaagttgtgtcaagcactgctttaagtgctctttgtgcatttattcaatacttgccacacactgtcattgttgtcaacacccccattttacagatgagcaggattgagcttttccccaagggcacatggctggtgaatagagacgcctttcaatccaggaactctggctccaaatgcatgcctgggaccactgtgctacagtgcaccttaagaagtttacaaagaggaaagtagtggtttgtgagtttaatgtccagtatatataataactatcaactgaattcacaatcatttacttgtggtaactctagccacggtaagagatgtttctttcgactagaatatatctgtttggtgagttaacatctgatggttgcttgatggtgttttgactcttatgtcttcagtaaaactagggaaattattacctaggaaatgccatgtctttaggagacacaaatctttcaaagaaataggtcctgtgagttataaggctctcatagtctattgacaaatattagaaaaccaggtgagggcacaaagaactttagttgctggtaatggcttcagaagtcagggactcttgagccgaatcttaaaggatggagaagctaggtggaagaaagggggaaaaggcatcctagacagggaatgttccgaggccatgtgtgggaaggaacgcttggtgaccatggagatgtgggaagctgcggcagcacagacagggccggaagctgcggtcacaggagaggaagtcgggaggagctgggctctaaggccttcggcactgtgcaactagacggggctttctcctgtgggcagtgggaggcgggattggagaggactgtctagtgaccatgaaagcatcgtggaggccattgctattaacaggccaggttgaagctgctgcaggactggagcaaagcagtgtctttggctatggagacaaagggatgagcatgtgcgatgtgtgcaattttctaccttaaaaaaataaatttataagtggaaaagtgaactactgtatgtagaaaaaggctaacaaacatggcaaaggatcacttttttttaaattttactttacgttctgggatacatgtgcagaatgtgtaggtttgttacacaggtatacgtgtgccatagtggtttgctgcacctatcaacccatcatctaggttttaagtcccacatgcattaggtatttgtcctaatgctctccctcccctgttctcccaccccccgaatcacttattttaaaagtcagcaataaaaataaattgaaactaaatcaaataaattgatactatagagaacaaaataataacaacgtaatatagtagtaaaagaaaataataataataaagagaataaaagccactttggtgataaaagagtaagaaaagttgtaacaaagaatcaaagttgatatagtatgccaagacactgtaagaaaaagtaatttacaaggacagattttgaaaaaacttaattttcagcaagtttaaaaaattgatagggcagataaaacatgtgagttcctaattggaattctcaaatgtagcaaattctatggatcttcattagaaaggggagatgcagaggacactgaaggcagggagcatctcaggtcttgctcctgacaatcacgaaggcccaggagtggtcccctccacccatgaggcgtaatcagtcatccttctggcttcagcagtcttgcatgcatgtaccacaaggagccactgggtttctcatttgcatggctacattggggaccatgctgttcagtgcaatcagtaatatagggagaggagcagggaggtgaaagaaagagaagataatgagttggattttgaacctcttgagctttaaatatctaatgttcatctaaagcaatatagcccataggcagcatctattggaaattaataaaaataagggtctaggcattcaggttagtggtggggatggaagaaaagacttgagagtcgttgaaattcttgtggggaagtccaaagcaacagagcagagagaggattggtaagcgatgtgttggagaaaagataaaagtcgtggaagcaaaggctagaagctaatatgtgtcaagaggagagccagagatggccagaagctagcatccataataggagaattcaactcatgacactggtttccttgatttaaggatctcagacatgcgttgggtcctgctgttggttgtggctcacagagatggggacgatgacagctcagagttctttgtatcttggttccttttgaccagtgtgagcttaaatctaatatttctttgaatccctaatgttgatatcactcagagttcttatattctctcctatgagcatcagttcaaagataacattatttattggactatccatgaacacaaagagggacagaagttcagagacattagtgaaagcacctgagctgtctgaatcctctccaaacctggtaaatgattcctaaaagatgagggaattcaaattctggcttctgctgagaattgaatatttctcaaaccgcctgatgcacagccccagctgagacctaatgcaagtattttgcttaagagaacccacaaatgcgaggtgcttctaacaatatatgtcaagcagtgtgtagctgatggtaggagttagatttatgcatattgtggttgtccatttccagctgcttttgtgaagtcaaactttttttatgttaacagatgacattattatcacatttactggagaataatgagatatggtggtgatacatcattggcagctcatagtgccatttgaaaacatgcttgtttttaagtctgaaataatgggtcaaagagagagaggcacactttggcatgtacactcacacacacacacacacacacagagctcttaacaactggtcctgagtagctctttgtaaattctttattgccaggagtgaaccctaaagtggctcacaagagtgccctatttctttcaattaactacaaggacaaacacatctcaaagttgagataagtgaccagtatgatttgccaaaattctaaagcgcactcaccatgaaatggataaaggttacctttggggatttgcactgcatgaattctgtgaaaagcttgttggatattgtgatagagatagagaaatgaagtatattatataagatactatgaggttccctgcctttgcttcacatcccaggcttacaaacgtgccccataaacattccctctgtggctcttgcatttcatatatttatctaaactcttataatcaaattacacttttagtatttgctgtctcatgtgatgatgaatctcatatgtgtcccttctttgcatgaagtaagatagtcaacttattcaaaactttacatcattctagatttaagagacaaggaagagcttctcaggcagaaggaataatgtatgcctgacatgttcaaggaattacaagttagattttgtttaggtgcatgggaggggttgatggtgatgacagataaggctggagggatggggagaggctgtggctgtatacagcctcagtacaaggctaagcattttaactttatactggaaaaaaaatcaaacaaaggggagggataaaggacttagtcatctttgcactggaaaacaaaatatgtaattaaattcccatagctgcatgtaacattgaattcttccaggttaaaaaaaaaagttaatcctgtgatattaatggaatgacattttgaggtcttgagaatgggcacaaaagtgggaaatgaatttcagtatgggcaaagacactgaggatgatgttgattagataattcactccgtaatgatcatgctgtgtgctagtaagtataaccctggaaagatcttgagatgcttcccagcctgttcacagatcccctgggccagaacactccttaggaaaaacagtcagctacatattaggcagcaacacgaagggtctttgaacaaaatgagtaatgttattctacagtgtagaaaggtcacagtacagatctgggaactaaatattaaaaatgagtgtggctggatatatggagaatgttgggcccagaaggaaccgtagagatcagatattacaacagctttgttttgagggttagaaatatgaaatgatttggttatgaacgcacagtttaggcagcagggccagaatcctgaccctctgccccgtggttatctcctccccagcttggctgcctcatgtcatcacagtattccattttgtttgttgcatgtcttgtgaagccatcaagattttctcgtctgttttcctctcattggtaatgctcactttgtgacttcatttcaaatctgtaatcccgttcaaataaatatccacaacaggatctgttttcctgcccatcctttaaggaacacatcaattcattttctaatgtccttccctcacaagcgggaccaggcacagggcgaggctcatcgatgacccaagatggcggccgggcatttctcccagggatctgtgaaagtggaggacaaatatggagggacggaggtgagcccgggtagaaaatccagactccgtgaggataaatccaagtgagccagtcagacaatacgaggcaagaaatagaaaatcggtagtggattccgggaggacagtgagtaggaaggatagaaacgagtagaggaacttaaggccatcaaaaatttctgagtagaaattgagtgctttataaagcacttacctctgtgcttccttttgtgcttcctgtgtgtgtggatatttaaaggggctggaaatgtgcaaaaacatgtcactacttagacattatattgtcatcttgctgtttctagtgatgttaattatctccatttcagcagatgtgtggcctcagatggtaaagtcagcagcctttcttatttctcacctggaaatacatacgaccatttgaggagacaaatggcaaggtgtcagcataccctgaacttgagttgagagctacacacaatattattggtttccgagcatcacaaacaccctctctgtttcttcactgggcacagaattttaatacttatttcagtgggctgttggcaggaacaaatgaagcaatctacataaagtcactagtgcagtgcctgacacacaccattctcttgaggtcccctctagagatcccacaggtcatatgacttcttggggagcagtggctcacacctgtaatcccagcactttgggaggctgaggcaggtgggtcacctgaggtcaggagttcaagaccagcctggccaatatggtgaaaccccatctctactaaaaatacaaaaattagctgggcgtgctggtgcatgcctgtaatcccagctacttgggaggctgaggcaggagaattgctggaacatgggaggcggaggttgcagtgagctgtaattgtgccattgcactcgaacctgggcgacagagtggaactctgtttccaaaaaacaaacaaacaaaaaaaggcatagtcagatacaactgatgttaatcaagtgtctgctttgtggttcagtgcctttctgtttaatcaccacaatacctactatgtggactgttttgggcactttaaaagaaacctaaggaaaatgacacgtaacatgggggaggctagaagagatcttaaagattgtctaattcatagacaccaatctaagacccaggacatttgcagagggtacacagctagcgaatagcaggtatatggttaaaggccagcacttctggcttctggtctattcttcgttctaccatgtaactcacccctgccattgagatgtctgtagtctttctttgctgcactgagtactcagaaagtgccgtcgatggtgatccagccctgtgtcactgaggagactcacagcggactagctcttcacttatttatcttggtgttcattgaaacactaagtatatgtgttgtaattccttaggacatagaacagtattatccaagaaactctgcgcttataactccaaaattttatttttattagcaaagtatttacatggaacttaacatatggctgggactctttgaaggattttacaaaaattaactcatttaatttttagaagaactctgtaaagaagatgctgtagttgtcttcatgtttcagataaacaaagtgtggcacagagagaataactttcccaaggctgtaaaaatatgaagaagcagaatctggccctagcgttcatggtcttaactactccactgacctgcctctcagaaattatcaaaaatgctgactgttcctccccagaaagcacattctttcattcattcattctttccctttctgagagttgtgtcacttctcttccaagtggcctgtagaccatttaggctttcccaatgctttcttttttttctttttttgagatggagtctcgctttgtcacccaggctggagtgcagtggcaccatcttggctcactgcaagctccacctcccgggttcatgccattctcctgcctcagcctccccagtagctgggactacaggtgcccaccaccacgctgggctaattttttgtatttttagtagagatggggtttcaccgtgttagccaggatggtctcaatctcctgacctcatgatccacctgcttcggcctcccaaagtgctgggattacaggcgtgagccaccgcgcccggccaggctttcccaatgctttctatgtctctgattaccttgcctacctgtattctgactccaacatctccattcattttgctgtacacgttggttataggaaattagagtccagcaggatgaaaggtgaaataccaagacattcaccgttaactcattcaccaacactatatgctatgtgctaggtacgaggaacataaggaactaaaatacacataattcttatcctcttggagctttcagtttagtcaggaagcaagacattaaacaagtaatcatgcatataaatgtagatttcaaactaatttaagtgctatgaagaaaatgattggatgctgttataagaaaatgtatataacctattttacattagatagggaggtgtgtaagttctccaaagaaagtaatttttaagtttataaaccaagcatatacaatataggccaggaaaggactaggggtaagagcattccaggcaaagggaacagcagtgcaaaggctctgaagtgggaaataggtcggcacattcaggaaactgaaagaaaattcattagaaactgcatgtgtcatagtgagtgtaggggagggagtggcatggctggagaggtggtgggatcagatccttcaagccctcccaggccagagtgaacacttcagactttattttaagttcaagggaagccactggaggattataaaaaggatagggatgtggcaaagagttaatggaaagcaggtaacaatgcaaataaagagatgggttagcggctgccttcatagaccatgggagaggtgaccatggtttgaagtaggatgggggcagtcaaaatgtagtagaaaaattcaagatacatttttatagatatttaatatatctaatttatttaagtaataaccaataggatgtgttgatggactggctatggggactagggaggaaaaaatgtcatggattattctcaggtacgtagcataaaaacttggtggatgtcctagaccactttctcagatgggaaacacacggggatgagggttgcaggcacaccctaggttgcagcgtagcctgcgtggtcctgggcagatccccacctgggcatctcccgatacgatggaggagctggctcctcattggttctcagtagctgtctttgtgggaaacacctaccacatctgaaaacaaaaacaaaaacaaaaacaaaaccctcttgctgcttgtttttgtttgtttgtttgtttgtttgtttttgagacggagtcttgctctgtcgcccaggctggagtgcagtggggcgatctcagctcactgcaagctctgcctcctgggttcacgccattctcctgcctcagcctcccgagtagctgggactacaggcacccgccaccatgcctggctaattttttgtatttttttttattagaaacagggtttcactgtgttagccaggatggtcttgatctcctggcctcgtgatccgcccgcctcggcctcccaaagtgctgggattacaggcgtgagccatcgtgcctggccgctgcttggttttaaatgaatcttggatacaggtggccagactaaatggtctctcaacttgtcttcaagtttaggattttaatttttgatatttttcacttctctctggaaatttgttcaattctcaattgttgggggagtgcgcagctgcttcattatgagtttactggctgataatcaaataaatatagaaaatataattgggtcatgtagctatcgctaaccagttttaaaaaatatgtacttcttggatcttacataggcctgaaagtttagttgcactactttaggaatctctttttatgcatttgttcaattaaaaggcaacaaagacaaatccttaagaaaataccagtatttttcctacatatgaaatcaagggtccttgtctgacgatggattttactagttacgagaatcttcctatatttctagttgaatccctgtcatttcctgtaatagacttatattttaccagcagcccttatgcgatttctttgtgaaaaatatttctctgtatagaggaaagtttatcatttggaatgttaaatgcaattatattgacatatggtgataatgggacaaagcatacgggttaaaggttgcaggaaccatggcttggcaattagcgatgtaaatgaaacattcattatccatcatgctgagaagttgatgaactgtacagtaaatctgagcccacagtcaggactgagataagtcatttcagacaatacagtggagaatttatgagcaccagggacaatgtttcagattcctgtcatggaggtttctttacctatttagttgaataaagaccttataaagtccaagccacaatgctgtccttccacaggaataaatatgagattctaaaactttctcttaaaatgaaccattttgagagctaaagtgactagatgttgacagccaccatttttcataagtgcatcccataagaaagatgtactatagattatttgtcttgaagaagagctttgatatgtttcaaaattcgacgttggctttggaaggaaactgtaaatttacagatctttgtccttccccacaaagagccttaatctcacaggttggattatgtggaactcactgctatttttcagttctcctttaagtgactaaggaacatccagatacttccaaaaaaaaaaaaaagtctaagtttttcactttgtccattgccatttaattatcttctgcatattttaaagcatttcctgtgaacataagtattgcccatccagaaaatttgcgtctacattgattttatgtttaatgaaacctgttcttctcaagttctttatttaatcacataacatagtatcttcaaaggtgagataaaaaaatcactggagaaatgttaaaacttcatttatttaagatgactagtgatgcagctagcaaacccaagaagccaactggaatggaaatgctcagtggtgctcagccattacccaggaccagagattcctttgttaacagttcaatttgttgaggcacaagtgaggataaattgggccatgacaaaactatgagattgaatgataatcatagtaacatctgacatatattaaatttggtgttatgccatttctcagttccaccaaatgtactaatctgggcattgttctaggcacctgaaataaattatctcaattcatccttcaaataacccagtgaagtagatcatactatatcccactttatagatcatactgtgtatcccattttatggatggggaacctgaggctcagagatgagaaatgatcatccaatcatccacattcactcaactagtaaacaattgggctaaacttcagctccagctccatgcaattccaagtcctcgttgaaccactttgttattgagcttgctccaactgatctcctgtgtctctggccatcccatcgtttcagtagtgccccagtttgaaagtccacttcatcatcaggcatccagtgccttccagcctttaattgtctcctatcaaactggaaacaattagtctgagaaaatcatccatgccagtgaattaatttattgaatttgttgtcctgtgtctttctgtgagggtgaaaggctgtatttgtgccataagagaatgctggctgtctctagaagagctgagggaaaggttgaatgagatcaacgcctggctcttacaatggcctgcagcagtcttcctcagccttgacttgcctaggaaacttgcaaacatcagattctcaagtctacctccagagattctgatttaatcactctaggctgggacccagtcattggtattttttaaaagctccttagaataaatctaatgtgcagccaaggttgggaacctctggatggaaaatacatgatttggtcccctctaacctcacctactgtttattatccttccacctcccactgctatagacatgctgtcttccttgcttttcctagaacacagcaagcatgcttttgcctcagggactttgtacctgctgtcccctctctgactagaaaacagtttccctagatacctgcatagttagccccctgaacttatttcaattctctgctcaaatgtcatgtaaatggtgacatcttccctgaccatcttatataaaataatacttccctttcccctgatattctctatccaccttatcctgtttgatttttctgcactgccccatcaaccattgacatataacatgtctacttgtttatatatgtattgtgtttcaccagcattgaaatgtgactttcacgagggtagggatttttgtctgttttatttaatactgtatccccaagaatgccttgcataaattgggactaacaaatatttattgaattgaataaatgaatacatttgggaaggcgcaaaggagtccttgcccctgaaattcatttcttcagtcagccagcaaactgtatggagtgacatctgtgtgctgagctcagagctctgtgcctgggatagcattttacagagcatggtgggcatggctggccagtgctcctgcttacttcgattttctgccttcccaccattcctgtgcttattatattctttctcagaagactttttccccactgttgagaacagggcagtctgagaagcctccctactaaaactgaggttggcacccctctcctacttcattgtggaatcctggaatggtctttcttaccctttgtccctagcagtttcacatgctttgggtcattgcatttcttcccttctctgccctcccccacttctctccttcaaacaacatcatctctcagcaatatacaacctcaagggctatggggcaggggagaaagaagggcccaagaggaagctaccctgatggcattggtgcagtggcagatgtgggaacccaacccaagaggaacagtttaggagtgccgagaatctccgctgagtggaagaaaggtccaggccctttgtgtgtgtgtgtgtgtgtgtgtgtgtgtgtgtgtgtgtgtgtgtgtgtgtgtatgtgttttggtaatgagaaagaaactcaagagaaagcttcatgtatcttcaaacatacaaaaaaaaaaaaaactgctggctggacacagtggctcataacttttaatcccagcactttgggaggctgaggtgggtggatcatttgaggttaggagttcgagatcagcctggccaacatggtgaaaccccatctctactaaaactagaaatactagctaggcatagtggcgggcacctgtaatcctagctacttaggaggctgaggcaggagaattgcttgaactcgggaggcggatgttgcagtgagccgagattgtgcactgcactccaatttgggcaacagagcgagactcatctcaaaaaaaaaaaaaaaagaaaaaagaaaaaaaaaaagaaaatgtggtgtaaatgtataccgtgatatactactcagcttttgcagcaatatggatggaactggagatcattatcctatgtgaaataattcaaaaatggaaaatcagataccacatggtctcacttgtaagtgggggctaaacagtgtgtacacatggacacagagagtgaaataataacatcggagagtccaaaaggtgggaaggcgggagggtggtaaggaatgaaaaattacccattgggtacaatgtctgctattcaggtgatggctacactaaaagctcagacttcaccactactcaatatccatgtaacaaaactgcacttgtaccccctaaaatttacaaaaatttaaaaaatttcatttgtgcttactgtctttactgaaatgttaaatatttactcatgagttgattactctgtgcacgtgagattgtcttttgtagttataaagaagggatgcttagaagtagtatcagtgttctttcttattcctatccctcccaaatctcacaccagaaaatgctggaattttttggaaggaaatagagaagagtggaattaggtttagggatgtgtagtcataggaggaggggagtaatggaagttatagaaatggtggtacttggtgttggtccgagctaaaggctagagaaggatgtgttagaaatgggcctgcatagccggcatgaaggccgggtgagcaatccttgtgctttttctgggagaggtaaggcccaagagaatttgcctgaaatgggatgatgtacaactattttcacatccaagaaaatttgaggagttctagggcaaatgtaaagagataacattccttgcatacctgaagagaagaaatatggacagactgagaaaatgatttttaaaatgacaaaataggctgggcagagtagctcacacctgtaatcccaacactttgggaggctgaggcaggcagattgcttaagctgagaagtttgtgactagcctgggcagcatagcgagatcccatctctacaaaaaaaaaccacaaaaattagctgggcatggtagtgcatgcctgtagtcccagctactctggaggctaaggtgagaggatcgcttgagcctggaaggtcaaggctgcagtgaactgtgatcgtgcaactgcactccaggctgggagacagagtgagaccttgtctcaaaaaaaaaagacaaagtacaaaatggtcctctgagaatattgttcctctttgtcattgcaaagagatgcattctagctggatgttttcatttatactcccaaattctaagactcttgtttctcctccagtgtttcacacagatggttagtgaaaaagtcctttctttccccccgaccaaataaacttgattttctgtctggtcctattcggttcagcttagcaagtaacagggcaaattttttttcttctttgggacttgaagtatggtgttttataattcactgagtgattacagagtgcccagaactttatgtaaattatttttgtttctcataactcatctgtgtagtagatattagtgttcccattacatagatgaggaaatagaagctcagcaacaaaaagtaattcatagctggtaacagaatttgaactcatgtttttctgtctctaaaatctacaatcttttcactactcaaaggtgctaaagctcccctgtttcctccatatttaactttctttaaatcattattttattctggtttaaagaattgggtcgggcctagtggctcacacttgtaatcccagcactttgggaggccgaggtgggtggatcacctgaggtcgggaattcgagaccagcctgaccaatatggtgaaaccccatctctactaaaagcacaaaaattagctgggcatgatgacatacacctgtaatcccagctacctgggaggctgagacaggagaattgcttgaatctgggaggtggaggttgcagtgagccgagatcgtgccactgcactctagcctgggcaagaagtgagactccatctcaaaaaaaaaaaaaaaaaaaaaaaaaaagggttgaactggaggccaggaacgatggctcatgcctctaatcccaacactttgagaggccaaagcaggtggattgcttgagctcaggagttcaagaccagcctgggcaacatggtgaaaccccatctttacaaaaaaatacaaaaaattaactgggcatggtggtgcacacctgtagtcccacttactcaggggggtcaggtgggaggatcgcttgagcctaggaggttgaggctgcagtgagctatgattgtgccactgcactccagcctgggggataaagtgagaccctgtgtcaaaaaaatatttttttaaaattaaaaaataaaaaagaatcaaacctattcttttccctctactctgcccaagttttcaagtaaataatctaattattatttgaaatgacccaattaagtttaaaaatacctgtcctttcctagccctgaagacttaaaatagatctactgtcttctaagagtcatttcgtttagttttcacttgctccttctctttataaaggagtctcatttctctacctgctttattccatcaattactttccaccttttttctgtggggttatttttaccaaaattaacacatggggtctcctaagtaagtttccttgttgaattccctttaccagttgaaacatagaacagggaaaaaaacattcttacattactgcacctacataagatgtacttggccgggtgcggtggctcacgcctgtaatcccagcactttgggaggccgagtcaggtggatcacctgaggtcaggagttcgagaccagcctggccaacatggcaaaacccctcctgtactaaaagtacaaaaattagcctggcttgctggcaggtgcctgtaatcccagctactcaggaggctaaggcaggagaatcccttgaacccgggaggtggaggttacagtgagccaagattgcaccactgcactccagcctgggcgacaagagcgagactctgtctcaaaaaaaaaaaaaaaaaaaaaagatgtactagtgtgtatgtgatgtgactgcgggatgaatgtattacaggaagccagataacatgaataaagaaaagattgtccgctataaatcaacctttcttcccattcttcattctggtattctcccagggtttacagaaatttctatttcttcaatgaaaaggatttggaagtaacatggcctgtttattgcattccttctcagtcagtgcacacagtaattcaaagtttttccttaagctggatgaatcccaacaacaacaaaagaccgctttggtgaagtaaatttaacttgggaaataagcatgaacttaaagtaatataaagtaggggaagctggtaggatctcaggttataaatttcaatgtaagaaattatattgttgatttgatttttgtttctaaatacaaattgttccttttcccaggtggcaaggttttggaggaaacatacatttttcctgttgaaggaaaggagcaaaaagtgacttggttgggcttcccaacttctgttaaagccacttaattttttgaaatccatgtgtgactgtctgtcaataatttacatagtcaggctgggtacagtggctcatgcctgttaatcgcagcactgtgggaggccaagatgggaggattgcttgaagccaggagtttgagaccagcctgggcaacatagtgaggctctgtctctacaaaaaattaaacaattagctggatacagccgtgtgtgcctatagtcccagctactggggaggctgaggtgggtggattgcttgagtctgggaggccaaggctacagtgaactgtgattgcaccactacgttccagcctgggggacaagcaagaccctgtctctaaaaaaaagaaagaaaataatttaccatgttcacaagttgcagttaaccttgtccatgggaggagacttttgcaaaactacagaaggttatttttggtttcctttaagagtttgcttagagcttggagacagacagttcccagagtttcaagactacgtagcaagtgattggttatgccccaacctatgtattgctgtggttgcatagcccccaaaatgactattgccatttaaaaaaaaaattaaaataaatatttttgacaaaataattgtaactattgaagagtccatccctgagaaagccacaccataccagtagctaagaagctatgatcattctgttatttccctctgtagtgggcactggtgtcttctcaaaaagtggttcattttggtgccaggataggataaaaacaacgagcaacacacaaaaagcccttttccttcagcttacaagggcggaagggtggctttcccagctgacaccttggtttaaagccaggagtggaattccaggattcttgggttaaaaggtagtttgtgtggagccacatactctgctctcggacttcgtataggcaaatttgctgtagtgcagatttgtgtttggcatcttcatgaacccactgagtcccacgccattagtgtcctccttgtcacaaggtgagcatttctgctttttgtcaaataagccagagtggcttttcctttctcacttagggtgtggtctgcaaaccacacctgagtggttggtggcttttgtgggcagtacacggagtatagtggcctctccctctgggaaataattggaaataaaaacagaaagcagtagcagattcttggctctgctcttcagtcagaatgacatttaggtttggtttttcctgttttctgtcttttgctgaattttttgaaaattcatttactcaatgtgtacaactgctttgatgtgtacaatttgcagccattcaatactctgcttagtgttacccaaacaccttgataaagtagccattattaccctaccactccagcaatccctgacccccgactcaccgtagtcttcctcattgtacctgccttcatgtcacattgctgcagtttgtgtctgtctccttgagcagggactctgcttcatagctctttcttctagaagagtgcccagcatatagtaggacttattaagtgcatgaagaaataattcatatttgacagcttttgaggactctgtaactctgagtttattcgttttcattttgttattgtatcagcattaaagaaatgcctaagttgatgaccattgagggatatagtttggccattttcttataaatatatttaagatgcaaaaacatatatttgatcaccagttatcaaaattgcaacctttcacatgggaatataatttatatgatatttaaatcatgtctagtttctatgatcataatttatataatatttctttagaatcatttctgtggcgttttctgttttgctaatcttttagtatctttagataattttttgtcgatttctcaagaagcatatctactttagcttgctatttatggtaatttgtagcaaaaatttagtaagtgttacagtgtctctagttagttattagtttatcaattactaattcttctttttcagattttttgaaatttaatttttggtatcttccttcacaaatttactttcgcattgatagttgagatattatcaaagttgaggtactaatcatactgaccattatgagcagtcatttctggatttctccactgtccctttgctatttggaatgattttgggcttcactttctttattaggttgactgagctgctcttggttaaaaaacaaaatttaaactttaaagaaaatatcatatcagcatttaattaagtttattgcaaattgttgcaataaacctagaatgctttcaacagttttgcaggattttgttgtggttgaaatgttagtttcatttggtttacttttagctttaattttaattttaccataatatttcaccagatatttcataatccattttagatgaatgtcaatttcatgaaaggataacatttcagatcctgagtccttttcaatttttgaatcatatattcatttgaaaaagccattaacatattttaaaaataaggcaatagattggattgaaaatgtgttttcaaaaagaaactttatcactttaaaaaaatccttgatattttaatgcccaaggaattctcattcccaaaagtatttggttcaaagtccagagaaacttagaataaacttaggtaaaatgcctgtgttgaaactaaaataaacacactctaattaaatgaaaacaagtgtaagggtaaaaataatcttcaaagaatgttgcctcaaatgaagtcaaaaagttttactataaatgttatagtaaaattaacaaaaatgagtttttagtgactgaagaattgtggtgaatacatttttggtgcattaacaataataaattggcaaggtcctgatattctgggaggatatctgcattaggttatgatgctaataaattttatgtttttaatcctaagaaatggacttcactgctcttgtctagttaatctttataatacattttcaggattgttttcaatttaattatttgaaacataaacatttacttttttattttaaagtatttttgagaaactatgacagaatgttcagggtaattttaattgctaccgcttttttgaaagtaatccagaaatgttgatttaagtttttagttcacgttcccttttatccagcaagcctactttgataagctctcctacagaaatacaagcatcagaatataacgacatatattgaaagtgtttcacgcctgtaatctcagcactttgggagcctgaggcgggcggatcacctgatgtcgggagttcgagtccagcctgaccaacatggagaaaccccatctctactaaaaatagaaaattagccggacatggtggcacgtgcctgtaatcccagctacttgggaggctgaggcaggagaatcacttgaacccggggggcggaggttgcgacgacgagccgagattgtgccattgcactccagcctgggcaagaagagcgaaactcttaacaacatttttcacttggaagaaatggaaagcaaccttaatgtccatcaatagaggaaggattgaatcaattatgatacagccatgcaaagaagtgctacggagctactggaaaacagttcagttattctgtatgtattgaccctgagggatgtccccagtgtattgaagtaaaaaattgttttaagctgcagaatagtgtgtataatttaatctcatattttaaagggcaagagatttatacgatctgaagagaaaccagagtataataatctcttattttaaaagcaaagcaataagatccaacccatatatgagtaccataatgaaagattctaagaatatctctcaaactgtcaatattggttgataaagtctgcatatgagtaccataatgaaagattctaagaatatctcttaaactgtcaatattggttgagaaggtctgctgagaggactggaaagggtcgagttatatatctttgtttgacttgttaaaacaaggcatctattactactgtaatttaaattttttataaagtacagcgtttttggtggtaggaattatgcaaagtaaagacttacaatttcttttttattttaatgtagcatagaatccatacagagtctcataccatgcaaatgtccagtgatttgtgattaaatcatagaagattccaattacttgggtggtaagaaattcaaaagaaagtggtcagattaaggtgaggtaaaccataaattattttctgaagtgaattttttatgagatgacttcaactttgacaaaattgttgatgatctagtcagcagggatatacacacacacacacacacacacacacacacacacacacacatacatatacatatatatatcaacccaaagataagagacccagagaacgttctaggtgcggctgcagacagacttgatagttgttgaaatggggccaggagtagtagcccatgcctgtaatcccagcactttagcaggccaaggcaggaggatcacttgaggtcaggagtttgagaccagcttggccaacatggtgaacccccgtcactactaaaaatacaaaaattaactgggcacagtggcgcaggcctgtaatcccagctacttgggaggctgaggtaggagaattgtttgaacccaggaggcggaggttgcagtgagctgagatcgcaccactgcactccagcctgggcgacagagcgagaatccatctcaaaaaaaaaaggaaaatcattgacatggaagtactagttcaagggcaaggtatagccaagctttctggggaggggaattagacttatgtgatcctcctcaccaggcagccgtgctgggatggccagggagggattggtggggctgggaggtgacaggactccctctgacctgccgctgtgatgcacgtatagctggagggcagtttccaaatcatcgaagaaagaacagggaagatcagagagatgtgaatgtacaattattaatacttccagtccttgctcttttacacccaaagtgaggaaccaagagggttaggaagccagggaagatgagaatagccatagtgggcatggaagggtaatgctgaaaacaccgaaaaggacagtgttcggatagaagataggagccagtgtgcactccctccagctgggtttttacacccctggatagacttgtgctgggcaggctggattcatttaaagattcacgagagatgcacgatatgtattaaaacaaaatagggtcaagagatgaggctttaaggtgcctcctgttaggggaggaggaagatgagaagtcaacaaagaaggtagggaaacaaccatgagagtagtgtcatgcagtcacagaagcgaaggttctggaaaatagttctttttctttttaaagaggtgatcaatggagtcaagggcaaggaagaagtggaaagcaaggaaaataaagaatctgtgcttttttctttctttctttttttttttgagacagagttttgctctttttgcccaggctggagcgcagtggcacaatcttgtctcactgcaacctctgcctcccgagttcaagctattctcctgcctcggcctctcgagtagctgggattacaggcgtgtgccaccatgcccagataattttgtatttttagtagagacgaggtttcaccatgttggtcaggccggtcttgaactcccgacctcaagtgatctgcccacctcggcctcccaaagtgctgggattacaggcgtgacccacagtgcctggccaaagattctgttttgaataggtccttggtgactgccaacaatagtttcagtagaggagagagagtttatttgttaaacagatatttattcatcagtaagtatgttggagacgctataccagaatacagcagtgaataagacaggcaaggttaagatttcacgaagcctaccttcgccttggggggaaggtgtggcgaggtgggagaggtagatgataaacaataaataaggaaaatggtcattttgaatagtgatcatgtgtatgcgttgtgtatgtgtatgcctgtgtatgagttgacagtgacagtggtagggttggaccgcagaacagtgctttggagagaaagccctcacagagaaagtgatgtttggactccctatgtgataagaagctacacatgaaaaaatctggggattgtacatttcaggctgaagaaatggcaaatcctaaggccctaaagcaggagcaaaattgacatgtttgaagaagacgagtgtgactggacctctgtgattggggggaagtggcgcaggatgaaacgagggaggtatgtaaggaccaaaacatggaaggaaagcaagattcccagaaaaagtggatgggagaggcactatccatgaacatgatccagttgtccaagaaagttaatttagcagaaagaaatggaatgttaatgttggttcagatgcagaatctaatatgtgttttattttaaataagggagagttaagcatcgttaaagacataagaaaagagaaagctgactccttttcttccagtgaccattagtaacgtattctcccacaaggcacacagccacccactcaatgctgtcattaatcccacacagataggctttgcctggggagtgaacatatggtatcccctgaagcttttgtcttttctgcttgaagctagtttgtaaaaatcaaaaatgatattgcatttactttggtatatttctaaagagttttttttttttttttgaggcagagtcttgctctgtcacccaggctagagtgcagtggcgcaatcttggctcactgcaacctccgcctccagggttcaagcgattctcctgcctcagcctcccaagtagctgggactacaggtgcctgccaccacgcgcggctattttttttgtatttttagtagagacggggtttcatcatgttggccaggatggtctcaatctcttgacctcgtgatcagcctgccttggcctcccaaagtactgggattataggcgtgagccaccgcgtctggcctctaacgagatatttctaaaggttaggccttcagtcaagaattttaaagctggatcttagaggttatctaaactaacctctccatttcatagataaggaaagtgagtcccagaaaagcactggtttggacaagttcagaaagctaaacagtgactgtggatgtatgattctgtctcttaactcctaatccaaatgtcttctcactagataaggctgtgccttctacatttgaaggctcaaaccccatggatggatggagggaaggatgggtggagggatggatggatagatggatggatagatagtttactcattcattcagttatgcaagaaagattgagccacctccccatcagacagtgtgctaattgctagaatgcaattatgagagctgtttatagtgcctgtctctattctgtatgccttccttacctcagttgaatccagggaggtatataatcccaccattctattgaaacccctcatcaagatcactagtgacctctgttatcaaatataaggactatttacctattcttatctttcttcatagcattcaaaacaattgactacttccttctccttgatgtctatttcatcttggcttctatggcatcgttttcttccaaatgccccccacctgctggaagctctgtttctgtttcctttgctggctcctcctcttgtgtttaacttctacatgttggaattcccagcttggttccagctcattgacttttctctaactgcatgtccactctaagtggttatatgttaatgtcacgcccccaacaaatgtacatctgctactgaactcaaaacgtatatctctaacttgcctgcttgatatctccatttaaatatctaatgggtatctcaaatttaacatgtgctaaacagaacctttgactttttctctaaatctgctctgcatcattcttctctctcagtatagttagtcagcaacattaaacaagtgtcttctatgtgccagagtctgttgtagacattggggttacagtagtgatgaaacagacaaaaatctctaatatcaagtaccttccattccagtggagggagaaggatcatggaagccaagcaaatagcttgttcactccaaaaaggcctaggcccagccaccacctctcaccttaaccattgcaataacttaactggtgtccctgctcctacccttctgctgtcctatcaacacagcaaccagagtaatttgtataaaacacaaatataacagaaacacaaaacctcttccccaactttaaaccttctagtcacttcccatagctctttgaataaaattccaaacccattcccatggcctacagacctctgtatcatcaggtccttcccaccatgcagatcttcctggtctccctcggctgcagccacacaaatctcccctctgtttttctgatgccagcttctcggcacttgctatttcttctgtctggaacactctgacttcagaatatgaaagcaggtggccactcccatcatgcaagaatgccaacccacatacaaccataccatttctcagatttcccagtttaaaccttccttctgtctcatcatgctccttcccgtcacactatgttgacacgttgctattaaaaattatcttatttatttatttatttatttatttgtttgtttgttttctgcctccatgcactgaaatgcagctccatgagagcagtgacatgtctgtcttgttggctcctatatcactggtgcctagaacagtgccagaaacacaggagttgttcagaagtatttgctctgtgaatcaacgaatcaatgaatgcattgtgaatgaggttattggtcctacccttgcccaacaaataatcttttaaccctaacgaagttgagatccacaggtcaattcctaaggtgctcctctagtgaagtcttgtccaaatgtgagttcccatctttactaatatctttcaaacagtgtaactcaatcgaagtgcttagtccatggcaactcattaaatttcctttcctcttttatttattgactcatgggcacctctcactgtctaaacacagaagaaagctccctcttccccatgcttccccatgccctttatcccactccctcttccccactacccctctccttctccatattgggcctcccagcacttcctgtcactgccataccattctcctccccacctgctcttctgcagtatccaccaacgtggcttttaatctctcagtcctcagagagcacaggagaggcaaggaagctaaatagacgacaccagatcctctcttggggacgggggatatgaaacttcatctgttcattacttttgtgtcatcccagttcattggtagaactgggcaagtacaccaccagcttgtgtttgaagtggtattacgagtatgttttctccaggagagtagagagtagttgcgtctaattcagacttggggtgagcactcccagaagcacgcctatgcttgttatggctcacttagatgactacacttactgcaaagcctattaatacttaagccacatagtataccaggtactgtactaagtcctttaaggtaacttatttaaacctcacgtaactctgtgacaccagtagtcctgctatgatcccattttatggatgtggcaactgaaattaagtaacttgctcaagatctcatgaccagtaattgacttgacttccagtgcaggcagcacctgggctttttgtcatgatgctataatgctgccccgaccagaagaagacctcagtcttcacatcgtttgacacaggacttgaggaaaagtacacattgccagatggagctagaaggggagatggtgcacgaggtgggaggagtgcaggtttgcggtagaggatgtgtctcagaaatggcaaccattcaatgaggttggagccaaagacacagtggggagtgaaggaagctattttgtctgttttaaaaaaattgtaaatcagaaaccaaatatccagtttgctggtttcttttgaggattgctctgcctgggatttatcttgagtccaactaaaaacgttttacctggtttgtttggattaagattgccaagttgtggagccactgaggctccttacgtgtccacagccatgctcatggcgaagggcctgactctggagctcaatctcatgtggtcgtgtatgtagggacctccgcctccatacaagagctaggactggaggagccacagacagtcattctacactgcctgcattttgaacatgtaaaaagaaacgtggagagtttggagagtttgaaaaggatggtccagggggctgggggtaaaattactgcaagagtatctcaccacctctctcagagtttgttaagaaatgaacatgtgtggaatctatagtaaaaagtggtattaagcattttaaagatgggcctcttccagaaagttcgagccaagcagaccgccatctggattattcccatggtagttgctctctctgcgcacatttctgcaaccgccattcctgcctcccttattaataggttatccggaaatgactttggatcactgcttcctatgttaacacactttttgatgaaataacagagagtattgtcattaaagatttggaaaaaagttaaatctttacaggagtcaaatgcagcacatttaatggttgttgtagaactcagggcaaagaaatcactttttccaacaacagaaggaaactgttggtgacttccaaactggctaaaggtccttgttctaaccattctttttgtttaaaattgctaaccttaaaaatgatttcagagttggcaccagatgcattggaggctgctaaagtacacttaggaaagactttaaagccattaaagttatatgacagtattttgaagttgtcttttaaatatgacggacccagttgtttgaccatacatgatacataatatgatatagctccagagtggcattatttggaacagagtttatgaatcatttaaaaattgtacctataaccaatgcaaaagctataattcatgtaaagctataaataatctatctcaaaatctacataagatagattgacagagtgctatttggagtttatgggtcttttgataaactttgattaatattctcaagtcaatcattgttgaatgaagtattttaaaattatttggtgaaaattatgtatgttttccagtgttttctaaagactttcactttctaatggaaattcagagccacctagtgaccaaaagtaaaatgtctaaagtataaaacatgacaacaaaaactcccagcaaaagagaaaagcaatcatttgaccccgggctttgatgtccagagataaaattgtatccagttcaggtctacaaaagtagaattcttacaaattaaattgactaagtcttttgttatttggggattaaaggcccctaaacatagacttgaggtatatagatgattaatttttgtcgacaccattttatcaaatgagaattgtctgacttacacaaatataggtgactgttcctcacagatgcatcaccccttccttgatggtgtgttccacttctgaccagtttgtgtattatgactcaagaaaaaaaaagatggggcagcaatctcacagaagacaggaccaatggtggaggaggaagaaaggcatgaggtagatttaaactccccaaatgaggcttctaattcagattcatttttcagcataaagattcaggcaattctattaaatttggttggattaaattcagcaaacctctgttgagtatttttttttttttttttttgagacagagtctcagtctgtcacccaggccggagtgcagtggtgtgatctcggctcaccgcaacctctgcctcctgggttcaagcaattctcgtgcctcagcctcccaagtagctgggactacaggcatgggccaccgcacccggctaatttttgtatttttaatagagatggagtttcgcagtgttggccaggctggtctcgaacttctggcctcaagtgatccacccacctccacctcccaaagtgctgggattacaggtcaccgcgcccggcccgagtctggacatgtacaggtttcttgctaggcatgaatgcagtaaatctaagatgcatgtagagagccagggttttcggcttggttgaagtagagtgagtctagaaggacacatagaagatgagggtggagaggtaggacgtggctgtgatgtggaatactgtgatacctgttccttttggggggcttttggctaaaatcatggtcatagttaggatgattaatctggatgcagcatgtagtgtggactaatgcagggtaaacagatgtcaggaagagcagtgaggttattctaatggttttggatacaagtcataagcatgtgacctggaattattaaagtaagaagggaaaaagtagattagagaaaaagagaagaatctttggtactgatatgggggagcagtgatatcaagggtgactccaaaatatctgccctaggtgatgaggaaaagaaaatgatagaaataatatcctatagcatcagtaatggacaaaagggtaccagggaagtagctggtgtgtgatggagaaaatgtgagtatggttttgatatccatccattcattcagaaacatatacggagtgcctgctgtgtgccgggtgctcaggttgcagtaccatcaacagaccccaactgccaggtacccagggaagaggaaggcagccctgtttctacaccaaggagccagattagagccaatggacaagctctttgccaagtgcaccagctttttaaactaatttatttaaattgtaggggataactattattatgttagtgtacaaaggaagtgaaactggagaattccctgactgccctcgcaggacgtgtgacaggggtgtggctcatctgtttggcagctgtgtgctcaaaccccttatgggaggaggagcacgcagatgggcaggtgcaggagccagggcgagtgcttctgggctccggccccgtggtagcatctagggctgggtgcctgtgactcccaaagccccagtgggcatgctacagtgctcttttaactctgcagtccacagatggcttaagtgttaaccagctcagtgccctcttggtacctgggttcttgtccagcatccaggaagaatcaggccacatggataaattgaaagatggtaaatgtgggggattttattgccagacgaagatggctttcagcaggatggatggggagctggaaagggaatggagtgggaagatgatcttcccctggagttcagccactctcctctccaaatgaccccagccaaagtcctctcgatgttcagacactccttttcttctctccttctctgccacgctgctcttctgctgtccctctgctcttctgctcatctgctcatggagcctggggtttggggtctgtgtgggcacaggatagcagggcgtggtgggccaaaaggcaacatttgggtgtgaaaacaggaatgcttattcccatttagggatacgggtttccaggattgagggtggggtaagggaactgccctcttctacccagtatctccctgcttcctgtttgtatcagaggtaagtatgagttcacagtcacacaaaaactctgtgacagaggcaggcatcaaatgcactatttccattacacctcaaatggtggtctccagggagggagacccagacggggaggtgagcaggcaaggcttctgtggctgaacactctacctcgaggggactgtaactcagtcagctcagtggccaccagctaaaaggggcttgtttcttccagtatgaagtctgcttctccagcaaacacctgctttgcactggagcagagcagaccttaggttcttgtccctatttgccaccttctgatctgctcctgtctgaaccccctgagcccctcctagactacgttgcctggaccagttcccctggtcaagggtgatcatggaatagaaaaggatcagaagctttgactttaaattcacagccatttgctacccgtaattttttttttcctggacccatcacaaaaatttcctgtggtttcagccttcttatccacctatccagattgtgttgagggttaaatgtgataatgtagagagaaatgcttgtatggattgtaaagttctgtggggtagaaaatgcctgcatcctttccaaacaccgtgattcatctgggcattgtgatgcttgcctgtagtcccagctactcaggaggctgaggcgggagcagcccttgaggcttgagactgcagtgagctagtatcacggtgctgcactccatcctaactgacagtgagactctgtctaaaaaaaaaaaaaaaaaatttttttaaagatataacaaccagacaccctgattcaacagagcaattatttcctatcattgttattcccacttgattcttctgcaactctctgcagcactaagcaaggaaacccctcagcacctcctggactgaaaatactaggagttatgcatgcagattcctttaagaaccataccacccatggctggacaggagggtgacttcagcattacttcttagtttcaccaagtttgcatttatttaagttctacacagttggtcccaaaagcctcagtgcagttttatgcgttaatactgtcagatatagaaatactataagcttacaaaacgctgcttttggaagtttagttattttcatctcttttactctattagttttataagttttgaataatgtattttgaactttctattttgttatagtctcctgattgaagatagcaaaggttaaccagaagaaaaaattattatttaaaaaattttttaattcacagaactaaatcagtataaaaggaatgaaaacaaactttcaaatgatgttttatgtaagtttttagtatgcatgtttctgaagtcattaaagcttaaaactgcactaagactttcgggatctattctaatctctctttttttgggtggggcccagggatcctcctgcctcagcttcctgagtcactggaactatagatgcatgccaccatgtacagctaatttttgtagagatgggatttctccatgttacccaggctggtctcgagtgattccctgcctctgcttcccaaaatgctggagttacaggtatgagccaccatgcctggcctgttgtaatctcttgaccattccacaagaaacaaagctttgagcttcattaataaattcttcctcacttcagttattatcgcaattattaccagttgagcccttcactctggcagtgatttattggcattctctaatattagtcatctcaagcagaaaaacttagaatggtttatagatgctttagtttctgaaatttcagtctgaatcctagtttaggccctttactcatttacatacgagtaaaaagcagttttcaaaactaacatgactcagaatgcagccaagcaatcaaaaaaagcttctctttgagtttgccagttgacagtatttttctggcagtagttagtacatctaaatattaactaattaatctagcttgtaatattcgctgctggtttcattgaatgaggtgggagtaggtcagatctgcagaccattcacaatctccaaatgcaaataaagtagcatttgtttgtaggtggaaccaaatgattataaatgaatggtgagccatctcctgggattggatataaaggtcctgtaaatgcagaattgtatcaacaaacagctgttgggaaaatactattatgctgtaatagctgctattaaaatccattagcagtcttgatggcctgtttgaatttgatgcatcatttgctctgaatagcatttcttcctaaagttttgcagtagaatttatgcagattgatagctggtaacagtgacattctgggagattaatactgattaaacactttgcttgcattggctattccagccccccaaaaatgctgcaaatactgcagtttaagtatcacgggggggcagggcacgggcagggtgggtggggaacagcatcaagcatcaaggcacccccctgtccctggtgatggaggctttctcacacttggcgtgaaacatccattttgcttccatgacaaaggtttgcagacttgaagcaggtcctctgtttcccactttttaataacctgccttttcctcatcctagtaccttttccagactcagggaatcctcctgggaggccacagtgccttcaggacacaatctggctgaaaatgttagatgtctaatgagattttgaaaaacacatgtgttggcaaagagaatgcagctgttctgatggaggaagcattcaaatgttaggatggaaagccagcgcctggttcctagttgcgacagccatgcaactctggaaagaatggggaagcagcgccatctggccagtgagccatacaggcagctcccaggggtttaccaattcaaagaggagagctgccagggactggtttaggccagcttcacagttcctgggtgccgtaagtgatccaggatatacagagacgttttcatgcagattagaagagacgttagggtaagtcactgataaatgtggaatacattaaatcaagagtaattttttatcttaaaaaagcagttccttttgacatatgcacttacatgacctctcattagttgggggattttcagatattcatcaaaatggctctgtgaagagctgaggtttgttaattttaaatatttttcatctactttcactttcttagtagccaaagctggtggttggtaggaggtgaaagggaaggaccaccaggaaattatttgaaagtttcgctcctcaaagtatgatcccctggccaggcgcggtggctcacgcctatagtcccagcactttgggaggccgaggcaggtggatcacttaagctcaggagttcaagatcagcctggacaacatggcaaaaccttgtctctactaaaaatgcaaaaatttaccggggcgtggtggcgtgcacctgtggtctcagctacttggcgggctgaagcgagacaatcgtttgaactagggaagtcgacctgcagtgagccgagattgcgtcactgcactccagcctggggtgacaaagtgagaccctgactcaaaacagaaacaaaaacaaagtatggtcagcagcagattgagcgttacctggaagcttgtgagaaatccagattctccccgaggtatctgaatcagaatctgcattttaataagaccccttcttgccccttgaatgccttccctgactcctcaaggcaggcttctagattcctgccctctcctcccagcgttctttgtccacacccccactagacagtgtagcttcttgaatgcttagccacaaattctttagggcaggaagctgagtatttttttttatatccccagagtggcacatggtgttcacttaaccacccatccagccatccattcctccctccctcattctctctctccatcggtttatctttttttcattcgtttactcatttgtttatttcttcactcattcagtaagtatccatctaccgtgaatgagccagtgctttaggtatcaaagatatggtgtgaacgtgataaagtccctgttgctgtgctgggggcaggggagacgaatagcaaacacataaacaattaaatatacagtgtgatttcatgttttgagaaagcaccttaaagaaaaataaatcagggtttgggaatacagaagtcctccaataagtatctgtttaatcgtcgaatgaataaaaaagataaattagtaatgatattaaaaagagcgataaggaaccataaaaagttttttttgtttttgcttttgtttttttgggttttttttttttttttttttttttgagaccgagtctcactctgtcaccaggctggagtgcagtgccacaatctcggctcactgcaacctccgcctcccgggttcaagcgattctcctgcctcagcctcccaagtagctgggactacagcagtgtgccaacatgcccagctaatttttgtattttttagtagagacagggtttcaccatattggccaggatggtctccatctcttgatctcgtgatctacccgccttggcctcccaaagtgctgggtttacagacgtgagccaccatgcctggccggaaggatataaagttttaatgaaattttaagagctaaggtgatggacttaggaaacgtcctacctaactggtcaaatgcaaagcaagtgtacaaactgccaccatagctccacaagcattcaaaagaaagacaggaagtgtttggccggtaaaactcagcaaggagttgaattaaggtaagaaccacccgaaggcactccttagaaaatgatgttcatgcgtgcccatataaaaagggacgttcatggatagatgattcattaggacctaagacatgatagaatgtttctgtgaagttagtgaagttgggctgtcctgggacatactaatttatgtgtcagacggcaaaatcaaggaggggaagtcctaacacagcagagatagatctgttattctgcttccccaccccacccccactcccacaaattagcaggttctgagtagttcaaacctgaagcagccttaaaactagcttttctctatgttcactcacatgtgcatccttttcactgcaaagggctattttttttatttttaagggactaggtgtaaagaagagatgctgacaataacacgcattggaaaaaattccagattattaagtcataaaacttgagttccagtctcagtctcatcttttgcctcctactagccatgtggccttttacaggtttgcaatctgaaccatgtctagtcactagatccatggttctcagccctgcctgtatggtggaatcacttaggcaacttttttttttttttttctgagacagagtcttgctcagtcacccaggctggagtgcagtggctcaatctcagctcactgcaagctccgtctcctgggttcacgccattctcctgcctcagcctcccgagtagctgggactacaggtgcccgccaccacgcccagctaatttttttgtatttcttttagtatagacggggtttcaccatgttagccaggatggtcacgatctcctgacctcgtgatctgcccgcctcggcctcccaaagtgctggcacttaggcaactttgaaaaactactgaagcgtggccctattcctgattatctggaccagaatctcaggggagaggtgagcactggcaggcctgggggtcatttttcaaaatgcaccctcaggtgttgtaacattcatccagaatggagaacccacaggtcatctgtttcacaaggttccttattactcctgacagagaacaagagctttttaaaaattttgttgcagtagaaaacacaggcctacataagcagatggctctcagttctaatgtcatattgtaagtttcatataaattgcatcctttagtaataaatatgcttaaaacatatttttggagggcacagtggctcacacttgtaatcccagtactttgggaggttgaggcaggactcacttgaatctagaagtttgagaccaacctgggcaacataatgagactccatttccacaaaaaatacaaaaattagccaggcatggtagctcttgcctgtggtcctagctactcaaggggctgaggcagaaggatccattgagcccaggaggtggagactctagtaagttgtgatcacaccactgcactctagcctaggtgacagagcaagaccctgtctccaaacaaaaacaaaacagtgtatctttgaaaaagtaatactttctttagagttaatacatagtttaaatatctcattaatagatgaggttaaaagcaatagttttctttttctattagaattatcagagggcagcccaatgactcttttcaaatgctctcaaggattggactacccaatctttgggttattcaagggtagaacttgggctctggagtcagtatccctaaccaactgctggatcaaatatttttaaagcacgtagtcttgcttaacttctctgcaccccagtcttctatatgtagattggggaatgatattaataccattattaacctgtccaaaatgattattttgaggaattgataaattaatccctgtgatatgctcagagcgttgcctgctgtattataagtgctgaaatatttgctgttattattaaccttctattcaggagactgaaagcttatagaaaaaaggttaaggagaaaattttacttccatataaggaaaaaaactttctaatatcctatccaaagatggaatgaacatctcatgtggtcatgagcttcccgtctgtagaagtgttcaatccccggctttgtaactgcctgcaagagtgaggtataaggcatttaagaattgagtgagttgccgggcgcggtggctcacgcctgtaatcccagcactttgggaggccgaggcaggtggatcacgaggtcaggagatcgcgaccatcctggctaacacggtgaaaccccgtctctactaaaaatacaaaaaattagccaggtgtggtggcgggcacctgtagtcccagctacttgggaggctgaggcaggagaatggcgtgaacccaggaggcggagtttgcagtgagccgagattgcaccattgcactccagcctgggcgacagagtgagactccgtctcaaaaaaaaaaaaaaaaaaccaaaaaaaaaacaggaattgagtcagtcgttgatctaaatagcttttaaggcccatctaatcctgatatttgatttttctttcattttaattttagagttatatgagtctatgaagagcctaactaatctatctgtcttggggagaagaaatttcagtggatgctcctaaatgatgtcatggcttttcatgagatccaaatttgatagttctccacacttaaatttgataggaacaaaatccactgcttccaaaccaccactagttttctgacttagactttggtaaagaatgtaatctaaatagccctatcctttcttttctatcacaataactgtctaaccaaatctatttagttattcattttgactggaggttggagggatcagtaagagtttctagtagtattttcggtgagaggtttttttccaaatatattgatttaaacaaaccaaacagagctattctgccatatttcagtatggatttgcctggtacatttcccacgaagatacaaatttaaaggccttctatttcctgtgacaagggcagaaggaaatcagaggtatataggacaagcatttaaggatttaactgttgcaaatgatctctgactcttaaaagtgaaatataaaatggaaagtgtttttgttcatagcaagtatgcaaaataataatatctgtgctggcattaagcctagaagacacactaacttaagtatgcttttaattccaggcctttcactgactctaaatttcagtaacttcattgatgaatatcaatgttattgaccctactaagatttctgtgtgtgtgtgtgtgtctgtgtgtgtgtgtgtgtgtgtctgtgtcccctagggaacttctgccatctgtcagtgaagagcatctagcattcttgcaaagaacagctgtttacatccagactgcttagcagagtgcattagatgaggctatttgtgaggcaaaaaggaagttcaacttcttgtgcgttatgcgtatgttacgggtctagatttaggtgggctaatatgttgagccaaaaagcttggcaaattgatacagcaggagccttctgttgaacattaatcatttctttccttaatctttatacttgtctcctagtctggttcaataaataacagtgaattcccatgccttttgctacagagtctcaatcccagtccacattcccacaaacgatcctttaggtttgcattagcaacttcccaattatatttgtaagcctgacctttcattgatttctagacacataaggatacctttcaaggaatggcatacagctctcttggttttcatacaagcgcctcaaactcaacaaggcaaatgtgagcatgtcaccttctctctgctcccactgcgactgccttagttcagtacctccttttgtcttacccagagcatagcaatcaagactagcccatggactcttgtgcaaatgagggactctttccttcagttcacagtgccccaccgcaaaaactgactttgtaaatgcatcttggctgggattgtgaactggatttcaggccctgcaagctgtggccctgacagggagatattgactatgcataggaaaactaattttctcctctcctctgtacttctggccaccaaatgtgtggggtgtttttttcccacaccaagcaattctctgctacaacaattgggtgttctgtaattcaattaaattcagacactgtttacctggaatgagtgcaagcctcattggcttggtctcacaagactgccccaacttccatgccaatcacaagtctgggttgtcacctgtgcttctgataaactggctataaatcagaggttcccaagaccctctcttctggttcaataatttgctagaacagctcacagaactcagggaaacatttacacttattggtttattactaatatataatagaagatatgacaaagaatacagatgaagaggtacctaggggtcgagaagggtcctgagcataggagcttctgtgtctttggtgttggaatgcaccaccctcctgacacatggatgtgttcttcaacacggaagcccacccagaagcccaccaagtgtcatctcattagaacaaaaagacgctcctatcacccgggaaattctaagggatgtaggaatactgtgtcaggaaccagggtcagagcaaatactatttcaagatcagaaagcgattctgatcttgaatctaaatcatttccagtctgccctttcacactgaaacgcaaatctgtcatgccctgttcccttcttaaaatccttctgtggctctccatacatttccagttaaagtggtactttcctgcttggcaaatgagggtactgacttctgatccttgtgttacaaaccaaactggggtctgctcacctgacgcagtaaagtcaaacatctacattgaggttttgcagcaagagaaaggagggcatttatttgcagggtgccaagcaaggacagctgggaagctcacacttaagacctcacctctctaacggttacacgcaagggtttttaaaggaaggagtaaatttcagaaaatcagaagttacaggcaaaactacaaatcagtacatggaggttatacactggtttggctgaaaaagacagaataccttgaagtgaggggcttacaggtcatagatggattcaaagattctctgatttgcagttggttaaggaagcagggctttgtctgaaaacttgggggtgagaagaaaggaatgttaacgtctgcactttgggactgactttctccaggacccttaggaagaaatttagaacaaagaactgcagtcagagttcagccctcagttttgcccttatctgaggtctttgtaccagctgatggcattttccacttggtgggaggccagatttctgaaaaacaactcagtggtatatgttacagtgtaatctttagtttctacatggaaccgacgtcttgtaatcctaacttctttggctgttgttttaagccattattaccttctgactattaggttgctcattttcttctcagggctacctaggtgcctagaatgtcccttgaaggaactcaagattttcctttatttccttgcttacggaggtcgggagtgggtggcaagcccttaagaggggtccctgctccgcctcactcgtattaattctaggttcacctccctccactcagcacatacccctgcacccactgtactgaaccgtgggcagctcctacgatgtatggtgtttcattctgcagctctttcccatgtctgtgccttgttgcatgccactattccatccacctgaaatgcctttccctacttcttcaccaagctggacccactcacctcttctaatgcagttcagtcatccagatttaagacgcctccactgacgctccaagtcaaattgcttctgcaagttttatggagatatcatttatgtgccataaagttcaccttttaaaattatacagtccaatggtttttagtgtatttatagacctgtgccaccatctccataatctaattttaaaacattttattacccccaaaacccattaacagtcactccccaatctttcctccaccctcagccatagcagttactaatccacattttctctaaagatgtcccgttcagaatttggtgcctctcctctggtcataactgcatcccattagctggcctggttgtctttccggccagtctcctccagacaatctgagggtcttagcaggcagggaccttgtcttcagctttgtattctgagaacctggcttgatttgcaaacatgatagaacctcaacatttggttgaaaaaataaaggattttgcatttgaactatcttttctccccaaagcttatttatctactgcctcaaatatcagtattcattcttactctgttagggaaagcaggccttcttggtgacagaaaatgtctgacctttgaccagaattcctagtataagagaagtgggccgggcacgttggctcacgcctgtaatctcagcactttgggaggccgagatgggtggatcatgaggtcgggagtttgaaaccagcctggccaagatggtgaaaccccgtctctactaaaaaaaatacaaaaattagccatcatggtggcctgcacctgtaatcccagctactcaggaggctgaggcgggagaattgcttgaacccgggagacggaggttgcagtgagccaagattgctccaatgcactccagcctgggcgacagagcaagacttcttctccaaaaaaaaaaaaaaagaagtggagaatggaggaggagtgagcgtgttaaggaagacagagttgtactcagaagaactgccacagtgggatttgttgtcatccttaagcagtactgcttaaagaacttcttcaagtatccatttcttaagaggaccagttgattttcttccctaaaagaagttgtcctagcacatacaggaaccaactcagttacagaagtagtggctggaggctttggggtccaccagaaccgagtttgaattgaggctcttactctgacctcgtgtgaccttaggcacattgtcccctctgaggctcagtctcctcacttacaaaattaaggaaagaataggattatcatggaacataaaatcaaaatgagaccatgtgtttaaagaatatagtacaattcctggcacattgaaggctcaacaaacagtaacttttgcagtagttaaatgcaaaagttaaagttaaaactctggttttaaagacagaaaacccactgattctcgttaaaagaattttcttttaatgggagggtttcactagctcatattacaaaactgtgaactctcttctacctcttagacaccacaacacctctgacacaccagatgcgtggcggtatttccctgcacaccaatcaaacccttctccagcagacaccagctgggagttgcacaagcctattcatctagcctgagttagcagcagatccctcaagttaaggacacagtcctacaagaccacctcctacttcaggttccagtcaaaagtctgggcttctggaacttctgacccactgggcataaattggggttcccatgaccgcttccttgggttcaattaatttgctacaatggctcgtagaactgaaacacttacatttacccatttattataaaggacgctacaaaggatgtggatgaacagccacatggaagagatgcacagggcaaggcatgtgagaaggggtgtgagctcctatgagcctccacccatgcaacgtcaccaggagcctctgtgtgttcggctatcccgaagctccccaaatcctgctctttggggttttttttttttttttttttttttttttttgagacggagtctcgctctgttgcccaggccggactgcggactgcagtggcgcaatctcggctcactgcaagctccgcttcccgggttcacgccattctcctgcctcagcctccccagtagctgggactacaggcgcccgccaccgcgcccggctaattttttgtatttttagtagagacggggtttcaccttgttagccaggatggtctcgatctcctgacctcatgatccacccgcctcggcctcccaaagtgctgggattacaggcgtgagccaccgcgcccggccgctctttggggtttttatggaggcttcattacataggcatgactgattacatctttggcaattgatgattaattcaagcttcagcctgcctgccttctcccgaggttggggggtgaggctgaaagtcccaagcctctaataatgccctgatctttccagtgaccagttccaatcctgaagctatttaggggcccccagccaacagtcatcagtcatcttatcttcagagagataagacagtcttatccctctggagagtccacgggttttaggagcttttgccagaagatgggacaaagaccacacatacttcacaatatcacatcctgctgccctctgggttggccttattctccccttctgagcacagggactgtcagcagctctagatgcacatagcaaagtctcatcatcagagaaaagggcttctctcttcaagctcaggacactgactgatgcctgtagggacacaggctattccctttacctgtcaccaggggaagtgagggtgaaatactatggttagtgcagcttgaatcacatgcccatccttgtggtcggagagagggatgagttaacaaaagagaaaaggtcctgggcagacagaagcaatagtgtgactgtccagtgggttcttctttgcccactgcccagatagagccaatttatcaaagcaggggaactacaatagagaaagagttttatttacacatgtagagctggctaaacgggagatcagagttttactgttactcaaatcagcctttaccaaaatcagaagctagggtttctcaaggatagtttgggggaagggggaggtactaggcaatgggtgcttgctactgattggttgggggtgcaatcatagaggtgtgggacatcaaacatgctgagtcacttatgagtggggccacaggagtggttggcaggtccaggtggagtcatcagtcatcagacttgcagaaaacctgaaaagacatcctaaaaggccaatcttagattctgcaatagtgatgttatctgtaggattgatgggggaagttgtacgtcttgtgatctctggcatgagggttggcaattgtttatgtctacacctcagcagaattcaaattcctctcatcctagcctggtagcctttcattagctttacaacggcagctgaattttagggaagggctgttattatttaaactataaacttaatgtcccccaaagttagcttggcctaaaccgaggaataattaagggcagtttgaaggccaaaggcagtggaggttggttaaatcagacctctttcactgtcataattttctgtgataattttgcaaaggtggtttcattgggtgcctactcctgttttctcccctctttgctggaaagtgtaactttccagggcttgttaaagcaataaatgtatggtcatggtaaggcttggtggggaaagtctagggcttgaccttgggccttctcctagagaacaaccttgtctaggagaagctgtcccagctttaataagccaaataaagatgttcatcgaggcatagagtggtgttcagcatcctttggtctgctacctgcagagaaggcaccacatagactggtatggagtccagcagctgggtgaggcacagccctggtgagagctgcaagctcccctgggatgagacttaagggccggggcttctttctcaaggacgattaaacaaacaggggctcagagtaggggtaggagtcggatagggaagggaaaagagagattacccattgtgtggggaacatgtgggaactcagcaagtgatagaagggtatgcctttgtaaactaacagtctcagcaagttcatattctgccccacctccaaggtttagagtaggaagggtgtgtgggttgctttgatgtaaggctgtgtatactagagggatggtaggaggcagctgtggagaggtgtagaaatgagtcagaagtagacagccccgcccttggggtagaaaaacctgtatctatttaatccccaagtccctgggaccctttgctctccagcctatcaccagtgaggcctctctctactgtggaaggcttctgtgtccactctctcttctggaaggagttctccctagtcactcatctagtgctttaattccctttatcactttgaacttggaaagtttggtttgtctaatttaaatcttacaagagtatttgccaacagaataaatgattataataacacagcctctgaacttgacataggagacgcatctgcagagttttttcttgtgtgggtagataatgacttgcatttcgttcagaaggaactgactgtttaacaaatgagttgctgaaggcgcctcagttaactctcaaccactagtgtttattagtgcacttagacaaacttgagcatattatccagattctttacaatataaaacaaagacaacctcatagtttgttttactattctctcatttccctttatctgtttttaaattgcaaaaagaatgctagcttgttttattaagaaaaatgatgcaaaatatatgaagaaatatttagtaaattgacctgcactcttacaccctcaactaccttcccccaaggtaactaaagttaacaaattctgtgtttacacaactgcatacagacatatatacatacttatggaaataaatatatggaagtatggaatatgtaattatatcaatgttagcaatagaatcatagtatacacattattctggaattttctttttcctattaacagtatgtcaaataagatcaatatttatatcaatcttttaatattaacatgatattctttgctatgattggttgggacatgactgtccctctatgggactgttcccccaagagggacggtcatttaatattagcatgatattctttgctatgattggttgggacatgactgtccctctatgggactgttccccatagagggacggtcagactatttccaatttttgctaccatgaacaatgctacattaactattctcacgtgtatatctctacatagtattctctttatttcatggactagcttctcaaaactatagaattgttgatccttatgctatgcttatttttaatattaatagtgtcagattattttccaaaattttgttgtagctctctgtattagtccattctcatgctgctatagagaaatgcccaaggctgggtaatttataaaggaaagaggtttaattgacttacagttccacatggctgggaagtcctcaagaaacttataatcatagcagaagggaaggcaaacacgtccttcttcacatggcagcaggaaggagaaaaataagagccaagcaaagggggaagccccttataaaaccatcagatctcatgagaactcactatcacaagaacagcatggaggtaaccgacctcgtgattcaattaaactgccactgggtccctcccacgacatgtggggattatgggaactacaattcaagatgagatttgggtggggacacagccaaaccatatgactctcactattatcaacttgagaggttttcctgtatccttagcagctctagacctttttctccctttaaaatcttagatgtataatagtaaaaatggtatctcatttgtgtttaattggttttttcttgatttactcatgagattgaaccttttttcatatgttcattgactatttgcttttacttctctcagttgcatgtttatgtcttttgcatatttttcaattggattgcttgccttttgttctttttcttttctttctttcttttttttttgagataggtttcaccttatcacccaggctggagtgctatggcacaatcttggcttgctatagccttgacctcctgggctcaagtaatgctcctacctcagcctcccaagtagcttggacaacaggcacatgccaccacacctagctaattttcttgatcttttttgtctagacaaggtctcactatgttgcccaggctgggtctggaactcctgggttcaggtaatcctcccttctcaacatctcaaagtgttgggataacagacacgagccaccatgcccagcctcactttcttctaattgattttttttaaagttatgtatgttaaggattaatatttgtttatcataagtactgcagataattttcctagtccatcatttatcttttggctttatgatatgttaacatatagtttaaaaatgtattaatttcttaaagtcaagtatgtctcttttctttcacagtctttgaattttttggtgtttttaataagctctgccaggtacaggattatgtaatcctcctgattcccttaaaatagtttattatttaacatttttacgtttagatctctaattcatctgaaatttaattctagcattctttcttcagatgtataccaattatgttgttaacattttattagtcaaaacagccagattggtgaatttgaaacaccaacctgtcatatatgttgtgggtgagccacgactatctgggccagtggcatgggagtacaagaatttaccaagacagctgtaggtagagaaaggcagatttagtagagaacgtaggaaaatgtgttgcaaggaggcaacaggcaaataagcttgcgggaagctgactgcaaggagacaaaggcttgctggagattttataggattgttctcagcctgatggataacaccaaggtagggggagctaacttgcattcttctgtcagctgaggtgttttgataaatggaggcgtttgatggtaagcaggaagtttgtgaggtatgtgagttaccttcgcaggagggccatatgtcctggcccataaagaaaagcagacctatagcttttctgcttcttctttttgtttgtatgttctggaccatgaagaaaggctgattcctagcttatttgctttatctctttgctttcccctggtcccaccagcctgactccttttccctaattaggactccacagtatattaaattcctagatatgctttctgggctctgtattctgtttcatgaatctatcagttgatactgttagttgccatctattccatgacacatgtctttgggttatggcaaatatatcttgataacttcaagagggatgccaactacaataatttggttagagaaaaatcacataaagaaaaacagttgtcttgagatagttgagaactaattctgtcagtgtatttaaattaaaaactcagctgatggggaaatgagtactacttacaccacagtgcatttataggccatatttgtatatgattagcaaatgtattatacttaatggaatttttgggttcctacacatagattattttaaaatttttgtgagtgtattcttcacccttaaatcttgacaagaaatcagctttgaaatcttaatgtggccctatctctaggaaagagttcatttgatgtggggttcaagcatcactaatttaaataagtgtaggagaaatcaatatgtaagagtgtctaggagaaaccatctcaatagtgagatgtgaatttgtgattatttaaaaaacaaaattagttttctaacttttagaaacatataacttcaatcagccaacagatgcctgataactagaggaattttggttatctacctcgatcactagctaagagggaattctaattaaatattaaaatttatgttttaattataaaaatgtttaattaaatataaagggttcttattcttaagcaaggaaaacatttgtcttgcattatttgagaaccaatagatgttttttcattgagaaagcaaatgcaaatttcaaacaatccaccatttgtattaattagtagagttcatattaatacaattttattttaatgccttttggctctctttgaattgactcgtgttggggctcagccagatgacccttcaatgcctaaatcttttttttttttttttttgaaacggagttttgctctgtcacccaggctggagtgcagaggcacgatctcagctcactgcaagctccacctcccgggttcacgccattctcctgcctcagcctcccaagtagctgggactacaggcacccaccaccatgcctggccaatttattgtatttttagtagagatggggtttcaccatgctatccaggatggtctcgatctcctgacctcgtgatccgcctgcctcggcctcccaaagtgctgggattacaggcgtgagccaccgtgcccggtcttcaatgcctaattctaaattaacctccacatataattagaaatgatccctgctctttttcactgagcactggatatttgatagttaactttgtttttttttttgaaacagagtatcatactgtcgcccaggtcagctcgctgcaacctccacctcccaggttcacccaattctcctgcctcaccctcccgagtagctgggattacaggtgtacaccaccacatccggctaattttttgtatttttattagagacggggtttcactatgttggccagactggtctcaaactcctgacctcgtgatctgcctgccttggcctcccaaagagctgggattacaggcatgagccaccgcgcctggtggatagttaacattttattgagaattaatccaggtctgtagtcccccatctacaattttgaaatctaaagagttccgaaaactctagggcttttgaaactctgacagcaaactctgatgtgatatttatggcctttatccctctttatatattttgatgcatatatatttgtgtgctttaggggagctgccctaggcttcacttgggttgattcatagtatacattataagcaccattttacctttctcaaattaaaaaaaaaaaaattcagtaacaaactatatccctggttccagggatttctggtaagcgattatatagacttatatttgggaaaggctcagtggtgcttgccaaccccattctttttgttatcatcattcatgatagcattaaagactattaatagtgtcatttattgagtacttcctgtgtttataggcatggctctaaaccgagagcttgaggctgtcacttttcacatcgagccacatcactacttaatgacagagctgcatgggctacagctggtatccaaaccaggaattctactcctgcactctagcatttatttttacatctactatatatttgtccatgagatttttctcttcctccttagtatcctgttttacttctgcagtttggtgttctttgtggaaaatgggataagaatagtggaatatacgaggtaatccatgcgtaatgtagtttggttgaggcccttaagctcttagctccctccccgtgtcagttttcttataaaattggattccaacaccagctctgcccacttcacagggtgattatgaggctgtgataagataataatatatttcaaagtctttcaaagggctttgaaaggttaatgtgctctatgacacatgctacctttgacttcatccctctaaaaatcttcctaaagcaaagtaatttcaattctaaaacatgagaagtatcaaataattcttttgtgcttaatgttcagacttctaaacagaggttacctagagttggttactcagaagaagaaggaagatgatgaaagccatgatgtctctgagcatacactgaaatgcatccctcaactctcatgactttttaggaacccgccatcttcagagagtgtcagtgagcctgcagacctgcagtggttaaatcaatagttaatgatgttcatcatgtaatttgagcctctagtttgtttatgctagaccaactttatccatactccaaacaaattatctcttataattaccagcccgaagataaatctctaaatgtttttctgatgatagtgctatggttggcaggtgttaaaagtgcctcccagggacaaagattgaagacgagcttgttcccacaaatcctcgaggcgaggatgttgagctttctatcctgccatgtgcaaaggagccttgtatggtgccctgctaatgaaatctaataggcaaaggtcgtacatctttacaaagaaaaatgcaaagttggttgtgtgataaatgggctccatggggctcagtggacgcgatttagtgaaaaaacccgtgtttaaacagtcagctcggttgctcgctaatgtttacgccttaaatatcccctcacagtgattctccttacctggtagaatgattaaatacaaaaataagcattttgtatgtttttagtgctctaaaccaaagtgattggtcatctaatgttaatattaacattaaccaccagaaaaaaaacactttgaaacatttaaaacacagctgtaggtatttaaataagtcgttgtttaaaaaactacctaatttaaatgtgctattaaagtctcttaaaagaagaagtcttaggctctgtatgttttaatcactgctttcagaatactaaataatgcatgcaaatatgcaaggttttatccaaaaaattgttctgcttagaaatgcaaaaataagttaaatctggaattataaagagttaaataaatcagatattgttgaattgaatcactgctggttttaggagaagttaccagttcatttgctgtagttgtactgctgagccaagagacagttcaataaatcaactcaagcttgatggattcttcaattcattgaaatgagtgcatggaagagaaaagaaatctcttagtattccctctttgacaaaagggtatgcaaagagcctgaatggatgaatggttgattaattttgccagaaattttcttgacagcaggaaatatgtttttgcattactctgtttgcctgggatttatttggtagaatatgaattcttgcatgtaaatttgtacctgaggctatgttgctaaagtagatagctcctggtacagtttctgaatacgggacctgtaatatttttgtatggtcatgcactccacacctatatgtgctgccctgcagcggtgtctataaatttctgctgtcactgatgttagcagaacagtcgagcactgccagtgattcaatattgagcttggtttgaatgctcatctgtgcttgtctcaagaaaggatggggctggaggcaagcaactgccagagcttcataattccttgactcatcaacctggcagcttactaataaatagactctaacctgtaaataaggaagagaaggtacaaggtagcctcttgtgctttctatacagcaaggctacaattgagcacatttcttagttttatctcatcaagaaggaatacagctacacacgaaaagaacttggctgctgttgatgacagcagaactgtgtgcgaacagaaatggggtagcctctccatttaccatcttatactgtcccataaagaaggatgctgcaccacatagagtggccccacctttcccgggtcagtgtggagggtaggaaggcttgtggttctcaaaacctgtatgaggcaatagataatacaataattgcttccatttagacctcttctgctgccatgttcaggtactggaatactaggaagcccaagaatgaagtcatgtacaaagaagtgctttattttctccctactcgccggtctgaatgtttgtgttgccccaaacttcatatgttaaaatccaaatccccaaaatgatagtattaggaagtggagcctttgggaggtgatcatgtcatggggccagagcccccatgagtgggattattgcccttataaaagagacctcagagagaacctcaccttttctgtcacgtgaggacacagcaaaaagatggcagcctatgaatcaggaggcaggtgctcatcagacagcgagtatgtcaggatcttgatcttggactttccgtcttccagaactgtgaaagataaatttctgttgtttataagctactcagtttgtgttatttgcttactgcaacctgaatggactaacacaccattcttaaattatttaccttctgttcattttgttttccttctagaggtttacactggaacttcctctttcttttagataccagaccagaaattatccatagcataaagtatgtcatatgacattgtgcctgattttactttatgtggttttttttcacacacccacattgagtctcttgaaagcataccaccagagtgcttatactatttctgaaaataagtatatagaaaaagtatccctttacaaattttgaatacacacacacacacacacacacacactcacacaaaccctactaatctctaaggctgaaaaatattttcatcagctatgcaaatttggtatttcatattttctccttagattacagtaagggaatgaaaaatgattaaaagataatgttatgtgaaataagaaatttccttgtatgttcttatcagatatgatgcccaacctcaaatgagaacaaatgacgcatgtaaatgtactagaataaagcttagaaaacttgggttccagttcctgctccagcatcaaataactatgtatgatattgggaatatttttgaagctttttgagcttcagctttctcatctgttaaatgggtatcaccaattcttatcttactaccagctaaagaattggtgaacatcaattaagattattttgatcatatgtagaaaagccaatattgttctatagacataaaattttactttctctttaagtattgttacacttttaagttttgattctttgcatatgataatatcaacctttgtttgatggaagcttcttaggctggtgcagcctaatgagtgatcctaaagtcttccatggtcagccttccagttactcctgctattcccttgttctgggctcgtaggagtccagctggtaggagccccagttcttttggtatctcggtaacttaattgtcagccactacggggctagctgctagtcataactggcataaaaaaaaaaaaaaaaaaagaagaaagaaaactatcttcctcaataaaatgtgggggactctgcttctaaaacgtaaacaagtaataatttggaagaaaagcttttctctttgtgtggcctctgctcctgcaaatgttcatttctctgattataatcagtaggttttcataagttgtggcctcatctctctattcttcagttgtaagtgacagaaattcaactcaattttgcttaaggaaaacaacaaactgctctgttgataatccaggatagatctagcttctgatactcttggactcaaactccaagtgtgccatcagggcttgccttttttccaccccttccctctgtttctcagtgttgtccttgtcctcagggatattcctctctccatgactccccaggatggctctgggtagctccagggcttgccttttttctccaccccttgcctctgtttgtcagtgttgtcctcatcctcagggacactcctctctccatgactctccaggatggctctgggcagctctagactcatgtgatcctagatctccgtgtctcagaggaacagggagcttcaaaaacccctatggagtctttgagtagcctcgctcaggtcacatgttattcctgaaaccatcaccgtggccaagtggatggaacagagtatggctaggcctgggtcacctgccacacctagagctcaggttaggggtaaagacagccccatgtcagccatatgaagttaggaggattcctccccaaaagaagggatgacagacaaaaatgcttatgtctgtgacaatctgaactcatttttattttaaactgttatttctaatattccaaggactttgctagcattttatatgaactatctcatttaatcctgttgataaactatgtagtaggtattattattctcattttcagatacagaaaccaaggcttcgaggttaagtaactcacccaaagttgtgtaatgagaagtggcatagctgagattcaaatagaagtctgtctcatttgagagctagagggtcttcctgacttcactatctcaccatcttttttcctgtaggttcgatgatcttaaaatttaaactttttttgtgcttgtaccaccttctcctctgtccctgattcgacccctacctcctgaacgtctttccattttaggattattaaatcattgaatatcagaactggaaggcaccttacaaacatctacccagcccctcctttccacagaaggaggggagatcttctgtggaacctccagggaggtcctttttgtggacttctgagtgtttgaatgctgccaaatctggaaacagacaaatcaactcattttcatgatgcccagacttgagtagcccttccattgaataacctgaatcccctacatagaaggcattcagtaaacactgttctttgataatcaaactagtttttggctacaggattactgaaatcattaacgttatccatctttcaaagaaaaaaaaaaaacaactaaaacttttaaggaacagactgctttaaaaaaaaatctttttggatcacaaagtcagtagcaggaaaaaccctaagagtaaaatgacagttattatattttcctgttctgtgaattgtgtgaagattagggcaaattaattaattatcttacctcttgatattgtacaggcaaattaattaattgtcttacctctgatattgtacaaagttcatagggccaagtgctatggctcatgcctgtagtcctagcactctgggaggccgaagcaggcagatcatttgaactcaggagttcaagtccagcctgggcaacataatgaaaccctgtctctacaaaaaataaaaaaaaaaaaattagccaggcgtgcctgtagtcccagcttcgtgggaggcagaggtgggaggaccactggggcccagagggtcaaggctgcagtgagctgtgactgtgcaactgcacttcagcctgggtaacagagtgagaccctgtctcaaatagatgaatgaatgaatgaatgaatgaatgaatgaatgaatgaatctgtggtttatgagtattgcaaagacactagagagccaaggaatgaagtcagatatttgtggtctggaacaagctgtgttgatgtgcaatatagcacttcagtccatgaagctgtgttgatgtgcagtagcacttcagtccatgaagatgttgccatctgttttcttgatgttggggcagtgctgtattgtgtgtgttgggtggtactgggggaggctgagtactgtgatgcaggagcaagcacccatacctgtggctactcaggcagaagaccgatctctctcagcaggtagaaaaatgactctaccgttatttccccaagtaaccaggtacctaactactttcagaaatttaaaaaaatctatataaatggcagcaatggagacgagaagcagatgtccagttctgtcttctgaggtatttttgtaaactcctctttccctcttgccaagagaaatcggtggtctgttggtggccttttagaatgagagtgagaacagagttgagaataatggaggaaaatcagagagatagatacagacatacagacatgaaatcttctaatcatgagccaggcccagggtccagtggctgctggaggtctacttctgtctctcattcagtccagctcagacagagctgtcagcaagagacgtgctagaagctgggaacagcaaagataaatgctctttgagtcttactaatgtgatgtctcaagccccaggaaaaatcagacacagacaaactatacaacctagacactacacattcttaagttaatcaggcctgctaaccagacactgtggagaactgggctgctcatctttgcccctgtataagaaataaggaatccttagcagttgcttgattctaaagttagagtaaatgaaaggcaacagaaggatgattcaaaacacatgtcaaaaaccaagccaaatgtgcgtgggtggtaagggcagatttctcagaggttctagaccatgatagacaaagagaagattgcctttccccaaagaatgtatcttaagtgtaattttcttttttcttcttttatttttatttttacttttttgagacggagtctcgctctgccccccaggctggagtgcagtggcactatctcggctcactgcaagctctgcctcctggagccattctcctgcctcagcccccagtagctgggactacaggcacccaccaccatgcccggctaattttttgtatttttagtagagacagggtttcaccatgttagccaggatggtcttgatctcctgacctcgtgatccacccgcctcggccttccaaagtgctgggattacaggcgtgagccaccgcgcccggccaagtgtaattttctatgacataaatgcacgtatcagggtcccttagaggacctgatgcttgctagtggtgggagcagcgggggtgtctgagtaaaaaggtttgactcctttactataagcaaaggaggtttgctttgatcactaacaaaatgtaattgcaagctactctttcttttgtttagtttattacataaataatacatgagtttgttcacactgtaaaggaatctaaataatgcagacaaagctcaaggcctttttataccctcattcaaataccagtcctttttctaaataataagtgtaccaatgaggtgtacatttttctggaattttctccttgctctttttggtacgtactagaaagatacaattttgttttgtaagtttaaaaaatatatttattgttcctgccgggcatggtggtctgcaatcccagcactttggtaggccaagatggggggatcacttgagtccaggagttcaagaccagcctgggcaacataatgagaccctgtctatacaaaaaaataaaaaaacaaaattagctgggtatagtggtgtgtgcctgcagtccagctactcaggaggctgaggcagaaggatcgctggagcctgggaggtcaagactgcagtgagctgacatcttaccactgcactccagcctgggtgacagagcaataccctgtctcaaaaaaaaaaaaaaaatatatatatatatagatagatagatagatagatagatagatagagagagggaatatatgtttatagtgtgtgtgtgtgtatgtgtgtgttaaacttgattttcccccatataataatatgtcttggaatatttccacagcagcaagtatatatatctttttcatttttcatagcataaagaaatatgaaatatgaaagccccattgctcattaagctatcttctgagagaggttgaccagcaagccactcttctgttgccatattctcagtgtgaaatcatttcctctatcatattgagatcctgcattctacttagataaattccacactctctgggttccgcattttgcaaaagagagatgttaagaatgtttggtgtttcctttcagattgcctcatctctttcgtctctttatttttttgagacggagtctagctctgtcgccaggctggagtgcagtggtgcgatcacagctcactgcaacatctgcctcccaagttcaagcgattctcctgcctcagcctcccgaatagctgggattacaggcgtgtgccaccaccacactcggctaatttttgtacttttaatagagatggggtttcaccatattggtcaggctggtcttgaactcctgacctcgtgatctgcccgccttggcctcccaaaatgccaggattacaggcgtgagccaccgtacccggccctctttcatcttttatttcaggggtagaacctctcctttttttatggcttctggtagcattggttaatatcttactactcaacatgtggtgcacagaccagcagcacagccatcacctgggagcatgtagaaatgcagaatctcaggccccctgagtcagaatctgtggtttagcaagaatcccaggtgatttgtgtttaagttacagatgcgtgggttaatatatgttgtgactcaaaatcacaagattatatgtatcttttttctacaggtgaggaggtagggctgcacagttacctctgacagtagaagctctctttattgatcttcccttaactaatgtactgaactaaatgacattgtccactctaccctgtaacgtatactcatcgataaccttagctgaatgctgacagccagccaaaaactctctagactgaacaggtgtgtacatatggattagctgcatttaatgtttgccaagtatcagctgtgtttgctccaaacctatttaaatcaattgtacatgttaatataattacacaatcttgaataaactgatgaaataggactaaggtagttatttctaagattaatgctttggaaagacaagaaaatgaaatgaaacatgctctcaagaaaaatatggtctcaaattaggataatacagctataaaaaattggcagacttgtaaaaatgtaggagtctgtgttcagatttttttacatatgtctaagtttttattccacattaaggaaattgaaattagaaatggaaaattaaattttatatgtatggctgcaacaaagaagttggaaagctcctataaacccatgcttttaaatattttaaaagaaaaaaatactttaaaagaccttggttctacatgaaaagattataaatggatgcattattttatgtttgaattcaaataagatcgttttattttattttataataaaacatttctttttaacagtttacctctttagccaaatttttaattaaccaactccttgtcctaatcatatcagctaatataaaaaatatacagtagaagaatgctactgtatactttcatttctaaagagccaagcaaagtagaagcaagaattttataccttaatggactctggctttttttgttgctgttgttgttgtttgtttttgacagataggaacctgaggctcagaaaaatgaaatgtcttgctttagataaaaatgtggttctcaaattgtggttcccagaccagccacatcagcatcacctgagagctcgctagaactaacagccccagacctactgaatcagaaacgctagaagtggggcccaggtgtccgtatttttagaagccctgtaggtgattcatgagttcagctaaagtttgaggatcattgacttagatcacatcctaaagacagcacctggagaacccattgctccattacactctctggttcatttgtcccacactttctccaaacctgagagttcttttaatcagaaattctgtagctccgtaatttaaacaatggctgcaacaaaagaatcttagggcaaaaaggactatttctaacatacataaggtagaaagacaatctccaaactgtccctgaaaatggattattctaatgccctaattgacaaataaacttactgttaatggagttgtagctgttgggtcttggctgctgctgactaccatctatgtattgagggctgattgtgtgagagatcctaagctaagtgttttatacattttctcattttataagtaggttattatactcattttccagaggaaagaactgaagcttagcctaataagtaacttgcctaaaggtgcagagataacaggctgtggagctaggatgtgagtcctgggctgctgtattccaaagcctattcttttaagcactacattttattatttgctcatttggagaagttagggctgcttatttaaaaacacacatacgcaaatatgaaccaagtttttggaatttatatttttccccagtgactatcaaagttcagtcaatgactagagaatagaaactagaatcactgatgtagaaactatgtgtagacaatacaaattgaaaatatttctttatgtcaatacagactcctgttctccaccctacctgcacattaatcaatgtacctccttgaaaaatatactgatacccaggcctcacccttaagccaattaaatttaaatctcatggggtgggctgtgagtacttgtatttttttttttaacagctccctgggctattcttaggtatagccggggttgagaatggattgagatgtgaacatacaggtttagataattcaggcccagaaatgggttttaatgggttttgatgagtttttccacatagcctaagttattgggcaaagatgctggtagcctgttatcaggcaagaatgctagccattcattgaacagttgtaatgccccatgagtgtggcataacatagctataccctcaaatatctgccatattttaggttaccattatggagataaaagatagatttttcaggaatcctaaatataagatttggcatttaaaaatgccctgtttaaggccaggcgtcggggggctcacacctgtaatcccagtaccttggtaggctgaggcaggcagatcacctgaggtcaggagttcaagaccagcctggacaacatggtgaaaccccatctctaccaaaaaatacaaaaattagccaagcatggtggcttgcacctgtagtcccagttactcggggaggctgaggtggaaggatcacttgaacctgggggcagaggttacagtgaaccgaaatcaccccactgcactccagcctgggtgacaaagtgagaccctgtttcaaaaaaaaaaaaaaaaaaaaaagccctgtttacccataactaagttggaataatagtacaactttgcttgacaaaaaaaaaaaaaaagaagaagaagaagaaagaaacaactctggaaaatacctgggtaaacttcattttcctggaataggaagtagatgttttataaaatcttggctcttttaaaccatcctgctgttttctttgtttaagagaatcgaagcttggtttcatttataagcacagcaatctaaactaaaagacaattgatggaaagatgttatttttactggcttcgaaaaaggaaatatttggccaattaataaaaagtattcatgtagatgctccccatccctgatttacttttctagttctcctgcctgttaaaccaggcagaattaaccatgtgtcttgctttatgtagtaagatttctgaaacagttgagtgtgacttgaattattttgtaagctcctaagagtctcctgctgtttttctctaaagcagtggttcttaactggggtgattttgccccacaggggacatatttagttgtcataactagggcagggagcttgctactggcatctagtgggtcaaggccagatatgctataaacaccctataaggtacaagacagcccccacagcaaagaactgtccagccccaaatgtcagtagtgccaaggttgagaaaccctggtctaaagttattactttttatctgttacgaatttaggtttttttctgtatttggcttgcttagagcccttctataaatcactcttgtataaaataatgacaattaaattactactcttgttccaccagagtgagcccaggtattctctgcctggaaggctgggcctgtagaacatttcaaatttgtatttaaagcattttaatgcctcatagatggtactaatagcaatggaagtttgacagttatagtggagatttgagcttctgaagacttcaagggccaaaaagagaaacaccctcatgttgacctgaaagaataaagattaaggaggcttgactgctttttcctggattgtttaaatagtacaatgtattttcaattgattcagcataattttcattctctaagcttaacgcttttatagatttatcactcctctttttaataccctccttaattggagcgtaaaataaaaattaacatgaaaataaaagttaactaaattgtctcactaaacttatctttccaagcatcatgattctccctacaactaggcttggttggttggaactaaaatggggctttgggaaagtatctgatgagtgtgcatgtgtgtgttagaatgtatgtgcgtgtgcctgtgtatgcgtgttacaccttcgtgcttgatgtctaaagtgcccacctatgggcttatctgctcagcatccctcttctaggaagtgactcttacccaccaactttgttataactggtgtggtgtctgtgatttgtggtctttccaatctacctcaattgttttgcccagagataggcaccgaacccaagtgggaacaaccagagttctttctccagggttttcaaactcatgaccaaaagggagtcgtgactcatttggcaaggtctacacagagatgctgcagccacctgtggttcccaccgtgtagaggatgccagttggctgcaggacagcagaatgcagccagaagaggatggagaggcaggacgacctgcatatccctggcaacccctgcccttctcccagcgcgtgctcaggctcttcttggcttctgtgggaacactccccagatcctgctgacttctttctctacttaaatcagttacagttaagtttctgtgacttgtgactgagacagtcatgacagcagcatccttacctgaagagggattcctccagcttctcaaacacagccatctccaaacaaaagtaaaaccacaaaccccagagtgtatctgttttcaggagggggtttctggtaattagcttagactgcaacaaatggtacacacagactgctggctctgcatgtgtgctccaagattggtgtttaccctatatatgccaatttaagaatgtcataaagtttatcagtgagcaaatggaaatgagcaagaacacatagatgggtggtgaaaggtgtgtgccttgatagatagattttttttttagacttcaaaaaaaactaattactttcattgggttgatagcaaagggggcacaaccatattccccacttaagcttggcgatggttgggtatttttagcaaatgagttgtcagcagagaggcttcattagacccatcaggatatctgcccatgaagaacgaatcccaaactgtactgacactttcattgagccaaaatgatgaagcacctctgacaagagccatattgtgctccccatgcaaggagcgtgaggaacaaaagagacagtttgatcttcatttggtcaggttaatattgacacagcttagaaaaatcagaagtgtgtgcaatgcacacgtgcagaaagtgctctggagacttgccttgtggtttccataaatcagaaaggggaacccagagaggaaaaaaggttttcctgctttcttgaaattgggttcaaactagatgatttatttttacaaaggaaaataaagctgtcagtgttcaggctcatggctcaaaacaagccaacagggactttttttttaatctatacataattatagaaatcattcattattattatttttatctgggagctagagtgtagcccaggttctaccatttcaaaaatagagcatggctaatgagcggggtttcattacatgtgtgtcctgaattattcgttcccgtatagaaatccttataaacatacagaaacaaaaaggggcccttaaaggaaacagcagtctagccctttccttgccaagcacttaagtccatccaatagaggaaagttttcctgattatgggtctgtccttaaagaaaatgtaaattaggctgttagttaatgaggtgatgacttatttgtctttgattggttgtgaaactcccccattcaagtattcaatctattattaactgcttgtaagagtgcctgggactacttttattccaggcccaactctctgtctgtgtaacaacagtgcttctttatggaagataggatgggatggaaaaagatgggaaagaattttaactcccttatttgaggtgtgcctgaaatcagcccacttcatttcaagaagttctttttgtgtgtgtctgtgtgacagggtcttgctctgtcacccaggttggagtgcagtgatgggatctccgctcactgcaacctccacccccacccaggctcaaccaatcctcccatcccagcctccccagtagctgggaccacaggcatgcaccaccatgcctggctattttttttttttttttttttttgtatttctatcagagacaggtctcaccatgttgcccaagctggtctcgaccttctgagctcaagtgatctgcccgcctcagcctcccaaagtgctgcgattataagcatgagccaccgcacccagcctgatttcaaggagttcttaacctgtgctttcagatgaattatctcccaaacattttctctctcccttcattaatgatatgctggccgggtgcggtggctcacgcctgtaatcccagcactttgggaggctgaggcgggcagatcacaaggtcaggagatcgagaccatggtgaaacctcatctctactaaaaatacaaaaagttagccgagcgtggtagcaggcgcctgtagtcccagctactcgggaggctgaggcaggagaagggcgtgaacccagaaggcggagcttgcagtgagccgagatcgcaccactgcaccccagcctgggcgacagagcgatactccatctcaaaaaaaaaaaaaaagaaagatatgcttataggaggtaataaatatttgctccatgacaagaaagcagtgattttcagttttcaataaacatgttatctccccctctattcttgaattcttcaactcaaaagagggcatcacaagagcttttgcttgaagaactcttggtttttcttttcatacttacgacatgcttaacctaaatcaagcatttgcagatggatgacattattatgattgcctttcatagttgtaccttagtgagaggacttcgcttttatggtcttctgttaagaaacctgctaagtcaggaaaaaaaccaaaccaaaccaaaactaagcccctttagcctctctactcccctctggcaattctaatttctagtttctctgagtttttgaacgtaagtcagcttatattgggagcatctttagataataagatttgtacatactgaatggtaaagcaggcttcttccgttgcttgtgtgtctaagctaccagagcaagaaagtctacgtgaggatacttctggataaccagtgattatgccacatctcctgttttcccacccattgcctgtgtacacttgcatgcccaacttttcaaaagtacatactactgcaagaatatcacaacattcttctttatagaagttttgggttttttcaattttaggatcttacatatagttaacagtcaccctacagttctattttatagagcagatgaataactggaaattgctcacaaagcatggtaatgttcgatcttcaaaagacgtaagcagcgcattattgttagcaattgtcaaaatcaaggatgttgcttgcttgtgtgtagtgacaagagagaaccaacaccaaattgaaataaatggagtagttaaaaactatttttattaaaaactgaattaatcaataatatctttggtgaggagggatgttctcatttaaggataaaacaggagtgaaaacatgggctctgaagttaaactaacctgggtttaagtcccatttgtcccacatacgagctgtgagctgggtggcatcagttacttaaccttccaaagcctccattttctcaatgcaaaacagagaccatgttacctatctcacaggggcatcttaaagtttagatgagatgatgcaaagtacttaacagagcacttaatgcagaggcaatacttaattatgtcaggcaatatactattgacgtaaatgaagattatattggcatttatatgtgttacatattcatgtacatattgtagtagttttaattttcacaaaatattttcacaaaagggctctctttttagctataaagaatgataatatgtactgtctaactttcttttcaaaatgtgatgtctaatatagttttaatagacccagtgaatttttactactatgatgctttggctgcctcataaaaacaagaacaatagagtgtaggctgggcgcggtggctcacacctgtaattctagcactttgggaggctgagacaggaggatcacttgaggtcaggagttcaagaccagcctggccaacatggtgaaacactgtctctactaaaaatacaaaaaaaaaaaaaaaaatagcagggtgtggtggcacacgcctgtaatcccagctactcaggagactgaggcatgagaattgtttgaacctgggaggtagtggttgcagtgagccgagatcacaccactgcactccagcctgggcaatgaagagagactctgtctcaaaaataaaaaagaacaatagagtataaataaatgacatctggaaaaaacatggaaaatatctttgcttaccaattaaagagtgtacaaaaaacaaaataaataaaatctcttaatttatgcatgtggtgttctcataaatcattttcctgtcaaaattatcagactttattattgctgaatgttttaaatattacaatggaattttggttgcataaatcataatcccttcaagttagaacatttgtgtacatacctcagcatttttcttatatctcgattttaaaaaatagccctcattctagaaataaatccatgcagactgtaaatgtcaaactgtactcttaaatttcagtaactcagcagtccaggctggccactgtgcttgcaaggtagttaggaattgtcacactgtgtttgtaagactcactgttcccaaaaatgcagccgtacacactggtgttttaatcttggtaattatttttatctgcaagcattttactacaagtgacatatactcacttgatttttccatttcctgcaaaaacaaacaaacaaacaaaaaaacccagaaataacaaatctgggaattgcttgttcctgacattagaaagtaatttattcttaataaaagtcttactcaatatatttcatctgtaatttgtgaggaagacaacactataataggtatagtccagaatgcttgacctatgtgggaagtattagcaccaggagtaaaattcactgaaggtcatttggcccttggaggtgaaacggtggaaatgatgaaaaagactattcattgtgatttagctgaaggaaaaatcactatacatttttttaatgctttaaaagctgttgtttgcatagtggcagacagaagctcattcactgagtctaacttggaattaaggatagaaaatttgataatgagataaacactgacctatcagtaggttttataccttacatcttttagacggagtctcgctctgttgcccaggctggagtgcagtggtgcgatctcggctcactgcaagctccgcctcctgggtttatgcccttctcctgcctcagcctctccgagtagctgggactacacgcgccggtcaccacgcctggctaattttttgtatttttagtggagatggggtttcaccgtggtctcgatctcctgatcttgtgatccgcccgcctcagcctcccaaaccttacatcatttttatatgagtttacttcatatttaactttgtgcaacttcctccatcatctcacatctaagaattttacatgtaaatcacttaaatgacttaaagatgtgtgtgattattatttgaaagttcacatatattatggagaacataaggcaaaaattgtcataaccagtccccacagacagaatcttgcaaaagtactttctatgaatcagatttaatcccataaatcctgagaataacctaaaaaataataataaaaaaacaggaaaggaaagaggcttaatatttattgtctactatatgtcaggcacttgaccagtcttttatatatgcttttagttctcacaacagtcctatgaggtgagggtttacagatgaggaaactaaggctcatgaaaatgaagtaactgatttgagtcacccagctagtgagtgtcacagcgagggttaacctcatgtttggctgactcgtaggtctttactaccttggcatgagctccctaaaataatggagagacacaataaggtttcagaatagcaatttggctaaattatgacaactttaataaatatcagtgaatcttaatgtccattgtatattagaattcaatacgtattatttgaatacgtctagaaatgacattctacttttatgtggttataaaaattatcttccagttaacactgtatcatgagtgttttcctgtgtcattaagtattctttgatagcataacttttaatagcagtttaacaatcctttgtgtgaccattctatgatttacttaaccattgctctagtgttggacatttagattgtttgtaagttttagttattaaagtaataatccagttaacagctttgtccacaaatctttgtgtacatatatgattatttcgttaggatatatttctaggctggacatggtggcttatgcctctaatcccagcactttgagaggccaaggtgggaggatcatttgaagtcaggagttcaggaccagcctgggcaacatagtgagaccctgtctctacaaaaaataaaaaaattagctgggcatggtggtgcacgcctgtattcccggctactagggaggctgagtgggagaacagcttgagcctaggaggttgagtctgcagtgactcatgatcataccattgcactccagcctgggtgacagagtaagaccccaactctgaaaaaaaaaaggaacatatatttttttaatcttttttttcttttagagaggagctctcactatgttgcccaggctggtctcaaactcctaagttaagtgattcttctgccctggcctcccaaagtgctaggattacagatgtgagccaccatgctcggcctaaaaaaaagaatatatttctaaaaaaaagtttgatagtgcccatttggaaatatttaccaataataagaaaagaagaaaatttgtgttattaaaggatttctttgattaatgagttcagatctatttattatccatttgaattccagttgtgaattgtcttttatgttttgtaacagtttttccattggtatatatccttttttcattgatttatattaactcttattcttgaggacattaaaccttttcctcctagctaaaaaaaaaagtaataataataattgcattgggaaactttcagtaggctttaagcaggagagtgtcattattcaatttatatttttaaaagctgcctcttggggaaggggtggaaaaaaaataaaataaagctgccccttgatgctatgtggagactacattactgagagaccagctgtgatgctgctgctaaagttctggcaagagatgatggtggctgtggctaggacagcaatggagatgaagagatattagagacgtgtttagactacagatatattttaaaggcaatgttaataggatttgctggtgaattacgtgagagatgaggaaaaaaacaatcaaggataattcctagatgttgggttcgaataactgggtagacggtggtgccatttaataggacagacacaactgaggaggcggtgggccatattttacttgagatacttattaaacagctacatgcagatctcatgtgcatgtagattctgtcatcagtggcagacaaatggttttaaagccatgtggctgggtaagatcatcaaggagaaagtggaaagagagaagagaaaggggacaggaaacaaagttgggtgtgaatatttggaggcttaataaggaagagcaaccagcaaaggcaactgaagggcagtcggtgaatccggagaaaaacaaggtgtgtggtgtcaggaaggtgaaggaattaagtgtttcaaaacagagggagggtcaatctcatggaatactgtagagaatcaagtagggtaagaaatggaatgttatctttggatttggcaacctcggagtgcttggtacttttgagaagagagtttcagtgaaatgacggagccagatcccccaccagggggactgagaagacaacagaaggtgagcatgtgtgagtgatgcaagaagagggtttctgtctctcaaggatatctactgaaatgtttacaagacattctttacatcacttttgtttcacacgatgcactgaagctaccagcagacagcataaagactgcctttttctgagcaatgaaaaacgtaaaataggatattgtgagaatgaaaggtttcactgcatctgcactttcagctgtgaatggagtaatctatggggcaccatcactatcactatcttggttttgatattagttcaggtacagctgtattatttctgttttcctcctctgggttataatgagcatcaacttcttttaggattcttgggacctacaccttagcttttttgaccaggaaataacaaaggctttttctccccacgtttccaggctttcccactcattcccaaactagaaattactcagacaacaagacacgtgacctctaaaaatgtttagtcatcgacccttcggaatcacgagtgacaaagggctgtgacagggagcaattgccattctccctaactgctggcattagtatgagattttgccagccaattcccagttgcaatgattcataaagtaacttcctaaattccatgcagcagttataggctggggtcacaaatgcagaaggtgtgtgtggctggtggggggggtggtaagttcaacaggaagtgcttttattgtctaaatccttagtaaattgaatgggagatatatatgtatgcacgtatataattttaatttaagtggggggaacattttggagacatttgagcagattaacaaatagtatttgtatacatgtaactaaaacagtaatttatcaggtagaaggcagatggggggaataaaatgccaacctgtatctacagttgggttgtgttgatgatgaagtgctgtttattcagggccagcctagcttgtcagcaacataagagccaccgcagcacatgactccctgcgtagctagaagacaataataaattatcccctatgcaaacagcaccggcataaaagcagaacaaacacgctctgcctcctggaatcctgaagattctcactcattcccttgtttaattctgttttaaacatgaaactcttgacattatcccaaggccagtaagatcgaatctggcttggagagctgatgagaatctgttttagggttattgtaaaatgtattttgtttctctaacttgcctaggtgattcaaatagttttttgatttatcagtgcttcatttggtcctgtggaatttggggtcacccaggggaaaactgagctagagcacttgagggacatgatgaaaatacagtctctgcagccataaaaaaggatgaggtcatgtcctttgcagggacatggatgaagctggaagccaccatcctcaacaaactaacatgggaacagaaaaccaaacactgcatattctcactcataagtgggagttgaacaatgagaacacatggacacagggaggggaacagcacacactggggcctgttggggggttggggggcgaggggagggaatctagatgatgggtcaataggtgcagcaaaccaccatggcacacatatacctatgtaacaaacctgcgcattctgcacatgtatcccaggacttaaaacaaaattttaaaaattaaattaaattaaaaataaacatacctataccattctgaaaaaaaaataaagaaaaagaaaatatagtcttgatccagtgcccaacctgctaaatgagaacctgtagcaaatcggcccagaaacgcacaccctaaggggacttttatgatgaggttgccataggaacaaagagctggcagtgtgagtcagtacaagtcctgtgacagtgctgagagagtccaaaggactggtttgtaggaaaatatatcaactaataaatccctctctggagtagtgcttttcagatttcaacgtgcattccaattcctaggattgttggaaaatgcagatcctgcttcaataggtctagtgttttgccggagactctgcatttccaacaagatgcctggtgttgccaatgcttttggacttgagtccatcgaggtcctagagccatcagtttaacacagaagaattaaaacagtttggagatcagccggcatttttgaataggaaactttccacaagtgtggctttgaacagtgttgattctactgattcttaatcttatgctcagatacaaataaaacctgccccctcttgtttcagtgacccggccaggagtgtagtgagaattttgttatatgtaaaaatctcttagaaatgtgtgtcttctttcaagggtttataaatgtatttggaggcctttatatacataacgaaaaatacttagaaaggaaaactgtaaggcttattgtgctgaagccttcagttactggaaataagttgtagttagttgtagtctctttttatttttttcagggctatatctttttttacagttcatagttgctacaagtttagcaatgaggttcttgattcaccctcaatgatggtttgaaataattttatctgttgaacacacattgtatatgagttttgattatttaaaaaatctccttttaaatatttaatgtctttctattgtggatgaattaattttttaaacatctacttaaagattgttattaggccatttggaaaataaataaaaagcatgaaagctgacagtacacactttggaacacacacttccaaaagcatatgttccaaacgcatatgacttatatgatcataaatgtcattacaatagatccttgatgttcatcagcatgagaatagatcctgagacctttgtggattcgtatgtgcaattccttgcaaccaaaaaagggaaagtggcccagtaagatgccagatgagagtggctgccttggagtagacagcaaagcctcctcgaaacatggaagcccgtgatgggcggggcctgcctgcctacctacccagggtcttgtgtgccctcttcagagcctcacagaccttgagattcaactcagcagaattacagagtacgggtatgatggctttttgaagtggctggtaaatagtctaagccacaaatacccaatccacgagtttcaaagaatgaccacatagacattaatgtgggtatggggaaatctgcaactctctgcacggcatcgttcacatcttcacagtggctgtcctaggagatgtgtgtggcacttccactttctgtggtacacatttctgtgttgttttagtatcttacccatgacaggcataattctgattgctattataatcagaaaaaatgaacagaatcttttaaatcccttgagtgcacatcatggtgttttttgttgagtgacacaatagactgtcagttgatgaattatgtggtatgatcatatatgtgctaggatagatatatatgtggactatgatagaagattatggatgatggagcacaggttgattttgtgtacctgtctctccagtcatccgacaaacatttcttgaacaactagtatatgccaggcattatgttaggggctagcatatgttcttcactgtacttctttaaggaagagagacacccacacagagaaagtggctctcattgtagttaataaaactcaaagaccggaccgggtgcggtcttacgcctgtaagcccagcactttgcaaggatgaagtgggtggatcagttgagcccaggagttcgagaccagcctgggcaaaatggcagaacctgacgcctacaaaaaaatacaataaattagctgggcatggtgatacacacctgtagccccagctacttgggaggctgaactgggaggattgcttgagcccaggaggcataggttgcagtgagccgagataacgccacagcactccagcctgggtgacagtgtgagaccctgtctcaaaaataaataaataagtacatacatacagtaaataaaacttgaagcagccagaacatttttgcaaatgatatgagccacatctgggtaatctgaggtattgggatccctttctgcaattattcattcctccacagctgccacatagaacaagcaaatctgacatcacagctcttttaaaaatctcccagaattctacactggaataaagatcacccagtaaactcagctatgttgattcgtaggaatttctccttggagttaataataatcattagaaaaaaaatacaggaagaaataacttcctcctattcttattgtgataaattgtaacaatagcagacattcgtatatagatcctataagcgacaagagggaaaataggatttgcaaattaagcatctgaataaatattttagaaaaaaatgtttaggatatctgttctttgtctaaactattattaataatggcaaaaactcctttcttacatggtttgggaaaacaaacaagcaaagtgtattttaagccatagcatgaaagtttccactccttctcaaagcaaactgtatttcacttgccttaaataataaatatctctcctaaatacatcataagactggacaaatttgtggaacaactccccgcagctgggcagtttgacattaatatcaaatttcctgttgtcgtttcagaattgtctatttcacagcaatattaccagtgacttgaaagcatttacagacaagtttggttttgatgtcctcatcctgttctccagctatctgtcagaggagcagcagccgagacgacagattgctgtgtactcagaaaacatggagctgtgcagtcaggtgagcccctcctctgaccccgtcatgttccctctgtcctaacctgctggctctcagaacacacagtgcaagacagaacagattggtggctcatgagcaattagcccaagaggtagagtcctagaggtttgagttttaggaaatgatgggggtactttttacatttggccttttaagaaagccccaaaagcatttctcttcttgactgaatccatagtgcaaaacattagctctttctcattcccaaaagagcaagttctcctttgggtgctattttcttctaggactgctccctgatcataactgacaaggtttagcccctgtcccaggaccggtttggtgcccagtgtttaagacctggtgatctgatgctttaatcaaagttagtttgtctccaggtaccagaactctgactaggtaatcagttatcctccaggttgatagctgagtcttttaacccaaggcctaggaaataaaaaaaaaaaagaattagataaattaatcaaaataggccatcggatataccaagccaggtgtacttaataactaatatgagaacatacatgattcattataataggagccacacggggccccagatgcttcattacttatttctcttcactaatggattcaatgccttatgtatccatgggtggctagaggcacagtctctgcccctttcttttctacatcctcctttctgtcccccaagagctccactgtagctctcttgacccatgcctatgggtactctcgggctctctcaagtccgaatgtgaaagagcatctcctcctctgacctgcatcaccagcctgtggttttttcatcactttcctctgcatttggtttcaaagctaaatttcatctttggtcactggcttcccagggacgggatttaggccttggaagcctacaacatggcggctttcacatcacttttagcagtagacccctttttcaaaccaatgtgaaaattggttcattggaaacagacaaaagtagaagagcagatgaaggagttaaaagctcttgagttgaccccagtcctcctctcttctccccacccaccctccccatcctagcaatagccagaggtggatcgctggaatcttaagcaacagagtcctggctctggcctagcgagttcctcttggcctgtgtggtcacaccactggccgagtcagcctttgcagctaggttgcctgggtacagaactcaggctccagcacttgttagctgtgtgttgctggacaagttatttaatcttcctgtatcttcatttcttcatgggtaaaataggaataaaaagagttcctaccttgtggaattactgtggtgattaaaagagataatgatcataaaacccttagaaccatgcctggcacatgaaagcactcaataaatgttaattagtagtagtagtagtatctatgtgagctccatggtggtagtggtggttgttattattattattaattttatctctactaatcccgtggggccatttcaaaggcccagcacaacaaaatactcctgacattccttaaaaatcagaaagccgtaacccagttctggcctcacactgaccatccgtcagtgtccccttgcctcccaggttagctttgcctgttttgggctccatgcctccgttacctggggtgaaagggactgaggggtcctgagtgctgttcggaaagatcagactgcgggagcatctttgtctttcctactctctcttttgcattctgaagctatcagaggttcaagcagccctggctgccccctcccaaacaacagcctgtctcctgatattgtccccttattccaacacttttcctatagttgtcagcaacatgcattatctctgcttttttgcaactcgaattacattgctattggaagatggtattatattacagttaggaaagaataggtggtttaaactcctttacccaaacgttcaggagccttcaaaatcgagcacctggattttgaattaaacagagagacagttggatagaattggagaaagggttggtggtacagtaatcagaactttctaagtttgagatcttctttttcagacagatgaacacagattaattttatatttaaaaattaagcgagataaattgcaaagtgcaattgcaaagtgcaacagtgcttgagtgctgacacaaattcctgtgccttccgacagatttgctgtgagctggaagagtgtcagaacccttgcctagaactggagccctttgactgtggctgtgatgagatcctggtgtaccaacaagaggacccttcagtgacttgtgatcaggtggttctcgttgtcaaggaagtcatcaacaggaggtgtccagagatggtctccaatagccggacatcctcaacagaagccgtggcaggcagtgcccccctctcccaggggtcttctgggattatggaattgtatggttctgacatagagccacaacccagctctgtgaatttcatagagaaccctccagatctcaatgattctaaccaggctcaggtggatgccaatgtagaccttgttagcccagacagcggactggctaccattaggagcagccgctcatccaaggagagctctgttttcctcagtgacgacagccccgtgggagaaggtgctgggcctcaccacacccttctcccagggcttgactcctacagccccatccctgaaggggcggtggcggaggaacatgcatggtctggagaacacggtgagcacttcgacctcttcaattttgacccagcacccatggcttctgggcagtcccagcaatcttctcattctgcagactactccccagcagatgacttcttccccaacagtgacctgtcagaaggacagctccccgctgggcctgaaggacttgatggcatgggaaccaacatgtctaattattcatccagttcacttttgtcaggggctggcaaagatagccttgtggaacatgatgaggagtttgtccagagacaagacagtcccagagataactctgaaagaaatttgagcctgacagattttgtgggagatgaatccccttccccagaaaggctaaaaaatactggaaagaggatcccaccaacacccatgaatagtttagtagaaagctcgccatccactgaagaaccagcctcactctatacagaagatatgacccaaaaagcaactgacacaggtcacatggggccacctcagacccatgcacggtgcagcagctggtggggtggtttggaaattgactccaaaaatattgcagatgcgtggagttccagtgaacaggaatctgttttccagagccctgaatcatggaaagagcataagccaagctccattgataggagagcctcagattctgtatttcaaccaaagagcctcgaatttacaaagtcaggtccctgggagtctgaatttggtcagcctgaactgggtagcaatgatattcaagacaaaaatgaggaaagcttgccgttccagaacctgcccatggagaagtcacctttgccaaatacatctccccaaggaacaaaccacctgatagaagactttgcttctttgtggcattctggtcgctctcccacagccatgcccgagccctggggaaatcctacagatgatggtgaaccagcagctgtggcgccattcccagcctggagtgcatttggtaaagaagatcatgatgaagctttaaaaaatacctggaatttgcacccaacaagcagcaagacaccttctgttagggacccgaatgagtgggccatggcaaaaagtgggtttgccttttcttcttcagaactactggacaattcacccagtgagataaacaatgaagcagctccagaaatctggggcaagaaaaacaatgactccagggatcacatctttgcacctggaaatcccagttctgatctggatcacacatggactaattctaagccaccaaaagaagatcagaatggtttagtggatcctaaaactaggggcaaggtatatgaaaaggtagattcctggaacctttttgaggagaatatgaagaaaggagggtcagatgtcctagttccttgggaagattccttcttatcttacaaatgttctgattacagtgcatccaacctaggagaagattcggtgccttcccccttagataccaattattccacctcagactcttacacatcaccaacatttgctggagacgaaaaggaaactgaacacaagccatttgctaaagaggaaggttttgagtcaaaagatggtaactccacggcagaggagactgacattcctcctcagtcactgcaacagtcatctcgaaatcgaatcagttcaggtcctgggaacctagacatgtgggcttcacctcatacagataacagttctgaaataaataccactcacaacctggatgaaaatgaactcaagacagagcacacagatggtaagaatatctccatggaggatgacgtcggggaaagcagccagtccagttacgacgaccccagcatgatgcaactgtacaatgaaacaaaccgacaactcacacttttgcacagcagcaccaactcccggcagacggcccctgacagtctcgacttgtggaacagagtgattttggaggatactcagtccactgcaacgatctcagatatggacaatgatttggactgggatgactgcagtgggggtgcggcaatccccagtgatggtcaaacagaaggatacatggctgaaggttccgagccggaaacccgatttacagtgagacagctggaaccctggggcttggagtatcaggaagcaaatcaggtagattgggagctccctgcctctgatgagcataccaaggacagtgctcccagtgaacatcacacattgaatgagaaaagtgggcagctaattgcaaacagtatttgggattctgtcatgagagataaagacatgtcatcattcatgttaccaggctcctcacatatcacagattcagagcaaagggaattgcctcctgaaatccccagccattcagcaaatgttaaagacactcattccccagatgcgccagcagcctctggaaccagtgaatcagaggcacttatatctcatcttgacaagcaggacacagagagggaaaccctgcaaagtgatgcagcatccttggcgactaggcttgagaatccagggtattttccacacccagatccatggaaaggtcatggcgatggacaaagtgaaagtgagaaggaagcccagggagccactgacagggggcaccttgatgaagaggaggtgatcgcctctggtgtggagaatgcctcagggatttctgaaaaagggcagagtgaccaggaactgtcttctctggttgcatctgaacatcaggaaatctgcattaaatcaggcaaaatcagctctcttgctgtcactttcagtcctcaaaccgaggaaccagaggaagttttagagtatgaggaggggtcttacaatctagactcccgtgatgtgcaaacagggatgtccgcagataacctgcagccaaaagatacccatgaaaaacacctcatgagtcaaagaaattcaggtgaaactactgagacttcagatgggatgaatttcacaaaatatgtatctgtacctgaaaaggatcttgagaaaactgaagaatgtaactttctagagccagagaacgtgggtggagggccacctcacagagttccccgaagtcttgattttggggacgtccctatagacagtgatgtgcatgtcagcagcacatgttctgagataaccaaaaatcttgacgttaaggggtctgaaaatagccttccaggagccggttcgtctggaaattttgacagagatactatttctagtgagtatactcattcaagtgcatcaagtcctgagttaaatgactcttcagttgcactgtcctcctggggccagcaacccagttctgggtatcaagaagaaaaccaaggcaactggagtgaacagaatcaccaagaatctgaactaattaccactgatggccaagtagaaatagttaccaaagtgaaggatttagagaaaaacagaataaatgagtttgaaaagagctttgatcgcaaaactcctacatttttagagatctggaatgactcagttgatggtgattccttttcctctttatccagtcctgaaacaggcaaatattctgaacattcagggacacatcaggaaagcaatctaattgctagctaccaggagaaaaatgaacatgacatttctgcaactgtgcagccagaggatgccagggtcatttcaacaagctcaggttctgatgatgacagtgtcggtggtgaagagtcaatagaggaagagatccaggtggccaactgccacgttgctgaggatgaatccagagcttgggattcattgaatgaatctaataagttcttggtcacagctgatcctaagtctgaaaatatttatgactacctagacagctcagagccagcagagaatgagaataagtcaaacccattctgtgacaatcaacaaagcagccctgatccctggactttctcaccattaacggagactgaaatgcagattacagcagtggagaaggagaagagatcttctccagaaacagggacaacaggagatgttgcatggcaaatatctcccaaagcttcgttcccaaagaacgaagataattctcaactggaaatgctgggcttctcagctgatagcactgagtggtggaaggcctcaccccaggaagggagactaattgaaagtccatttgaaagggagctgtctgactccagtggtgtgttggagataaattcttcagtacaccaaaatgccagtccctggggagtaccagttcagggtgatattgagcccgtggaaacacactatactaatccttttagtgacaaccatcagtcaccctttctggaaggtaatgggaagaactcccatgagcaactctggaacattcaaccaaggcagccagacccagatgctgacaagttcagccagcttgtaaaattagaccaaattaaagaaaaggactcaagagagcaaacctttgtgtctgctgctggtgatgagctgactcctgaaacacctacccaagagcagtgtcaggacaccatgctgccagtctgtgatcatccggacacagcctttactcacgcagaggaaaatagttgtgttacatctaatgtttcaactaatgaaggtcaagaaacaaatcagtgggaacaagaaaaatcatacctaggtgagatgacaaattcaagcattgccacagaaaattttcctgctgtcagttctcccacccaactgataatgaagccaggctctgaatgggatggctctaccccaagtgaggactcccgaggtacctttgtgccagatattttacatggcaactttcaagagggtgggcagctggcctctgccgcgcctgacttgtggatagatgctaagaagcccttcagtttgaaagcagatggtgagaatcctgatatcctgacgcactgcgaacatgacagcaattctcaggcttccgacagccctgatatatgtcacgattctgaagcaaagcaagagactgagaagcacctcagtgcttgcatgggacctgaagtggaatccagtgagctttgtctcactgagccagagatagatgaagaacccatttatgagcctggacgggagtttgtcccatccaatgcagaactcgattctgaaaacgcaactgtgctgcctccaattggctatcaagcagacataaagggctcctctcagcccgcctctcataaaggttcacctgaaccttctgaaataaacggtgacaacagtacaggtttacaagtatcagaaaaaggagccagcccagatatggcaccaattttggaaccagttgacagaagaatcccaaggattgaaaatgtggcaactagcatttttgtaactcaccaagagccaactccagaaggtgacggttcttggatatcagacagcttttctcctgaaagtcagcctggtgcaagagctttgtttgatggtgatccacatttatccacagagaatcctgccttggttcctgatgctttgctagcctcagacacttgtctggatataagcgaagctgcctttgaccacagtttcagcgatgcctcaggtctcaacacatccacgggaacaatagatgacatgagtaaactgacattatccgaaggccatccggaaacgccagttgatggggacctagggaagcaagatatctgctcatctgaagcctcgtggggtgattttgaatatgatgtaatgggccagaatatcgatgaagatttactgagagagcctgaacacttcctgtatggtggtgaccctcctttggaggaagattctctgaagcagtcgctggcaccgtacacacctccctttgatttgtcttatctcacagaacctgcccagagtgctgaaacaatagaggaagctgggtctccagaggatgaatctctgggatgcagagcagcagagatagtgctttctgcacttcctgatcgaagaagtgagggaaaccaggctgagaccaaaaacagactgcctggatcccagctggctgtgctgcatattcgtgaagaccctgagtccgtttatttgccggtaggagcaggctccaacattttgtctccatcaaacgttgactgggaagtagaaacagataattctgatttaccagcaggtggagacataggaccaccaaatggtaagaaacattccattcttccacttccaagaaactgctgcgttgattaaactagtgcatatttgtaagacacactcttcctaccaatgagggtagagagaaaactaactacattttcaaggcatgcctcactaagtcctgtattataacagcagtaaaatctagtgcatatgtaatacctattcctgatagtgcacgagaaaatcgaatgactctacaaaataaaaatattttctagctgggcgcggtggctcacgcctgtaatctcagcactttgggaggccaaggaggggggatcacctgatgtcaggtgttcgagaccagcctgggcagcatggtgaaaccccatgtctactaaaaatacaaaaattagctgggcgtgggggcaggtgcctgtagtcccagctactcgggaggctgaggcagaagaatagcttgaaaccaggaggtggaggttgcagtgagccgagatcacaccattgcactctatcctgggtgacagagcgggactctgtctcaaatgaatgaatgaataaataaataaaatatataaaaaatattaaattacctcttttagatgatcatttgcaaggatcacaaatcacacaatgtgttaattaaacctttttctcctcttctcactttcaacttccacttctaggtgccagcaaggaaatatcagaattggaagaagaaaaaacaattcctaccaaagagcctgagcagataaaatcagaatacaaggaagaaagatgtacagagaagaatgaagatcgtcatgcactacacatggattacatacttgtaaaccgtgaagaaaattcacactcaaagccagagacctgtgaagaaagagaaagcatagctgaattagaattgtatgtaggttccaaagaaacagggctgcagggaactcagttagcaagcttcccagacacatgtcagccagcctccttaaatgaaagaaaaggtctctctgcagagaaaatgtcttctaaaagcgatacgagatcatcttttgaaagccctgcacaagaccagagttggatgttcttgggccatagtgaggttggtgatccatcactggatgccagggactcagggcctgggtggtctggcaagactgtggagccgttctctgaactcggcttgggtgagggtccccagctgcagattctggaagaaatgaagcctctagaatctttggcactagaggaagcctctggtccagtcagccaatcacagaagagtaagagccgaggcagggctggcccggatgcagttacgttgcaggctgtcacccatgacaatgaatgggaaatgctttcaccacagcctgttcagaaaaacatgatccctgacacggaaatggaggaggagacagagttccttgagctcggaaccaggatatcaagaccaaatgggtaagcaaaaagctagatttattttttttcctgaaaagcaatttatttagaaacctgggaaatggttagaggttatggaatatgaggaatacctggatgatagcagctttgcttatattgaatgcaaggcacaccatcagtaaaagcagctactagataactataaccataatgataatttatgtacattttcagccaaaaagccccttcaattttcattcagtcttatacctaccccccaactgccaccccacctacttgaatacctacatgactcttcaacaggcagttgggaatacaaggaagtgacactaacatttaatcagcacctactatgtgcaaggcagtttgcatacattatctcatttaatcctaacatgccagtggggggaatggaaggagtagggttgagtagggggattcaaggctcagaaattttctataatttgcctagaattaagtaaccagagtgaacacctgggattcgaagcttgccacctccaaagcctgtactttctcagttgacacaccgcttagcatacagaggcattttcatattttcaaatacaaggcattttctggttttatgtaagcacctaacttatagttagataagagacaggctccacagcagtctccaaatctcagtgtaacacattcattccctaattggcagagaaattggcaaactgtcattaaatcagtgattcattcattcattcattcaccatgtggtttttgagagcttgctctgtgccgtggttctgggtagccaatgggcatatatcagggaataggatgtcatcactgccctcaagcttccagtctctgctgaaactgtttagcattcttcatttctcttcatttgtgtttatgaagcccacctgcttccagggacaaaagaacaaattgtgaaaagtaacttaagtaacggggaaagtcatgttttctccttaaaatgtaatagagaaaagatatcggccaggtgcggtggttcatacctgtaatcccaacaccttgggagcccaaggtgagtggatcacttgaggtcaggagtttgaaaccaccctggctaacatggtgaaaccccgtctctactaaaaattcaaaacttagctggggtggtggcagcacctgtaatcccagctacttgggaggctgagacaggagaattgcttgaacctgggaggtggaggttgcagtgagccgagatcgtgtgactgcactccagcctgagtgacagagccagactccgtctcaaaaaaaaaaaaaagcgagaaaagatatatttttgctactcagcttgggagtgtaaaggactatacacatcacatacccacagtgagtcaaggaatctggattccagcctgcctctaccatgactgattatacattttaggattaatcccaggcttaggttttctcatgcgtaaaattagtgagttgggctgaaagatctcaaggcttcctgcagtattaaattctgggaacttaatttgtgtggaaacagaatgtgtccaggggagctttggcattcacaaattacatttcttgatgaaaggaacaaggacaatggaaagaatagctggggtatgttgaggattagccaagtgcagaaggggttaaaagctctaccatattccagggcagcttcataaatccagacattgtcagctggcctaatccttctttcttcctgtcaagctattttcttccagagagaccccagatccgttatcagaaagagagtagcagatggatcccagcagccctgctggcattgttatagattgagctcagaactcaggcagccatgagttggctgagctattgtttggcttcttgtgtgcattttgcacatgccccgagatccaacagatgacagtcagtgttcaattgtgccaccagcaccttttctttcaacaagatttctttgctcatccctttctgctcagcttttgtagtactgaaacttttctcacaatggggatggggcagattttccctccggcatgtgtattatcttttgcataaataatttactgtgaatgtgtaagtctccctctgtgctagattttgggagaataaagagttgtctaaaactgtggttctctaagtggggtcctaagaacagcagcatcagtatcacctgagtacttgttagaaatgcaaattatcggctccgactcagacctccggaatcaggaactctgggggtgaggcccagccagctgagcttcagcaactcctgatgccctccaaagcttgagaaccactggtttaaaacatactgtcagccgtctaggagtttacagtttaactaaagagttagacataagtaaaaaggtagatagcagtgtaatatttaagtcaagctagtcaatgcccaatgtcagtttaagtataaaatgggtactaactacaggctatttgctgttggaccaggtgttaagcactctgcgctatttcactttacatagggcaaccctgcgagacaagaattatacaagtgaggaaataagaggagagatatctgtttcgggcgcctttatggagcaggcagcaggaatggcttattctctgtcagacacaggagacagagtgcccagggcccatgatactttaaggagcccatgagaatattttcttttatagtcagaagaaaaaattattatactttcaagtggatttgtctttataccaacaaagttataaaataaatttttaaaaaatgttttaatgacagaaggggcttatgaaggcactcctcaaggggcttatgaaagtcactaaaggaaaggtcataatttggaaaggcaaagaagagggtaagaagctagctgagtgaactgggatgaatactatgaaggaagccatggggacaggaaggtaatcacagaagcaaaacaatgagatagctgtggtttcccaaacaaaaacctggaaacatcttctgacacataatctgatcatagaacagaagatccaaaatcaagaccattctgcaaaaaagaaaattaagaaagcctcttcttaaatagaaataggttcatagtatgtgcaatatgactcaccagctgcaaatcagcttcttccctcccctccttcagcctcagcctctcttagctgccaaactgttttgagagctgcaagccacattttgaaaatctgagaaagcatgagaaaaatgccttttctcctcatatgccacctactgactcttgttaacaaaacttgttactagggctgaaagataacctctctcccttgagatttgcagcactgcattcatgttccctaggatcaatctttccagaatcctttgccaacaccttggtcatcctccagctatagacctgtccagcaggggatcaaataccagttccccaagacagtgatggatgtgcctgatctttcctacatagtcacaaagaacatttgcagggtaatctgtagcacacagacctttcttaaaaggaagaaacatttagctgtttattttaaagaaagcatgattggaagaatgatgtgtgaagaaaggggtaatttggttacatgttagggtttttcagaaaaacagaacaaataggagatatctgtatttagatctccatcttgctatctagctagctactgagagaattttaaggaattggctcatgcgattatgggggctggcaagtctgaagtctatagggcaagctggcagcctggaaactcaaggaagagtcagcattgcagtcgtgaatgtgagttctgcagggctgcaggctggaaatgcaggcaggtttctgggctgcagtcttcaggagaattccttcttcttcaggaaacttcagactttgctattaagacctttatctgattggatgaaggccccctcacattatggaaggtaatttgctttactcaaagtctgcctatttcaatgttaatcacatctaaaaaaatacttttacaacaacatctaaactggtgtctgaccaaataactgggcaccatagcctagccaagtcgaaacataaacattaactatcacaggttatagtaaaaaatctgatctatatgttaaacaaggattaagtcattaaaattttaaaagtcactatctgaattatatgaaaatgtgataatcgatatatagatatattggctttccatagatatgagcaaggaaataatgtgcaagggaattttaaaaaatcatttccaagaggattgagaaaagggatgatattcaactgatgaatcttttggagatacaggcagccatgggggatggagggagggggtgggggtggggtggggaaggagaagagaggaaatcgttgtgtcatgtacttttgaaacagtattgagacatcacctgaccctcatacttgtggagctgtatcttgtttcctagctctgtgaggtgaggtattcagtattccctgaaataaagatgaccttcgaacacagtgtatttggttctatggtgatctgtctgcatcttttctttttaaattagtaattttcaccttttttcatgtctgataacattgtagaaaagaatttatctttctgcttatgagtgacaccgtgagatctttttgtttttcgtgaagtcagactttttctgtctatgacttatggttggggagtttagtacattgggtcttttatccacgtgaatgttgaaaatgagaaatagattttaaaaatcagttgactctttctctcagtgttggataatgggaaccctgagaaacatcaggcagaccaagctgtaccccagttctgaacatttgccgtttctcagaggtgagttgatgctctctaaactccagtgcgcccttgcctattcaccatttttgggctttgccctgtaccaaacctggaagaacaaacttagcactgactctgtgttcatttatttttgtaattatatttgatctgttggtgtggtatgttggtgagttggtggtgataagtatcattaaaagtcctttgccgggcacggtggctcacgcctgtaatctcagcacttcgggaggccaaagcgggtggatcacctgaggtcacgagtttgagaccagcctagccaacacggcaaaaccccgtctgtactaaaaatacaaaaattagccaggcatggtggcacacgcctgtaatcccagctactcgggaggctgaggcaagagaatcgcttgaacccaggaggcggaggttgcagtgagccgagatcacaccacttcattccagcctgggtgaaagaccaaaactttgtcaaaaaaaaaaaaaaatcctttacatttgcagtttaattcaggacttagtctctttccttcatttccttcttctctcttgctttctctctctgtcatgccctccacccacttctacatttctggccagccctacccagagcagactttccatagtaagtgcttgcagactgacaaatagattattttctttggtccacccaaatgacacttgagatagacagggcaagtgttcctctccccatttcccagccagatgagcaaactgacttaacacatgaactgcttcatgtcatccagaaatgagaaagtggtgaggttaggacctaaatttaagtcttctctgtctagcccagtggttgtcaatgaaacacagctgcccaaacaagcatttctcttgagctgcttctataggttgatgttttcattcctgttctcccgttatctcgttgaaaggcacataaagtgtaacaggagatattttgagacagactgagccagaacccatgcctgactcctcagactgtcttgtgacctactgggcttttttgatacctgagtaaatatttgctcccacggtggatctgtgagtgcttgtgccatgtcagtgggctgctccccatctgtggtgtgtgggaccaactcgagtggttggaggccagagggaagggagagcatcaaagcccctcaatgttcatttacgttttccaaatatttataggtgtggtattttgtggtgagggattttacagccagagagagccacaagtgccaagatgaggtggtgcaactctgtttccccgtgggaggaacgcccacaaaggagtccatttgtgttgtattggcttctagtttgaggaaaaacccaaggtgcttctctggctggaaacttgaaacatcacaactagtggcattgcttgctttagggggaaaaaaatctctatgaaaattgctggtatttgaggaagacaagaagccatgactttcgaaagcagggtatattcgcatatcaggggcacagcaagaaagtgatgacacattcaaattaggaaaatttgagagatttaataaagagagtatttacgaagatggaggcaaagtgtgaggaactcacaaggaatagtgcgtagcccaagaacaggagcagtacggctgttattcttcctagaccccaggagtggggagacagagtgatgaccagaacccagaaagactatttcaggtagaaaaggccaccctgaaaggcatagtgacctagtgtgagggacacggccagcgggaggcactcccgcctcttcccccgcatctcccaccagggatcctcactggtcaaaacctagtggaggctgggcgtggcgcctcatgcctgtaatcccagcattttgggaggccaaggcgggcagatcacttgaggtcaggagtttgagaccatcctggccaacatggagaaaccccgtctctactaaaaatacaaaaattagctgggtgtggtggcgggcacctgtagtcccagctactcgggagactgaggcatgagaatgacttgaacctgggtgggggaggttgcagtgagccgagatcatgccattgcactccagcctggataacaaacaaacaaacaaacaaaaaacctagtggaagtcggagggtgagggaggcttggggcagaaagcaaaatggagaaagtaggagagtagagctgacgaagcaaacagaagctgttcagtgcagctagccgaattggagagtggtggacctcagcctctgaaaactgtcctgagatgttcctgtgcacgattagttaactgtttctccagtacattggaggatcagtttctgagatctatgtaagagttcttcaggaacaaaggctatcaaaaagtcagtgcaggattgggtaaccctttgtagaagtccaagctgccggttctgaaccagcagggaatacttgctgacgtcggagacattttggttgtcacaactggggtgggtactgctgtcatctaatgggcagaggccagggatgcagttacatatcctacagtgcacaggagtgccccccgccacacagggttatccagccccaaatgtcaacactgccagtgtcgagaactctgctccatctctctgccttattttattgctactacttttttttttccatctgaaaagatcttctatttacttatttatttaattgattctgttgcatctgtctccacctatgagagtataacccccaagaaagcaggagtttggtttgtcttgttcatcacggtacccctgttgcttagaatagcacctgccacatgttagacaccccataaataggcctgattgaatgaatagaaaagaaagggtagtttgctcaacataatttgcttctaatgacactgtgataatttctggcatttgttgcttcttttcccaagggagatgtgctagttttagtttggaaggaatatgcatctttcttttctcaagttaccaaatccatctttttccttcttttgtaatttgaggccatagttacccattttcagtgttcccatgcctttcttgttcattacagttcctccaagattctttcagcctttcagttttcttagagttttgttagtcactcatcctcatggggagaaaataggtgtgtctgttcaattttccttcttggtcatctgttgcctataccatgggtattataatctcttcaccttgaaataacttctcctggctgggcgcgctggcttatgcctgtaatcccagcactttgcaaggctgagtcgggcagatcacgtgaggtgaggagttcgagaccagcctgaccaacatggtgaaatcccatctcttctaaaaatacaaaaaaattagccaggcgtggtggcacacacctgtaatcccagctacttgggaggctgaggcaggagaattgcttgaacctgggagatggagatcgcagtgggctgagattgtaccactgcacttcagcccaggtgaacgagtgagaccatctcaaataataataataataactttttttattagagaggaacatggttttatttaattagtcatctattataccatcaactcaagcagctgttgataatatgtaatcttcaaagacctttttatatttattttttaaacttccatttattaaataataatttaaaagtattaattaggctctcagagaataactaaaactccactggagaatttgacatctacgtgccctttttttcaacataatagaatgctatttactgcagttaagcagtaattcttatttaaaaaaaattttttttaactgcctttgtataatgaataaaataatgcatttcctcaaatgcccagcatactctgagttaggactgttttgccctggcacaatctgtgagaacatcttgcaagacaaaaaggagtattactggtgataacctatgtcccacatttccatttaatgaagtattacttaaaatgtttttaaggtatctatgattggcctgatgacaataacttaatcactgtgcctggccaactgctaagttccaaaacagatattattatttaaaacagaattaggccggatgtggtggctcacacctgtaatcccagcgctttgggaggccaaggtgagaggatcacctgaggccaggagttcaaaaccagcctggccaatatggtgaaaccctgtctctactaaaaatacaaaaattagttgggcatggtgacacatgcctggaatcccagctactcaggaagctgaggctggagaatcatttgaacttgggaggcagaggttgcagtgaaccgagatctcaccactgcactccagcctgggcgaacctgggcaacagagctaggctccgtctcaaaaaaaaaacgaaacaaaacaaataaaacagaattagttacagtgtctgttctgtagccttcagttgctgcctttcccaaatggggaaggaagccccttctaatgagccagcacttcttaaagacaagatccccattttcagcctttgccctgggcagacattcccaagatacaaccagctccgaagttattttttctcccctaatgatttgggaaaattcacccatgcttttgctgaacctctgacagccagtgaccctgcaaagtgacaccttcctgtgggccccacccccgtctccttcatagctgaaagatacatggcacgtgagaaattatttcatgactattcataattatgaagaattttgtaggcttttagtttaaataaagatagaaaatttgcaccttcttcatctactccctttcttaccataagaataggagctaaggccgggcgcagtggctcacgcctgtaatcccagcactttgagaggccaaggcgggtggatcacgaggtcaggagttcaagaccagtctcaccaatatgatgaaaccccgtctccactaaaaatacaaaaattagctgggcgtggtggtgcacgcctgtggtcccagctactcaggaggctgaggcaggagaatcgattgaacctgggaggcagaggttgcagtgagctgacatcacaccacggcactccagcctgggcaatggtgcaagactccgtctccaaaaaaaaaaaaaaaaaaaaagagtaggtgctaacatctcttaagcacctaccctggtggtcatctgctgagtaattcactttcccattccattagagttaggtcaattggagattacctaaaattgcccatccccctattctgccatggtcccctcctcacctgccccccccatcaaaaaaagaaaaagattatgtaacattggatatttagttatttcccaaattgacattttgctagaagtctttggtttatctgataatatatattttttgaagatcatacaaataaacacatgcctttctattttgtaaacatttcattaatactttgtttgccttaattgtgtcaatatatctgctggcatttttagaattaataatagtagtagtagctaacatgtactgtgagtttattttaacccagagtctctacataggttatcttaccttttttttttttggagggggggagggggtggagggagtctcactctgttgccagcgctggagtgtggaatgcagcgatgcaatctcggctcactgcaacctccatctcctgggttcaagattctcctgccttagcctcctgagtagctgggactccaggcacgtgccaccacacccggctatcttaccatttttaaagaacatcatgattactgtccattctgtaaatgagcagtcttaaggtgccatgaggtttagtaacgtccacacttgctaataagtggtagaaatcagctttgaacttggccttgtgactgcagggtccacaggttaacttccacacccctttttctcccagtcgctgaagtcgtactgatcttagacaagcatcctaactttctctaggaccgaagctggacttccttatgaatcctgctatgcttccacagtccattttattatgatcttaaccattgttcattcaatgaaaataattacattgctgtcatataggtatgtgctgtgaaactacaggatttttttttaaaaagaggtttcaagagaactaaattccttacaacttgtgctttgagcccattcacatccagtctcactcgggagcaggagtagcagcagttttcctcaactgacataaaaattaaagagcatttttgactccacaacgtgggtgaaagggtatcgtatattcccaaatgaaactcagcacagccccagctgtgccccctagccacagcggctgcatggggagatctgggaggcaggtgatcatccttatttagatgtgccagagatcatgtgaccagaaaatggaggcgaatctgtatttccagttaactgctcagaagagagatgctgaagagctgtagtcgtgcatccttctcaccctccgttagaaagcctcctctcatcctcagaaggtaggtgggtcctggtgtagcttttaggagatcggtacgggaaggacagaatgagatggagagtgttgttctcaaagactaatctcttgctgctgggaagttggcgggggagacgggagggggatgagaggatgccgaattctgcccagccccttgcaactgacagctgccagctgcattttattccgtatccactcatcctagaaaagcttgtggtcgttatgctgtccccgcccctttcttggctatcaggtaatcaggaaacagactttgcacagctgtaatcattttgttttcctttatatttatgatgaaaatggagagagaaaaataaaaggaagtgacagatttgaaactgtttgggactattgcctaatgagaaatataatgtctctttggattatttgacaagcaggacagctctggtagagaggcattttttaaatgttattactaattgctattgaagctagtgcatctgtttttctaaagaatcttgtaacctttaagtcttacctgagttttaagctgcagaaataggtcatcctcaaacatgggcttatgttgttccctttgtcttttcaaaatcaagaaagaatactctactgaaaggatatcagtatttcactgagaaactaagttatgtgagaaagtaaaaaaattactacctggtcagtttcaaccaggaatacacaggttattaaatttctgtgtggtaactagaaaacaacggtagactcttacctagtagaagtgatttaaagtgtgactctgccagagatcagggtactggccatgtggatgaaagggaaagggggcataatctccatccactgccccctctttgatgtgaactgttgacatggtttgatcttatgtaagctgctatgtgagtgcagcttccaggaccacttacagccagatggctgccctgcgcccctcctgtagagaaaatgggagcggctcctgcatgagtctattccaaaatcttcatctgatgaaagttttcttagaatcataacagataatatgcacggaatgtaaaatctggaataattagattacgatgcctggcaatcaaaaaaatgacccatggaattgctcttaattgctaagagaaacttcctatctgggaggtaaaataaaacaaaacggcttttatggaaatgtctctatgggcaaattaaacatttttagggtactgaaagctcagtactctaaaatggtgtggaccttgttccccaactcagaacaacaagatgaggttattgtcattggaagtcagcagcacctaaacatccctgtgagatgtagctttgtaatgcaaagttaccctttatgtcctaaataaggtttaatgcctcatagatacttgaggatagtgagccagattctccttcctattaacaagaagtcaaattaactttttttccccaatggttagtgctctctttggtacatcccagtgaacttctatttacattccacttggtttctcaatcttgagtggctttgtactcctgggaagattatctctccaataagagatcacagtactttcttgagtttttaacttcaccctttctagctagaggacaaggtgcagggtttgcacataggttcaggtacctgatataggttacagtgcaaaagcttaggtttatctacagcaaataaaagctgggtttttttcctacttaactagcctggaattgcttgccctctgtttgctattgtcaagattttgcaggcagaggctttacatgaaccaagttcctgccagagtagtatttgtatctgggatggtttctcaattccttaccaatccaagttaagggtaattggtagttgggggaaggaagaaggggcgagaaagggcagaaggaaaagtagagaaggacagattctgtcccctggtatcttgtctgccaggttgacaaagaacatggctccttctggattaatcctggcaggaatcatgagatgcttgtggataggtttatcactatgttgctcaggctagtctgaaacttctggccccataagaggggcattggagaagaagctggagtagatgcccttcatttgagcactcttttccttagagggctgttgccaaggttggctctatcttgttctgatagctgcctatttgcctgctattttgatagttgtttgattccttgtattgttcttgaatcctgaaattcaactgctaaagtaatagaagctgaactaaattttagaattcatttggattcacttcttgagtttacaggcagaaaatgagtcctagttagagtgagtgattgtcttaagatcacccaatcagtggcttggctgggatcagaactcaggggtcttagctctggaccttgtgctacttcctgtcatcccagggcctttgagaaaaaaatcttggtgcggtatctcatggctgcaatcccagcactttgggaggctgaggcaggaggatcacttgagaccagaagtttgagaccagcctgagctggtctctatagagaccctgtctctatagaaaattttaaaattagctgaatgtggtggcatgcacctgtagttccagctgcttgggaggctgaggcaggaggatgccttgagcccaggaggttgaggctgcagtgagctatgatcatgccactgcactccagcctgggtgacagagcaagaatctgtctcaaaaaaagaaaagaaatctagtccatgcgttaacatttttcatggcttaaaaataaatctaccactcttctatttttaggataaggtggcatttcctaattcatttacaacccttaaactcatatgcatttggggaaaatgaaacaactctactgtcagaacttgagtgtttattattaacaggatgctatccctaagaaatgcatatgatacaaaggtaactaaggtgcagtctctcctcactctagtgtggggaggagagagtaaaataaatggctgtgaaggacagagtgaaatcaattccataagagattacacaacggtggggctctgggtgcttaaaggtcagaaagtgttgcttcatttcctttgttgtagagtggctaccacaggattcatggatgaggtagatttcaataggttgggagaaggaacactgcagctggagggaatataataaacccagctatggagtcaggagagctatcggttggagttgggagacttaagagaatctcattttgcctaaaaggtagagcagctggagaagctaaggatggattattctaaatggttaagaggccctgaggctgcaacaaggaagtctgtattcagtgttttttgtcagcaatggaaagctgatgtttcttgagctgggtattgtgattgcaatagactggcaatgatgcaagagaaatgggagggcagatgggaagtggcaatccacctgagactggaagtcaaggctggaactgttcctgggatggaaagaagggaggtagttttagaactgcagacacggaagaaagctagagggcatgaaaattgaggaagatgagaacctactggggaggtgcccacagaagaattggcaagccctgtgaaaggtcatcatttcattcttcgtgtctgagaacctgcagccttggtgagttacttgatataagttcatataagcaagcaaagaaagcacaaaactctctcctcaatggaacaagacagagccgacttgggcagcaacacttactgcaagtgaaaaaccacatctgattcatcagccttaggtcatggtcctggtgttggacaatggtctctatgactacactttctttgttgccaagagggcaggtctgcagacctctgtatctactgaggtgtacctattgggatggggtgtgaagaggatggtgacgttttcctctggtcaggctcttacttcctgggcagttgctatagaaagagaacacccagcttcagggcaggggtgaggccaaatgttgtctgtgacaagctccaaggagattctgactcataggttgcaagaacagaatgagtcttgattgtgggctcaggaactgaggagaaagtgggaagaaaaagaacaggagagttcagatataatctatcctcattgcctccctggcttactaacgggccagataccaccttttattggaggcttctagattgctctactctacccccgcatctggaggaactgctgctatctctgaaattcgtgtaggactctcatgtcttttagcccctcctgtgctgttttgtgtgaacctgtatgtgtcttttcctctttatcctcctagattttaaattctctgagagcagaatgtgtctctgatccattctttttgtaatacagcctcccccgaggctaacactttccatatggctctaggactcaaatgtttgttgaactcctaccggaatgaatggcctgagaaacaaacagtgagtatcagaaagaagctacaactgtcaaagcttgtggcagtctgctttggaaaccctaggcagattactagaacaatcttgatatggttttacctggagagagagagcattcaatatcccttccaatccaaaaattgaaaaccaaacacatgctttcaatattgccctgaaaagcaggatttagtgctgctcaaacccaagatgaaagtcccattcataaagccaccattgcccaccagtgttaccccttaacaattatatttttctacatccagttcccagaaatatccaggaaaggttgatgaaattggatgttctaaaaatagttcttcctaaaataaaataggagtgaaaccaacatagtgtgatcccaagagagcagctgagcatgaggtaggtaaggaggacacaggtaaaatggagatgaaaggagagctagagactgtttatctatagaaaggtcagtagagatcattgaaagaaagcaaatgtgggatggagttgagcctcattcccgggctggccatggggaagttttccttgtacattagactaagttcagatgtaatcaaggctcatggctgggctgggtgcggtggctcatgcctgtagtcctgacactttgggaggccaaggtgggaggatcactcgaggccaggagtttgaccccaggctgggcaacacagtgagaccccatctctatgaaaaaattttcaaaaaatgccttagccagctgtggtagctcacacctgtggtcccacttactcaggaggcgaagatgggaggatctcctgaggccaagagtttgagaccagcctaggcaacatagtgagacaccatctctaccaaaaaactttttttaaaaacttagctgggcatggtggcacatacctgtggtcccatctactctggagacaaagtgagaggatctcttgagaccagaagttccagaccagcctggacaacacagtcagaccctgactctaccaaaaatttttttaaaacagccaggcatggtggtggatgcctgtggtcccaactacttggagactgtggtgagaggatcacttgagcctgggaagtcacggctgcagtgagccgtgttcatgccactgcactcctgcctgggtgacagagtgagaccctgtcacaaaaaaataaaaacaaaaataaaaacaaaagagctcctgtctttgcaataaagacagagattggatttcctatgatgagtgtctcaccaagtttttttatgtgcttgccattagctggatgagtatatagctggtattgagctgttatgtttattttccagtactttcatctatcagcagggacctggtaacccaaaaatgtgagtgatgtataagacagagtcatggaatctcatgtaatgctataactctgtgaacaacaattatttaaaagcataagcacattttcttccctgaatatctgtttacatttatacagtgaagacatagaaatgaaaaagagatggttaaatgaatcagttctccccaagaggttggcagagccgtatgattactgaatgtatccctcaggagggtatgaaattaatcaagtcttataattagcttcatagaatgtgattatactgtgcagcaggatacatgtaagtaagcgggatgacctctttctcccagtgtcaaggggcctaacttaggtttctctctctccctggagatctgtcaggcagccatagaagggctttctagcagagaagatgaatgaaaggactgatatactccttccagagtcaagagtctcctccttgacactggatataccggtgaagatctgatactttattggtttgctagggctgctataacaaagtaccaaagatgaggtggcttaaacggtagacatttattttctcacagttgtggaaatctgagatcaaggtattgctagaattggtttcttctgaggcctctctctccttagcttgcatatggctgtcttctccccatgtcttctggtcttccggtcttccctctgtgtgtgtttgtgtccaaatttcctcttgctataaggatgccattcatattgaactatggcccacccgaatgacctcattttcacttaattacttctgcaaaaaccccatttccaaacacacaccttgaggtactaagggttaagacttcaacataagaatcttggaggatgcaattcctcccataatagataccttaggaatgtgacagcatatgtgccaggaattcctgatggtcctgtgattggtgacaggcccccaaccccataaaccgtttattgtacttcagtgatgagtctctgcatcccttcagggggatccataacctccttggagacccagagtaaatatagaaggctaagtgtaacccagcatcttctaataatataatagtaatattagatgtaatcatataatagaacttttgccaagcactttactcattatctctttgaaatctgtcctctcattcccattttgcagataaggaagctgagtcttaagagaagtcagtaattttagcacatttacatggttaataagaggcagaagtggccgggcgcggtggctcacgcctgtaatcccagcactttgggaggccgagcagggtggatcacttgaggtcaggagttcaagaccagcctgaccaacatggtgaaaccccgtctctactaaaaatagaaaaattagccaggcatggtggtgcactcctgtaatcccagctactcgggaggctgatgcagaagaattgcttgaactcgggaggtggaggtttcagtgagctgagattgtgctactgcactccagcctgggcaacagagcgagactccatctcaaaaataaataaataagaggcagaagtggagtgagtcccattgacccccaccagggtagattgcctccctgtttgtgagcattgtttttcttaaactggtgtgaaaggctaaggagaaatttcttgtgggacaatgagtatgaagggacctgaagaagtccatcagctttacgctggatatctaaggaagtccagaatcctcaaagaatattgaaaccctaagttaacctggaattttgccactgcgaagaggtagctaacttagatctgttagaccccaaccattgggaaagtggaggaaatgagactgagacaggaagggagcacagggactctggagctgccctggggttgagtctgcagctgactcctcctcctctccctgctccctttgacttgtctctgagaaaccgtgctgggagacaaactagcaggccaggcaaactcaagcagctttttcaaaaagtagcctcagactcgtagatgtagagtagaatggtggttgccagagactggaaagcggatgaaggaaaggggagtgattgatcaaagggtacaaaatttcagttagatctgaagaataaactttagtgatctgttgtagagtggtgactataataaataatcatgcattgtatatttcaaaattactaaaaatgtagattttaaatgttttcaccacaaaaaacataagtatgtgaggtgatggatttgtcaattttcttaatctaatcattctacagtgtaaatatatgtcaaaacatcacattgtatcccatcaatatatattcgtgtgtgtgtatatatgtgtatatatatataatatgtacatataatgtatactatatatattttatgtatacacaaaaatattcatggggtatgcaaatacatatgtgtatatatgtatatatacatacacaaatataatttatgggggcataaatatatatatatagataaatacatgcacatatatgttagcatcaggtttcagggcctgtcccctcccatgatattctatgatattctttcatttgcattcagaattagaggagtgataaacgaaatgcattcatccaacaaatatatgaaggtgtgcctaatttcagggttcatgaccctggcacttcctttatatgggagttaaccctgtctctataatcaagaatataccacatgtaagcttcctgagaacatacatatttttcccaatctgttttatcagtgaggtcattttgggtgatgggtgacaaaaactcaacttaccctgcttaggttaaaaagaatattaattggctcatattatgaaaacctaagaactaatctggctctaggaagaagtgaataagaaagctccaaccacgcagtcaatgtttacccattttttttccttcactcattgtctctgtttcttaatacagtgggttcctctctccataggccctcaggtttacattacagtcaactgcaatccccagagaaaggctttctttttcccagaggtttcaacaaaatctgggttgagtctccttggaagaactggtgtcacgtgcttattcgtggaaccaatcactctggcaggggcggggactctgttgattggtcagtcctgggtcagttgcctgtctctgacgggaaaggaaattaccttcatccctcaaaccctgggacttagtgtgatgcagaaattattccccaaaggggaatagaggtgctgttatcaaaagaagaaagagtctggggaggacactgggctaactattacatctgaatacactaaaaaatttaatggtcaggagaagatgaagagaggtcaattaaaagtacagtttggtggaagaactaagccctagtttttgccagatcattagagtgactatagtttagagtaatctattatatatttttaaaatagttaaaagaaaaatttgaatattttttagcataaagaatagacaaatatttcaagtgatagccatcccaagtgatgctgatttgatctttacaaattatattaatgtattaaattatcacatgtactccccaaaatatgtacatctattgtgtatcaataaataaaataaaaaattaatagtggggctgggcacagtggctcacgcccataatcccagcactttgggaggctaaagcaggcagatcacctgaggtcaggagttcaagaccagcctgaccaccatggacatggagaaactccatctttactaaaaatacaaaaaattagtcgggcggggtggcgcatacctgtaatcccagctacttgggaggctgaggtaggagaatagcttgaacccaggaggcgaaggttgttgtgggccgagatcacgccactgcactctagcctgggcaacaagagtgaaactccaactcaaaaaaaaaaaaaaaagttaatagtgatcatccatagtggcaaaatttaggaatatttttcctttatattttctatcatatataattctatttttatatataaaatatatggtaagttttctataagtaaactatgtttttataatgaataagactttttaaaagtttttttattaatatctctgagaaaataaagcctcttttaaagtctaaatcactccgtctactgaggggcttctggctaagatcaagagccaaatctcttctctctcctaacatttttatcgccttcactgtctcctgctaattctggtctccagggaggtctcattttgtcacctcctctgcctttgccacttcccatgactctcagagttcctcctaatgtatttaaaatacatctttaaaatatcagcttatcttaaaaataaactatttggactttacttaaaatttcaaggtgacattgtgtctttaaaaagatacaccctgactagattagatttaattgccagtttttttaataacctctagctgataagaattccctgaaaggagtttttaacataaatctgggatccttttacaagtgttttatgtgacattctgagatgatttatttccacaggctgataggatatagctccttgtgggagcggttgaagagcacctttctggtggttcaggggtaaaaatgatgcctaaattgaagcagtggtggaagcatcagctgtcccaggacatcaagctgtagtgcacctgggtgggcacccacacagtcgagatcttcacagacagatcccacagctcttaagtgtccctgtcaggctgtccaccttcagatttatgatccaaaggtggttttgtgagcttagaaaaacctatcttgtaccctttcccagggcacctgctttttttttttttttttaatcgtggtaagaaacacataacataaaatttaccgtcttaaccattgttaagtgtacagttcagttatggtaggtacattcacattgccgtgcctagatctccagaacgttttcatttcttaaaactaaaactcaatacccattaaacaacatttccccatctccccggcccctggcaaccaccattctactttctgtttctatgaatgtcactgctttagatacttcagatagtggaatcatacagtaatggttttttgttttgttttttcatgtgtgactcgcttatgtgactggctgatttcatttagcatgctgtcctcaaagttcattcatactatagcctgtgactggattttcttcctttttaaggctgaataatatttcgtgtatgcatataccacattttctttatccattgatatggtttggctctgtgtccctacctgaatctcatcttgaattataatctccatgtgttgggggaggtgccttgtgggaggtgattggaccctgagggcagacttcccgctgctgttctcatgataatgagtgagttctcacgagatccggttgtttgaaagtgtgccacttccccctttgctctctctcttctattgccatgtaagatgtgccttgctttccctttgctttcagtcgtgattgtaagtttcctgaggcctccccagccatgcagaactctgagtcaattaaacctctctttttaataaattacccagtctcaggtagttctttgtagcagtatgaaaatggactaatacttccattcttccattaatgggcgcttgagttgcttccacctattggttattatgcctataactgctatgaatgtggttgtgcaaatatctctttgagatcctactttaaattcttttggacttataacaagaagtgggattgataaatcatatggtaattctatttttaatcgatttgaggatccaccatcctgtttttaaaagaggctgcatcattttatattcccaccaacagtgcacaagtgttccaatttctctgtatcctcaccaacacttgttattttctggtttttggttttttgtttgtttgttttttgtttgtttttttaacagtagccatcctaatgagtatgaagtgatatatcattgtagttttgatttgcatttttctaatgattagtgatgtggagcatcttttcatatgctcgttggccatttgcatatcatctttggagaaatgtctttgcccatttcttttgcccattttttaatcaggttatgtacatttttgttgttgggtttcaggagttctttatgtattctagatattaaccccttatcagatatatgacttgcaaatgttttctctcattccataggttgcctttcactcttgattgcatcctttgatgcacagaaggttttaagtttcatgttgtcccatctattttttcttttgttgcctatgcttttggtgtcatatccaaggaatattgtcaaatccaatgtcatgaagtttttcttctatgttttatgctagaagtttctattttgggtcttatgtttttattgctaatccattttgagcaattttggtatattgcataaggtgagggtccaacttcattcttttacatgtggatatcttgttttcccagcatcatttgttgaataatttccccattaaatggtctcagcaaccttatcaaagatcatttgacaatataggcatgggtttatttctggactctctattctgttccactagtctatatatctgtctttttatttatttattttagagtctcatccaggctggggtgcagtgacatgatacaatcatagctcactgcagcttcaaactcctgggctcaagcaatccttctatctcagccttcctatagtacttgggattacaggagtgagccacagtgctcagctatatcagtgtttatgccagtactatactgttttgattactgtagctttgtaattagttttaaaattaggaggtgtaagacttccagctttattctttttcaagattgttttggctatttgaggtcccttgaaatttcaaataaattttagaatagattttcctattttttcaaaaaattccattggaatccaggtcacttggttttgaaaaccactattgtatttaatttttaacaaaattactgaaatgatggtaacagcaatatctaatccttatatgtcatcagtcatgattggcaaggcagtgttccctatccctacctaaatcaacgcatttaatccttacaacaactttctaagtaagtagtgttacttttcgcattttacagataaggaaactgaggcatatagaaattctgtaactcgtataaggttgcacattttaaaaggtcagagccaagattcaagtgcaggcagcctgcctcctgaatcttgaggctttctggaataaaaataccacagagcagttcaggctgcatttactagattcttgttagatgcagtcctagctgtccgtagaggcccacatatctcttggggttatgtctcagacctgtgcttctcgaaggaagggaggaaggactttatttatttatttttatttatttatttattttttgagacggagtctcactttgtcgcccaggctggagtgcagtggcaccatctcggctcaccgcaagctccgcctccgaggttcacaccattctcctgcctcagcctccaagtagctgggactacaggcgcccgccaccacgcccggctaattttttgtatttttagtagaggcgaggtttcaccgtgttagccaggatggtctctatctcctgacctcgtcatccgcccatctcggcctcctaaagtgctgggattataggcgtgtgccgccgtgcccggccaaggaaggtctttataatgcccaagaatctgttacagactctgagatgtcctctagaaatgtttggttttgtatgtctcattttgaccaagaaatcttttcttcttttcattttttctttttttcctttccttttttcctcccttcctccctcctttccctttctccttcctttttttttttttttttttttttttttgatggagtctcgctcttgtctcccaggctggagtgcagtggcaccatctcggctcactgcaacctccactcccgggttcaggcgattctcctgtctcagcctcctgagtagctgggattaaaggcgcccaccaccacgtctggctaatttttgtacttttagtagagacggggttttgccgtgttggccaggctggtctcaaactcctgacctcagcttctcaaagtgctgggattacaggcatgagcccccaagcccggccaatccccagagaatataatatatgatgcttcacaaacttaattggcatagagccttttggcatagatctgtggagctggttctctgggcgcaggctctggcaaacgctggcataaagatatgaccagttgttccccactgtgtcccgttcgccccaggatggtttggaacactcgagtgcaaatcctcgtggggtgtgggggaagtgttccttcttatgtctgccccggtcagtcccaggtttgagctcatatgctgacctcggggaatggattccaggaatttgcccggatcttgcagcaggcctgcttcctggacttctccaggaaagtcactggggcctgagaggtgactcaattttcaaccacaggcagcgactgtgtgggaatgaaaagataaaggaatttaatgctagaggaaaatgaggaacaatggacccatcaggaaggaaatccagaaaataaaaatgggatggtatcacccaaaggagcgaacactggtgcacatatcttctgtttattcagcaaatgtccacagagggccggctgccagcagcgccctcagcctctgcggccctttaggagctgacggtttggtcatccagatggaaatgtttcattctctgcctcattttcctcacctgtgaaacaggaacggaaaacaatgccttaaagggatcctatcaaaaacgatgctaattttaaaagtataaaggctttcgaagtcagagaaatactatgtgaaaatcaaggagtttcttttttctttaaggacaagaacataaataaaataatgaattttttttaagcaaataatttaaaaaatccaaaactgaaaaaagaaaagtaaatctaacaaaatagacaaagcaacagtaaaagaaaccaaagtgaaaagaccattgcaaaagagaaactattgaattggaaaacagactgcagatattggaaaacagactgcaacgcaaggatagaattagatacatttaaatcaacctattgcgaaagatgaatcagccaagctatatacagcaactgccatgagaagcaggtgtgtcttatttattttaaaatacccactgtttgcacagatcggaccttcagaaaatatttgtgaagatgaacaaatataatagacatgtggacagtgggaacagcaggacctccataatgatggattaatctgagctcgggtttttctggctttctttttcaatggtaacatttcagctcatgtgcttcgctatttctgctgcttcctacactttattttggaaaatgtcaggagccccgattatgtggcagtggatgtgacatcgtaatattgctactgataaacaactgaaattactacttactaggcacttctttttttctaacattaacttgaatttgcccaaaattcctagaagtgcatagaatcttaatattttcaaattaccttttatttgaaaatgttgccacatgttcatattttaaaaattgaaacacagaaaagtaagtgaatcaaatgtaggaattcctttcgcccctgtacctactccacataggtaactgctattaacaatgtattcttcctagatattatccatatctaaaaatgcatataaatgtatataattttatggaaatagtatcattctaaatgtaccattttgtaacgagttttcattagatacgtcttaaataccattctatgtcaatacatttagatttttttttacattgaaataccataatgtgtttcatgctatatttaatcattcccttactgataggcatttagattagcacttacatttttgttaaaaaaaaaaaatttgagtggaagatttttttttttttaatgttttcacaaagtttacaaattcatatcgggccatattcaaagccatctgcagccgcaggttaaacaagcttgatttagagtacttgcataattctgtttcttgtcaactgttaatgtaattttaatttattaaaaatattggctattagttttttttgtttttggttttttttttattatactttaagttttagggtacatgtgcacattgtgcaggttagttacatacgtatagatgtgccatgctggtgcgctgcacccactaactcgtcatctagcattaggtatatctcccgatgatatccctcccacctccctccatcccacaacagtccccagagtgtgatattccccttcctgtgtccatgtgatctcattgttcaattcccacctatgagtgagaatacgcggtgtttggttttttgttcttgcgatagtttactgagaatgatggtttccaatttcatccatgtccctgcaaaggacatgaactcatcattttttatggctgcatagtattccatggtgtatatgtgccacattttcttaatccagtctatcattgttggacatttgggttggttccaagtctttgctattgtgaataatgccgcaataaacatacgtatgcatgtgtctttatagcagcatgatttatagtcctttgggtatatacccagtaatgggatggctgggtcaaatggtatttccagttctagatccctgaggaatcgccacactgacttccacaatggttgaactagtttacagtcccaccaacagtgtaaaagtgttcctatttctccacatcctctccagcacctgttgtttcctgactttttaatgattgccattctaactggtgtgagatggtatctcattgtggttttgatttgcatttctctgatggccagtgatgatgagcattttttcatgtgttttttggctgcataaatgtcttcttttgagaagtgtctgttcatgtccttcgcccactttttgatggggttgtttgtttttttcttgtaaatttgtttgagttcattgtagattctggatattagccctttgtcagatgagtaagttgcgaaaattttcacccattttgtaggttgcctgttcactctgatggtagtttcttttgctgtgcagaagctctttagtttaattagatcccatttgtcaattttggcttttgttgccattgcttttggtgttttagacatgaagtccttgcccttgcctatgtcctgaatggtaatgcctaggttttcttctagggtttttatggttttaggtctaacgtttaagtctttaatccatcttgaattgatttttgtataaggtgtaaggaagggatccagtttcagctttctacatatggctagccagttttcccagcaccatttattaaatagggaatcctttccccattgcttgtttttctcaagtttgtcaaagatcagatagttgtagatatgcggcgttatttctgagggctctgttctgttccattgatctatatctctattttggtaccagtaccatgctgttttggttactgttgccttgtagtatagtttgaagtcaggtagtgtgatgcctccagctttgttcttttggcttaggattgacttggcgatgcgggctcttttttggttccatatgaactttaaagtagtttttttccaattctgtgaagaaagtcattggtagcttgatggggatggcattgaatctgtaaattaccttgggcagtatggccattttcacgatattgattcttactacccatgagcatggaatgttcttccatttgtttgtatcctcttttatttccttgagcagtgctcaagtgagtgtagttctccttgaagaggtccttcacatcccttgtaagttggattcctaggtattttattctctttgaagcaattgcgaatgggagttcactcatgatttggctctctgtttgtctgttgttggtgtataagaatgcttgagatttttgtacattgattttgtatcctgagactttgctgaagttgcttatcagcttaaggagattttgggctgagacagtggggttttctagatatacaatcatgtcgtctgcaaacagggacaatttgacttcctcttttcctaattgaataccctttatttccttctcctgcctcattgccctggccagaacttccaacactatgttgaatagaggtggtgagagagggcatccctgtcttgtgccagttttcaaaggtaatgcttccagtttttgcccattcagtatgatattggctgtgggtttgtcatagatagctcttattattttgaaatatgtcccatcaatacctaatttattgagagtttttagcatgaaggattgttgaattttgtcaaaggctttttctgcatctattgagataatcatgtggtttttgtctttggttctgtttatatgctggattacatttattgatttgcgtatattgaaccagccttgcatcccagggatgaagcccacttgatcatggtggataagctttttgatgtgctgctggattcgttttgccagtattttattgaggatttttgcatcaatgttcatcaaagatattggtctaaaattctctttttttgttgtgtctctgcctggctttggtatcagaatgatgctggcctcataaaatgagttagggaggattccctctttttctattgattggaatagtttcagaaggaatggtaccagttcctccttgtacctctggtagaattcggctgtgaatccatctggtcctggactctttttggttggtaagctattgattattgccacaatttcagctcctgttattggtctattcagagattcaacttcttcctggtttagtcttgggagagtgtatgtgtccaggaatttatccatttcttctagattttctagtttatttgcgtagaggtgtttgtagtattccctgatggtagtttgtatttctgtgggatcggtggtgatatcccctttatcattttttattgtgtctatttgatttttctctctttttttcttcattagtcttgctagcggtctatcaattttgttgatcctttcaaaaaaccagctcctggattcattaattttttgaagggttttttgtatctctatttccttcagttctgctctgattttagttattttttgccttctgctagcttttgaatgtgtttgctcttgcttttctagttcttttaattgtgatgttagggtgtcaattttggatctttcctgctttctcttgtgggcatttagtgctataaatttccctctacacactgctttgaatgcgtcccagagattctggtatgttgtgtctttgttctcattggtttcaaagaacatctttatttctgccttcatttcgttatgtacccagtagtcattcaggagcaggttgttcagtttccatgtagttgagcggttttgagtgagattcttaatcctgagttctagtttgattgcactgtggtctgagagatagtttgttataatttctgttctttaacatttgctgaggagagctttacttcccagtatgtggtcaattttggaataggtgtggtgtggtgctgaaaaaaatgtatattctgttgatttggggtggagagttctgtagatgtctattaggtctgcttggtgcagagctgagttcaattcctgggtatccttgttgactttctgtctcgttgatctgtctaatgttgacagtgggttgttaaagtctcccattattaatgtgtgggagtctaagtctctttgtaggtcactcaggacttgctttatgaatcttggtgctcctgtattgggtgcatatatatttaggatagttagctcttcttgttgaattgatccctttaccattatgtaatggccttctttgtctcttttgatctttgttggtttaaagtctgttttatcagagactaggattgcaacccctgcctttttttgttttccatttgcttggtagatcttcctccatccttttattttgagcctatgtgtgtctgtgcacgtgagatgggtttcctgaatacagcacactgatgggtcttgactctttatccaattcgccagtctgtgtcttttaattggagcatttagtccattgacatttaaagttaatattgttatgtgtgaatttgatcctgtcattatgatgttagctggttattttgctcgttagttgatgcagtttcttcctagtctcgatggtctttacattttggcatgattttacagtggctgctactggttgttcctttccatgtttagtgcttccttcaggagctcttgtaaggcaggcctggtggtgacaaaatctctcagcatttgcttgtctgtaaagtattttatttctccttcacttatgaagcttagtttggctggatatgaaattctgggttgaaaattcttttctttaagaatgttgaatattggcccccactctcttctggcttgtagggtttctgccgagagatccgctgttagtctgatgggcttccctttgatggtaacccgacctttctctctggcttcccttaacatttttccttcatttcaactttggtgaatctgacaattatgtgtcttggagttgctcttcttgaggagtatctttgtggcgttctctgtatttcctgaatctgaacattggcctgccttgctagattggggacattctcctggataatatcctgcagagtgttttccaacttggttccattctccccatcactttcaggtacaccaatcagacgtagatttggtcttttcacatagtcccatatttcttggaggctttgctcatttctttttattcttttttctctagacttcccttctcgcttcatttcattcatttcatcttccatcgctgataccctttcttccagttgatcgcatcggctcctgaggcttctgcattcttcacgtagttctcgagccttggttttcagctccatcagctcctttaagcacttctctgtattggttattccagttatacattcttctaaatttttttcaaagttttcaacttctttgcctttggtttggatgtcctcctgtagctcagagtaatttgattgtctgaagccttcttctctcagctcgtcaaagtcattctccatccagctttattccgttgcaggtgaggagctgtgttcctttggaggaggagaggcgctctgctttttagagtttccagtttttctgttctgttttttccccatctttgtggtttttatctacttttggtctttgatgatggtgatgtacagatgggtttttggtgtggatgtcctttctgtttgttagttttccttctaacagagaggaccctcagctgcaggtctgttggagtaccctgccgtgtgaggtgtcagtgtgcccctgctggggggtgcctcccagttaggctgctcgggggtcaggggtcagggacccacttgaggaggcagtctgcctgttctcagatctccagctgcgtgctgggagaaccactgctctcttcaaagctgtcagacagggacatttaagtctgcagaggttactgctttctttttgtttgtctgtgtcctgcccccagaggtggagcctacagaggcaggcaggcctccttgagctgtggtgggctccacccagttcgagcttcctggctgctttgtttacctaatcaagcctgggcaatggtgggcgcccctcccccagcctcactgccgccttgcagtttgatctcagactgctgtgctagcaatcagcgagactccgtgggtgtaggaccctccgagccaggtgcgggatataatctcgtggtgtgccgttttttaagccctttggaaaagcgcagtatttgggtgggagtgacccgattttccaggtgccgtccgtcacccctttctttgactcagaaagggaactccctgacccctcgcgcttcccaagggaggcaatgcctcgccctgcttcggctcgcgcacggtgcgcgcacccactgacctgtgcccactgtctggcactccctagtgagatgaacccagtacctcagatggaaatgcagaaatcacccatcttctgcgtcgctcacgctgggagctgtagactggagctgttcctattcggccatcttggctcctccccgaagattttgttaagtcactgaatgaacaactagggtccaaggctgagggcaaagtggtgcaaagtactctttatcccaaagagagagagggcaagaagctcttggcagttggggtagatgcttccctgaaggcttcttaaaaggtgactcagatttacccaactcaacccattccatgtgagcagaagactcgggaggagtgagggaattatgaagtcattgccttgttaggagtactggggtgcatccctttctgctcctccaaagccaagtgagggttgccccagaagagtcctgggtaaagagttggaattccttccacaaggaagactggcatctcacgcccagttggaagtcagcttagactggactgtgggtctgccctgatcctgcctgagccaatgaaaacaacattcgaggctgggcatggcggctcatgcctgtaaccccagcactttgggaggctaacgtgggtggatcacctgaggtcaggagttcaagactagcctgggcaacatggtgaaaacttgtctctactaaaaatacaaaaattagctgggtgtggtggcccgcagctgtgatcccagctactcaggaggctgaggcaggagaatcacttgaacccaggaggcggaggttgcagtgagccgagatcacgccactgcactccagcctgggtgacaagagtgaaacttcatctcaaaaaaaaaagaaaaaggaaaagaaaagaacattcttgagagggtggtggtggtgtgaccttgtactgtgtgtgatcttgtacacagtgtgatcactgtgtggagggacaaggtggtataggtgttctgtgggtgcagtgaccccatggacagtagtagatttgagtcattttgtaatatcccacctgttatgcactgaattgtgtctctccaaatccatatatgttgaagtcctatcttctatttggagatggtttctttaaaatgaattcattagggtaggccctaatccagtaggattggtgtctttatgaggaaaagagattaggacatgcacacacacagagggatgactgtgaaaacagagagagaagatggccatcttcaagtccaggagagaggcctcagaagaaaccaaccctgatgacatcttgatctcagacttccaacctccagaattgtgagcgagtaaatttctgttggtgaagttactgtgtgcgatactttgctatggaagccctccaaacgacgatgcctcccaaggtgagaagtccccagccagaggcagtgccaggagctgaggacaaaaggaagatgtggaatgaagccggtcctcctgtatcagtgaagtgtacagtggggaggccccacaggccctcaaggaactcctacaagtttccaacagagggaggggctcccagagttcaggctgggaagaggagtgagagaatgatccaggcctctctccagcttccacctcaccctcccacccaggcccttttcacagatcagaatcctggggtaagaggaggaatgggagaacccttcctatcccaaattccctgaagcacagctttggttggcccaggtaggagagtgaaggagatagaatttttagatgagaaactggatgttttaaactagattagattttagtaattgaaagtaacaagatagcatgatgtagggaaggaagattcagcatagcacagttgggaaaatcagagatctgagaaatttttaattatttcgtgtttgcatgatcatcaaattcagactgtttttgaaaaccctccagttttgtttttgtatttttacagtaaacatctttttacatatatcttggtatatacctgtgagtattctgcactatatattcttagaacagctggtcaaaggctatgtgtatttaaaattttgatgactacaaccaaaaactgtacctcaatttatattccttatagaaacacatttgggtgtaccacttgcaccaatatgagagcttcacagttttaaatatatattcaactttaagaaaatgaaatgttatttaagttgttagactctaggacagcggttgtcaaacctccccctacgctacccaccaagcccaatccagtcagccacctatttttgtccataaagttttattggaacacagccatacctatgcatttacatattgtctatagctacgtttgtgctaggacaacagagctcagttgttgccacagaaactgtagagcatgtaaagcccaacatattcagtatctagcccttccagaaacactgtgctgattccacctccagaaaagtcaaaggcaaccctcccatgtcctgcagattagcaaatataactgctgagcagcagttgaaggaatatcttatctatgtgtgttcctgtggttcatatttctggtgccagcttgtccaaggcatttggatgacttcacactcttgaactacttggggcaggaagtcagactgcaagagtgcagctttgcattgcactgtggggaaggggaccctttgtgagcttatcttatgggcaggagggtggggcaggcaggcagtcttcccaaagtgtaaatcccaggagatgctgagcaggtgaaatgggggctgcagatggcaggagcctatgctgccagcccagccagttctgctgctcacttgggcgtcctgcagatgctggcatccctggcattgaagattgtctccaattctgaagaaaaacaatggtctacttttcccccttcccttcggaagaacctcattctttcaaattcactcccagttgctcctaatattatcaaagagcttttactgttggaggagagagcacaatatgtgccacaccagagagtgaccgttgcctaattgggttcacagtgatgacttctttgtaaaacactcccataagcatcacctatatttctaaattatgttttgacaaaagctaaacttcttatcaaaaggaatttgttggaagagaattttctttttttttgtgacagagtttcgctcttgttgcccaggctggagtgtaatgatgcgatcttggctcaccccaacctctgcttcctgggttcaagtgattctcctttctcagcctcccaagtacccgggattacaggcatgcaccaccacagccggctaattttgtatttttaatagagacagggtttctccatgttggtcaggctgatctctgtagggtccagccccacagggtcagtgggtttttctccctgtgtgcggagacgagagattgcagaaataaagacacaagacaaagagataaaagaaaagacagctgggcccgggggaccactaccaccaagacgcggagactggtagtggccctgaatgcaaggctgcactgttatttattggatacaaggcaaaaggggcaggataaggagtgtgagtcatctccaatgattgacaaggtcacatgagtcacgtgtccactggacagggggcccttccctgcctggcagccaaggcagagagagagggagagagagaggacagcttacgccattatttctgcatatcagagacttttagtactttcactaattttgctactgctatctaaaaggcagagcctggtgtacaggatggaacatgaaagcggactaggagcgtggccaatgaagcacagcatcacagggagatggttaggcctccggataactgcgggcaagcctgactgatgtcaggccctccacaagaggtggaggagtagagtcttctctaaacttccccggggaaagagagactccctttccaggtctgctaagtagcgggtgttttcccttggcactgacactaccgctagaccacggtccgcttggcaacgggtgtcttccaaggccctggcattaccgctagaccaaggagccctctggtggccctgtccgggcataacagaaggctcacactcttgtcttctggtcacttctcactatgtcccctcagctcctatcactgtatggcctggtttttcctaggttatgattatagagtgaagattcttataatattggaataaagagtaattgctacgaactaatgattaatgatattcatatataatcatgtctatgatctagatctagtataattcttgttgttttatatattttattatactgaaacagctcgtgccctcagtcttttgccttggcacctaggtggcttgccgcccacagatctcgaactcctgacctcaggtgatctgcccacctcagcctcccaaagtgcagggattacaggtgtgagccaccacgcctggcctggaagataatttttatggtcaagtttcactatgtggtgagacattctgaggagcactttacccaaagggcagggcaccttcacgtgtctaaatctgtgttgttcaatagtgactcattcatctccaccatgtgctgagccctgtgctaagcactgggtgtgcttgtcccccaggagattcatgtgtgtgtggagagggtggcagtggggaggagtgggggcagacacatttcaaacaggaaatcataggaacatggcagcatccacgtgaggtaagcacagggtgctatgggacatgacccgactctgtggggaggaggtgaggtcccaggtccccactctgtgggatggaggtgaggtcccaggaccttactctgtggggtggaggtgaggtcccagatcccgattctgtgggatggaggcgaggttccaggatggagatgtccacactgagtagtacaggacagcaagattggcaaggctaagtggggagtggggaatgagaaaggaggcttgagtctgggcttaggggccaggtcaagagggccttgtgagcccttctctgaagccaaattctttccctgaagtggtgaattgaaaggatttaaacacaagaaggtggtgtcaaggttaagatgaagaaggatattagttataatttggaggaggtagggatgacgatcgtaaacagaaaggtggtgatgtttctgcatgaaaaaaatgaacttgaactaaggcttttgtagtgagaatggagtggagaggatgacataaatttataggattggatggccaactggatgaggaagaaatggtgggaaagaaaagaaagtaagagtgaatgccagtttgggagcttgagtgcccaggtgatatgtagagacattcactaggatgaggaatgtattagttagctattgctgtataataaataatctcggccaggtgcaatggctcatgcctgtaatcccagcactttgggaggccgaagtgggaggatcacttgagcctgggagttggagaccagcctgaccaacatggtgaaaccccatctctcctaaaaattagctcggcatggtggtgcacgtctgtaatcccagctactcgggaggctgaggcaggagaatcacttgaacgcaggagatggagactggagtgagccgagatcgctccattgcgctccagcctgggcaatacagcaagaccctgtctcaaaaaataaatgaataaaataaataatatcaaagtttagcagcttaaaacaacaaacattgattatttcccagtgtttgtaataggaattcaagagtgtattagctagatggttctggcttaaggtatcttgttaagttgccatcaagacattagccaggctgcaggatctgcctccaagatggctcgttcacatggctgttggcagaaggcttcagttccttcctggattttcacaggaagcctcagttccttgccacatggactctccacagggctgcttgactgtccttacaacagggtagctggtttctcccagactgagagacccaagagagaacaaagcacacagtgctttttaggacctagccttagaagtcacctaccatccattccaccttattctgttctttagaagcaaatcatcagtccacacttaagggacgggaaattaggctccaccttttgaaaagagtgtcaaagaattcatggacacttttcaaagtcgtcacagagaaggtaggatgtagcggatctgcgtagaggaagatgtgggattaggttttgaacatgttcagtttgagatccctttgagccatcctggttgtgaactgtaaactcacttcctaaataagtatatgcccctctccaatgtgagattatgccatctaatttaatcttctccacaacaaacaaatctattcatagatcttaaggttataggaaaaatattaaaagaagctagcaaatagcctgcaggcaagaggtagaattctccatgcatccatcattcacagccaaggagttaattattctctgaaaagcaaagaggttgaaatgataaaaatgtaggctttccttctattcctgctcagcgttcctcaaattttcatgtttaagcctcactgtaaaaagaaaaaaaaattgacatgcaaaaccatgtacactctattcagggaacaattcaagaaaatgtttgaggatcattgagctacaagtgatttttttgctccctgcagaattttagaatctgaccctgggtaaggaggctgcgtcgtgtcccccacctctgagaacctgagaatgtttagctgtggtttctgcagttttgcacattccctaaagaaggtgtctgggcgagtgctcggcgcttatcttcctactgtgtgcagtcagtttccagctctcacctccctccttcatctctcttcagctggctggcttctaagatgcttctccctgcctggccacagtgcttacctgttctaggatgagagaggcccagctgggttagcgaactgttgctaaagagcgttatttcatgggcttgaccccagcttcctattgtagcatttcctgtcttgggattagcttgattaggcaaagtgtgaagctcagtgctgcttcagtctcacctcctactttgagtaatttgataagtactctgtggttcacagggtgccatgtactgctggcttaaatggagcagcctactttatcagacaagaaccctcaaatggcagtcctccagcccataggctaattgatattcttaacgagggaaggcaagcacctcatgaaaggttttgtttgtgttttcttttttctttttatctctgtttctagagacagcaaccttatcagtccagcagatcttaatagactagaaagaagccaggagagtattaaggaactcttaacacaagagatatttctctttatgtaatcattttcccaaaatatatcagcataaccgtcagtatttttctaaagaacaatggaccccatgtcatgacctgctactttactttttatggaggtatatatttcagtggccaatcttgtaaaagtggttattcctgaaaaggggtgccacctgctgctggatatccgtgtctgtcaggaaacattaccatctagaaatgctactggtatgtgtgtgccagctcttggctcactgctcatttcctgttaaaaagaacctaatctcaggcaaagctaatcctacaacaacagtcaaatccctccagattcagatacgttgaaaaaatacaaaatgcagaatgggcttaattttgtacctgttctaaaggcaagaaggtgcatttatgtccaaaagttctgcatttgttgtccttcattctctgtcacatactgcaattagccttccatatgaagaaatgtaagtatcagaaacacacaatctacgaatatacgtgggcttcattctcaaattggagacttccatttctatcaccgttctttctccatttggtggtattcaggatcattagagaaggtgcaaagatttagcataaatagcatcaagtcacctaagagcatgtttctttttataacttcctgggctgagttgaatgcttagctaattcagttcatcttatttcctaaaatctgaacttaaggctatttattttcctctaggaacttctttagctgctttcacaagtttggatgtgcagggctttattgtttggttacttacacgtgtgttttttagtctccaaactgtgattggagactttttgtgattgataactagaggtatggccccgaagtcagagaatatagtacatgtgatgttgacttttggtattttatgagacatcacgtatggtaagttttggtgagttcaaaaaaaaaaaactgtgtttttattgactgcagatctctccattagatcaagctatattactgcattgttcagatctgccatattcttatatatttcttttcaaattaatttataaattcttgagaggtatactcagattttaccccatgaaatttattttgccttataatgtattttcaatttttgttttacatattttgaggctatgttgttaagaacacattggctctcaattattacatcttctgaagaattattccttgtatcactaaataataactttctttagccttaataatgccttttctgaagtctgttttgctgggcattaatactgtaatgctggccaggtgcagtggctcatgcctgtaatcccagcactttgggaggctgaggcaggcagatcacctgaggtcaggagtttgagaccaggctggccaacatggtgaaaccccatctctattaaaaatacaaaacttagctgggcatggtggcaggtgcctgtaatcctagctacttgggaggctgaggcaggagaatcgcttaaacccaggaggtggagacttcagtgagccaagattgcaccactgtactccagcctggacgactgtaccaaaaaatactaacaataatgataaataataataatattgtaatgctttcttgtgtttagtatttctctgttttttaaaaataccactttcttgtcaacacttctgcattattatgttttagatgtttcttttttaagcagaatggctactgaggtcttggtgacattacctgctatgacaaccccaaatctcagtggtttaacacaacaaaggtttagatattattctttaatcattatggcctctttcatgctattcttttattttattacttttattgctaatttttctatttattgcatctcctggaaatgcctcaaagtatttttcccaagtgtagtttatagggtttttttatatgagctcatctttcagagagttttttcttgcacctaattggatttccagtgaaacttgcttgtagaagtaagcactaccaagtggtttcacatctgattctttctttctttcttttttttttttttttttttgattcagagtcttgctctgttgcccaggctggagttcagtgatgtaatctcggctctctgcaacttccgcctcccgggttcaggtgattcttctgcctcagcctcccaagtagctgggattacaggtgtgcaccaccacacccggctaatttttgtatttttagtagagatggggtttcaccatcttggccaggctggtcttgaactcctgacctcatgatccacctgcctcggcctcccaaagtgttgggattacaggcgtgagccaccgtgcctggcccacatctgattcttttggaaccctagggtcctaggtgttcagtgatcctagatgaattttcatcttaatttcttgattcatttctacatcattcaggtaatataaattgagacatgagcggcccacagctagtgtctccagctcctactggttgctttttattttctacccaaaacctccaaggccagaggagagagtttttttccatcccctttttgttaaggggaaagttcctgaaggtccagagccctatatagaagttcaggtctaggcctttcttccatcaccaggaggtcccttatgctgtgagaccctaagtcctgtgtccagtgcaagaaccctgtgtgctaggtttttatcagccttctataataactctttatttctggcacctgtggacttaatcttatttttttaagcttggaaatgtattagtaacttttggagtatgctatttcatatagcatttcttgtatttttaatgatacatggctttacaccttgtcagacttagccaacacttcctaacatctctcttttagcaaagaggaaaaacctctgagtgagattccaggggtttctaacttaaatttaatagtattattttatttttattatatttaattttttctatatatgttatttattttatgtaacttaaatcactcaccatttattttacgtgagtgatttaagtttacatataatggttgagtatccctagtctgaaatctaaaatgctccaaaattcatgttcttcagtgctgacacaacactcagaggaaatgctcattggagcatttcagatttcagatcgtcagagtagggattctcaacttgtagtatataatgcaaatattccaaaatccaaaaaagtcggaaggtttaaatacttctggtcccaagcattttggataagggatactcaacctgtacactagtgatacaaacattcctctcaaaataaccttaataaaataagtcaatctaaagaaaatgttaagtaaattggcaagtgattaaaggctatgacaaaaaccctaaaggtgatatattaatactcagtcttatagaatatttaaaagcattcagtgtcttttcaagctttttgttcctatatgctttgatgctttagcaatccagacgtaaagatatttactgtcaatatgaatctgggctaagaatgtggaaaattggttacccaaatcaggaaataaatttttgagcatagcataagtcaaatattccctttgaaacaataaaggccagctatatagtaagaatgggctagatcgtaatgtggtaacaaataactacaatatctcagggcaaaacacaacaaaagttcatttcttgtttacatttccagcaagctttcatcgaggcctctgctcatcagaggcactcgggacacagcctggccgagcccctccacagccacctatgtgggaagaggatgtggctcctcacacgcttgctcctaagccttctgctcagaagcgacatctctcccttccactctttcttcattagccaaagcaagtcatgtggctaccctaacttcaaaggggacaggaaagtgcaatactaccatgcactcaaaaggcagagagccagaaatacttggtgaagatcaatatgtcataatacattgatcttctaacacacatggtgttaatgtcacagtaccatccagcaaagaaaccatgaagcagttttaatacatcctctagatggagacatgtagctgtttcagccatagtacagcctgacttgtgtttacaactccctcaacctcttggttagctccattctgtataaagaaactcaaaattaagtagaggctacagatagataaagtaaaatacagacctttacactggactggtttgttacctaacagatcttgagaggcttcagttactgatcacaaaactgctgtcctgcttagtcaacaactgctgtttggccacttcatttctgcaaatgtttatgggcttaatgtatgaatgtggttgaagtatttacaaagagcgtgacttgggtttctcttagatttgcttctaggctattctggctcagctttccctctgtcccaggggttttctaacatgtccctatagccttctttttgggggggagtgggacggagttttgctctttttgcccaggctggagtgcaatggcaccatctcagctcaccacaacctctgcctcccaggtttaagcaattctcctgcctcagcctcccgagtagctgggattacaggcatgcgccaccacacccagctaattttgtatttttagtagagatggggtttctccatcttggtcagggtgttcttgaactcccaatatcaggtgacccacccgcctcagcctcccaaagtgctgggattataggcgtgagccactgcgcccggcctagccttctttaatatccatgggtttgtgtgaatctctctccttgggtcatccgctgatcacagccttcagcatttttcttcccccggtgcatgctaacacagggggaagaaatctgtgccttcttcatagggtctctgctttgtgttgaaaaggagcacttagaggcaaaggctctattttctaacatcaatgagttgaggagcatttctaggctctgtggagatttgtgcagtaataagattatcttttacctggactaatgcccaaattatagtgaccttaattatgatttgtccaaccatgacacatactttaattaaaccactgctcctgtactatgttttaagtggagggtatgtaataccttaaactcagacagtgctttatgacttacagagtacttttatttggattgtatttattctccacagtcactgtgatgttgggtattatccccttttaaaatcacagaaatggccaactaatcttctcagagttaatcagcttgttgatactggcagcagaactataactcagaactaaaacctcatatccaggcaggactcctgcaattattccatgatgttgcccataattcacaattgtttaaaaaaatctattaaacttaagctgatcctatctattttaaaaccatcatatttattttgatgccaaggcccacatcctgtgtgctctgtcaggcagatagaaatctgatatctttatttttgttcaaggttgactcttaggcagataactagaaaaataatgtacatgtgcctttagaatatttcaggctcaataattcaatccaacatagtaagtggtagaactaagatttaaacccagtggctcttaatagcagcattttgctacttgacaggtacgagaagtttgatgtcaaggagaacacacaaaatgacaaagatcattgtaaggaattccaaaaactgcaggatcatgggatacccagacatctgtccctctaggtcctaggactttcaaaactggggcctggtgcagatcttctctttgcatacctccccaatctttgttgctgaataacgtggtttgattccacctatcatagtgtatctctgtttggcacaggttgtcttgttcctgctgatacattattgtctgtcttacatgccaacctcttgcatgcccctttgctaccagggcacaggtctagttttagagaacacacagggtcaaagccacaggaagaatgtggacaaagaaactccctgatgctgagcttttgaaggggtctcaggagttggtaggtaagtacacaggcacttacctctatccaggggagcagcactgagtttttgaaggtaggggtcattgtattagctccatcatcccaactccaccacgagaatgagacgggtctgttttgttcctctatatcctcggcacatagtagacacttaatagatatttgttgaataaatgaagcaaatgcagtaatcgctaagggtgcagattattttctttcatcatagtgctttattgacagtaggggatttgacttgcatcctggagaagcagattaaactccaaaggtttggtagatccagcgttacatagtgcaaagtacagtaagagaggcagaaggggactaaattaagaactttaacataaaggtttatcatgtttaaaattaggttagtgcccacatcataaggactcaccctaggtgaatgaaattacgtgaaactcacagagaagaaatatatattatggtaaatggggtcttactgaacaaaggtccagggatgaaaataaatcaagagaaatttatcgtgaacagtggtcagcttcttagaagaacatatagattcgtcacaattgcctttggtatttcctgtttccctacacttcttaccaaatgtgctaatacagatggttgtgggctcagcactgattagaaacaagaggtgggaagtcatgaccagagccatcttcaccaacatatattcacagtgactctttaaatattcaaaaaaggaagaaaaataacatcagtctatgcctgctcaggagtgttaggcactttacttttgtagcttaatctttaaacaacgtggtgaagtaggtgtatatccctagtttacaaatgaaaactgagatcaacagaatatgctctccctctgtccatgggaatttaattaaaatactcaaatttacagagtaagagatgtgtacaaagcacatatattgaccctgttgttaaaaatatatatatattaaatgtccccgaagtatattttattagttgtttgcatttcctatttctgagtttcccacttggtgtgtgtttattaagtgagctagcagaagtgacttgatgtaagcaagtgaaattggtgtccatttttctcatttaccataactgcagaaagtctttaatttgggaccacttacagtggattcagtccccatacatggtttattttaagtgagttgaaaatgttatcctggactctgtgggtttccttttcaaaagaaatgaagtcttacacagttgttgttgacgcgctttgctttgctttttttgcagactactgtcagaggatgtaggaatggacatcccctttgaagagggcgtgctgagtcccagtgctgcagacatgaggcctggtgagagcagcatttgttcatttccttcgttggtattctgtatcccaacgttttcattattcagtgaaagaattatttcctgtgcatctaacttatgatttcagtgataacagtgagaggaaaaaagaaatgtgtgatatgaaggtgttaggctgcatttggttaatttaagagttggcttgaatactgatgctcgctagtgtgggctgcattttatctcctagaccacagccttatctgccaatgttttcagttcctgtgataattggctactgtatattgtaccaaattctgactaatgtctaagttctccgcatttacacataattgtaagaatgtttaaaattggaaatgtgatatcaagaatgctcagtatcctaactatcaaaaccaaaaccaagacaacaacaataaaaaacaactaccctacattttaggggtttacaacccaaggcatacacaaaaaggaatttaatttttcaattgcaacttatatgactctcactgtattccagggtcactctcttgcattacaccaactccaggatcataccaagatcctgaatcatgtattctcagccaagcctacagtgtggtaggaagaaggaaggcaattacatttcttttctgtcgtagtatttgaaatgcattcttcaaaatactagtcatgtaacagaattatttctaaatgttctatggccaaatatgcttggtaaccacagtatgtttatttgaatcttccaagttcacaatgtacttttgaatgataaaggcactaaggctatggttatctgatatggtaagcagctagtcacatgtggctatttaaattaattaaaattaaaaacaattttttaaaatgctcttcttcagttgcactagcctcatttcaagtgctcaatagccaaatatagaaccttttcatcatcacaaagaattctttgggacatcactgctctgcaaattcctgaaatatagaaactcagtgttgaaacttacttgtcaatagaaacctttttcaagtaatacataaaaccattacctagaacagagtttgggtgatgttccattcagaaaagaaaaagcttaatgactgacaggggaacagtgccaatttctccaggacaaggccagagccagaattccagagttgaagggtatgccaaatggtcttcaaaatatttcgtgcttaggaatcctgtcatttctggttttaggtgaaggcaacaaactgttttctcctactctgctctcacactgaacacttctgtgaccagatgtgtagggttttgttttgttttgtttgccacacaccaagcaattttctaatgaacaccaactgggtgtcctataattcaattctgacactatccaccttaggaaatgacaagggttttaagacctctgtgcctggaaccagggccaaagaccaaatacatttcttattatactacagtagggtatgtctctacctttgttttgttagtttaagcttggttaaaaaatgacttctccagctctgcttctattaaatgaaaggcagctgagcgggaagatgcatactacaatgagaggagggagcctacacataagattgtcacttatgttatgggaaccaatgtcaagcgagattggcataagagctggtgactgcttgggtgagttcaaagaatgttacctgggaggatacttcggccaggtaaagggcactgaagatcatatacagagttgtcaggacctaaaagaagtattttgggagtgtctgtgaacatgacaaagttcttaacgtacattccataggagcaaagtcaacacaaacgattagaaaatatagttggccctttctatccatggttccaaatccgtggattcaacctaccacagaagaaaaatattcaaagaaaaaaaaatcgcatctgtactgaacatgtacaaactttttttcctggtcattatttctaaacacagtgcaaacactatttactttgtattaggtattataattattctagagatgatttgaagtatacagaaggatgtgcatgggttatatgtcaacactacaccattttatattagggacttgagcatctgtacattttagtttccaccaggggtcctggaatcaatcccttatggatatcaagggacaactgtatatgtaaacttaactatttttcttatgcagtataccccgtgaaaatttaattcaattattatagcaatttcaagttttcaaacttgaacagggaaattctaaaaactagttatctaaccatttagtaataactcctacttcctgtttctacatggccaaggctgagggggttgggaggatccagttacagagggctgctttcaagaagggtgtctatatctcatacaaagatttctatcaggtctgcttttgctgaaaggactttaaaaatgttttccactgggcccaaacccactcttggcagccacgtataggttaagtatcccttacttaaatgcttggaccagagtgtttcagattttggattttttcagattttggaatatttggattatacttactggctgaacatcccaaattcaaaattctgaaatccaaaatgctccagtgagtatttccttgacacgtcatgttggcactcaaaaagtttcagattttggagcatttgggattttgaaatttttgatttagattgctcctctggtttaatacttgatgttgctgttctctttcttctttagaacctcctaattctctggatcttaatgacactcatcctcggagaatcaagctcacagccccaaatatcaatctttctctggaccaaagtgaaggatctattctctctgatgataacttggacagtccagatgaaattgacatcaatgtggatgaacttgatacccccgatgaagcagattcttttgagtacactggccatggtaagtcactaagttggcaaggccaaagttaaatgctaaataagtaaaagattttctaacagacctctcatttttgtgccagtggatcctttttgtgatttctagaagcttctgtttttatttcaggttataggtggccatgattgacagtttggagcctgacagagaaagtatgggtcacagaggccatacataaccattgctctttattaacccccactctgtgctagcatttatgctaggcactggggctgagggaagactgttacatgctgtgttacaagaaacctggggctgggtttgcaggggaagagaatttaatcaggacgataaaatttgaagaagagaaatcagagcttgccaatttcttgtataagttcccactatctgcaatgttcttttccccagatccttacgtgactgactccttctctttattcagatgttaatcagatgtcacctcctcagagaagtcttccttgacctctgtaatcaaagatgcttcccacttcccgactcccaccacctagtcactctctgtcccagtgttcattttattttccacgtatcactaattcaaattgtattatttaactatttgtttgcatctttattgtctttctcttaccactcgaatgtatgctccacaggagcaaggactttatatttgatcctgcgtctccaataaagtgggaaggaaggaagggatggtttagggggagtgagagaaatgataaaaaagaagataattaaaagttttcagatcatccaagactgacactcctgatatgaacttcagtctttctttagttctttctcttactctatgaaatctggtttaagaaatatgtacaaatacaatcatttttttttaaatggcattatgtagtttctgtttcagttctagccagggtggaattctctgaagttataatatttgaaagtgaaagcgagagagtctgggacacagctattgcttttattcatttttaaaattcacgcaatcttaaaagcaatacagtgccacaattaagtggtggcctgacttttagagacatgctaattctagcagttccactcctagaagagcataattagaaaattcaccaaattagctaattatttcaaccaatggtcattgagccgacatgagcagtgcagttcagactctaccttgacagagcttaaggctttatttcctcaaaaaggaaatggctaaacgacttgttttatagtctattatgcttaagtagagttttttttttccataagttattggggtacaggtggtatttggttacatgagtaagttctttagtgtaagtagagattttatattgcatttttatcatgtgtgaatttctgtagttatctgggtagttgattctgtaggttgaaatacacaaataggaggtgaaagaaggtctggaatttgtactatttcctgtcatcccagagagtcttcagcagctcctctatccatcccagttgcccctaccagctcctgctcctttcctgctaatatattgacaaaatcccacagaagactgtggcatgacccaactggcccctctcttgcctccgtatttgcttcctttttgtcaggagagctttgtcacaccacatctgaaccttttatttttaaacatagtaaaactgtcgagcaaagcagtggtggctgggcaagctggtaattaacactgccacttgctgacatggctcttttaatgtagttaacatagctgtgttgaaagaaccagtttaatggccacaaccctgttttaggtcttaaatgcaaaggacagaattgtaaactaagttgaatttttaaatctaccttaattttcaaatgaaagatatatagtcagaggttgaaactttgaaaacacaaagtgcctctgaatagctatattttgtaaacatgaggacatggataagtgactgtataagagggttggattataaatatgtttgagttctgaagtatgaaataaatgcttgaaagcagcctgtttcttaggtttctcacgcgaccattttgaaccaggaatgtacattctaaacaaaataggggtttttaaggtatagtttttcaaaaacatttgggccataatttattttcttttaatgaatactttttcatttatattatatttttcgtgtatatattttcattatatatgtttcattatatattatatatttgtactatatatttttcatttatatagttttcattgtatattatatacctcattatattatataattcattatatagttttcatttaatttatttcattttataactagaacaatgaagcacagagaagttaagtaatttgcctaaggtcacacagctcattgttgcccttagttcctggcccatgctgcttcccagtgaatatgctaacaatgaatgggaaagggtctgttaccagattggacttacatacttgaagccaaacatgatagctcttgctcacatttaggcctctttttatccagttttcctgacttgcgggagactctaaaaaaaaaaaagtaagcgttactctaccaaatgcctaaaggttttcaggccatttgcctgttttattcagtagctgatgaccaaacacctctgccagggtttttgctcacaatgcaattttgcttatggaaaatttgtgaagctcactatcaaatatattcaattggtcttctctttcaagcaattttctttaatagttgtgtccatggaattggtaaactataagacatcagcaaaatggaatacttgagggctactcttaaaaatgagcaggatttatatttactgagacaaaaagcctattctatctatctatctatctatctatctatctatcatctatctatctatctatctatactttaagacaggccctcactatgtcacctaggctggagtgcactgatgtaatctcagcccactgccacctcgaccacccaggctcaggtgaccctcctaccttagcctcctgagtagctgggactacaggcatgtgccaccatacccagctaattggtatatttttttgtagagatgaggttttgccacgtttcccaggctggtctcaaacctgtactgttttaatagatgataggaacaaattatagaacaatctgtatagaacatgcagaatatatagaataatcatactctttgaaaaataaacgtgtctgtgtatgtgcagaggaagaataatacacatcacacagtaacagataagtggcattggtcattctcattgttttcatgaagcatgtctgtattcctggtactttcattaatgctttttgctttttaaaaattaatgaactttattctttagagcaactttaggttcacagcaaatctgagcggagagtacagagttttcctgtacctgtttctctacaaacattcaccctccttcactgtctacatcccttgccaagtggttgggttgttacaactgatgaacctgcattgacacatcattatcacccaaggtccatagtttacatgaggggttcagctgtttgtttctcacttactataaagtctttgtgtggtatattttgaaacagtacatagaaagtaatatcaaatttatgtccagatgtgctcccagtagggggctcagcccagttgtaagagtcttagagtaggagtcttggcttgtagtatcatcacgattccaagttgtgcactctatgtgtttaagcaaatgtatagtggcagcatttatccaccattgtagtatcatacagaatcgtttttctgccttaattctctgtgctctgcctatgtctccctttcccgcaacccctagcaatcactgatgcttttactgtctccatagttttgcctcttccagaatccatgtagttggactcatacaatatgcagctttttcagactggcttccttcacttacgcaattaaggttcctccatatcctttcatggcttgaaagatcatttctttttaatgctgaataatattccattgtctggacaagtcacaggttattttccattcacctactgaaggacgtcttggctgcttccaagttttggcaattatgaatgaagctgctataaacatacatgtgaagccttttgtgtgggcatacattttcagtgcatttgggtaattaccaaggagtatgatggctagattgtaaggtaagagtatgcttaattttgtaagaaactgccaaactcttccaaagtggctggaccattttgcattcccaccagcaatgaatgcgagttcctgtcgctttgcattctcaccagcatttggtgtcagggttttggatttgggccattctaataggtatgtagtggtatcttgctattgttttaatttgaaattctgtaatgacacatgatattgaatatcttttcacatgcttacctgtcacctgtatatcttctttgtgaggtacctgtccaggtcttttgcccattttcttattgttgagtttttgttgttgttgttgttgtttttgagacacagtctcgtgctgtcgccaggctggagtgcagtgacgcaatctcggttcactgcaacctctagctcttgggttcaagcgattcccctgtgtcagcctcccaagtagctgggattacagatgcatgccaccatgcgcagctaatgttttgtattttagtagaaacagggtttcaccatgttggcaggatggtcttgatctcctgacctcgtgatccacccacctcagcctcccaaagtgctgggattacaggcgtgagccactgcacctggccttattgttgagtattaagcattctttgtatattttggataacagtcctcatcagatatgtgttttgcaaatgttttctcccagtctgtggcttgtcttcttattctcattctcttgatttttgtcttttatatagtagttttaatttcaatgaagtccaccttatcaattatttctttcatggatcatgcctttggtgttgtatctaaaaagtcatctttgcatccaaggccagttacattttctcttctaaaagttttacagttttgaattttacatttaggtctatgatccattttcaattaacttttgtgaaggatcaaaggcctgggtccagattcattattttacaggtggatgcccagttatttcagcactatgttgaaaagactatctttgctttattgtattgcctttgctccttgtctaagatcagttgactatatttatgtgatatgtgttttactataaccataataaagaaagtagtatacaatttttgttttttgagacaaggtctcactctgtcacccagacaggagtgcagtggtaccatcatagctcactgcagcctcaacctcctgggctcacgtgatcttcccaagtagctgggactacaggcacatgccaacatatccagctaatttttgtattttttgtagagactgggtttcgccatgttgcccaggactggtcttgaacccctgagctcaagtgatccacctgccttggccttcagagtgctgggattacaggcttgagccaccacacccaatcaaaaattttttacataagggaattttaataaaatttgcagaaaataaaacaaaacaaccctacgttcaccccacagagatgaccagggtaaagctagagcaggtcagagggtaccaaacaggatgaagagggtctggtggatggaaagttcactagagggaaaggagggtgtgtacaagagcatcagaatacaaacctgcttcagaatccagagttctgggggagtagagaccagatgggaaattgagttccaggaagggatataagattagcatcctagggtcctaacccatgtaggaaggaagaagcaggaagggattccaaagagatgggtggatttgcacaagggacacgacgcttggcctgaagccagtggtttatgatctgtgtccttgataagctgccgcatgctggtgggaacacagtggaagccagagtgagccaaggctctgtaggtggtggtagctgttggtgttggcaaaaaaggctaggattgcttcccaaccgaacttcattttgctatctaagtcactggtaattagacacttctgaatatataattgcagattcttccagaacataatggcagtgttgtggcttccttacagattagctccatttccaggaaactatccaagtttttcttaatttactcacccaccttcccaattgtttttgagtgctctgagtaagtttgtaagctaagtagggagtgggttgctggaagtgaatattaaaggttattcaaggcacagtttcttagcccaggggactcacagtctctttgtaaaataaataagaaagagaatcacacattcaaggtacaatgtggtagattagaagggctgaaaaaggtaaaggttttgactatatttgtttagtaactgtgatctgaggcaaaccacttcagagtcagtttttgcatataatgccaatggtataataatataatggtataatgaccattttaataccaactagtacctggtacaaggtcaatacttaacacaatagtgctgttattatcatcaaagtgccatagaaagaagtgaaatgcagtgtaaattcaatggtgcttttccaggaatggaaaaataagaatgataatgtcttggaattattgtgaaggttataaataatcttttctttcagattacttaaacatacaaagaataaccatcattaagctctactaatacttctagtaaaaatggaaacaattgctgcttatttttttaataaaaatggttactttttttttttaaatgcacaagagtaaatttcttcccagaggatgctcagtaggcttttttattgtcttatgcacccatcaatttgggagtcttgtgcatttggggtcttggagcatttctggtctacaaagttgtttgtttctcactataaagtcttggtgtggcatattttgaaacagtacatagaaagtaatatcaaatttatgtccagatatgctcccaatagggggctcagcccagttgtaagagtcttagagtaggagtcttggcttgtagtatcatcacgattccaagctgagggccccaaaagactctgagcactgaagagatgtggccccaaaaccccaagattttctgagtctagtacacagcctttcaccccattagaaagacctgcaatctttctttaccctgatcaaggatgagttggtccttggaccactacccatgcaagacagcttaagttttgcacctagtctccccctcagcatggccttagcaatggatgtggttgttcagttaataaaagaagacttcattgagtgtactttatatggtcaggatagtgctaagctctgtaaaggctgtacaaaacaaggactttgatcaggttgtttctgcaggatgaaacaaaacaaaggctgcccgtaggagtactgtattgtaaagcttaccatttggctgtttagctgcactgtggaggtcttgctccttcagccttgctctgtgctttgtttccagaagatcccacagccaacaaagattctggccaagagtcagagtctattccagaatatacggccgaagaggaacgggaggacaaccggctttggaggacagtggtcattggagaacaagagcagcgcattgacatgaaggtcatcgagccctacaggagagtcatttctcacggaggtagtcgagctcagcatgaatctgggaaatggggaaggggcagccattttatttaaaatcatgaagtgagtctagacttctccggaacatgacatctcaaagaccctattctagagccaatattcagggaactatagagctaagtatatttcctcatattcaattcaataaacatttgaaatcctactaggcaaagacaactttccaatataaaacgggcttttcatgctacatatctgatagcgatcatcttgtgcaaatttattgaaagtcatagttgtctaatttaaatgtctgtttggcattcttatcagtccattgtacggttgaactgaacagagtatgtgacaccatggcctgtgtcataacactacccccgaggtgcttctcattacaaaatggccttttgaatcctcttcagaagctttggggattttttttttagacttagcctggtaattgtttcccctaactgaagtttgcctttctgtaaactagtaaactacattaaatctaggcctgacaacagccaaccccagtcaaagcctccacctgtttggtgagagacaagggagagagaaaagtgtgtttgtatttccagcactttcttgagggctcctggagcatatgtggccttgattaatttgggagtcacaaaaagtcagatgagtggaagcaacacatttaacattgtcaacttcagaaaacctcgacagcattttgattcttctgctgcgtgccttcctttcccgagcctgaggtgccactgtaaccacccagctgttcagaaagagtgtgagctgacaaggcagttgttgctctctcagttctctcttccttaatgaggacagggaaatgagagtcttagcactgcctcaaaacactgcttttgttttctattataacaagcagaaggctgatctgttatttcaatcaaacctttctccgccagcagatttttcaccttccatcccatacattgctacccccacataagtatcaggaccacccagggaacctgaccactgtagcaaaggtgaatgccagtccctggccctggccatggcctttctttgtcttgccttactgtttgacctgaaatggaaatatgccccgctgagagctgctgtggggtcaggagcagtttcctctaagggaaatcatgcccgtagcccttcagaatgagagttggccccatcttgctgcaagtgacacacagctggctgtagagtcaacccttttgtttttatgtgaaaaccataagaggaacactcaatcttccccatcttcccaggtcacatctcctttgcaccacccatcagatatttttggtttgttttctttttgaaaatagaaacaaaacaaaggctgcctgtaagagtagtctgtgttcattttaaaaagtattaaaaaattaaaatgtctgtcacatcaaagtcacccagtgataagccctataaacatcagctcctaaatgcagagtccctgtgttgaaaggaagctcatggtcctgctgctcttctagggctagttatctgctaatactccagtagactcgcctgcttgttctttaggtgggctgttgtctgaatcaggagagaatgattatcatcagtgcactgatggttgggaaaaagccactgcttctgcctgtcacagtcttgtaacaattcacctgagccctcagggctaacctggtttgctgtgctctccgtccctgccacctcctccctttgccatttgctcgtctccattctgtgtcgcaagctcagtttttgtctgtgtgactgtctggtttgttttgaagagaaggccacctcccctctccccagccctgccttggccctctccaggcaccagcctgcatgaaatgtgcctctggctgcacccatccggaactttagagagatgccaccttttcctacaccctgaacagcttttgtgctctgtaggtaaagatacttcagatgttacttctgaatttgctaaagctttgtcttccacattaggagtttacagcactctcttagaccataatgatgaaaaatctccttacttaccaacctactgagtttgtccttcggcttctgataagcatttaaaaagcagcaatcacttcacagtaaacatgaatcttatttggtgcttgacattttgctctgaggaagttttctcattcgggccagtagagaagtgccagctacacagtgctctgtgccaaaaactgtaaggtgggggcaatcaaaagagctgcagaagttagccccaaagccaggccctgccaggtgtcctacctgttgagaatattggtgcatgatggcagtatttgaataaataattcagtcttcagctttagtgaccttgatatgagctattgcacacaatgtagaagaatggggctcaaaacccatctctgtcacttactagtctgtaaccttggtacattacttaccttctctgggcctcaatgacatcatcagccaaatgagggtaatctcaacaccactgttcacatcctatgagccaacagcaatatccttgccatctgcataaataaaagcaaagaggggtttgaatggttttgctcagccaacagtacggggtccctctgaggctagaactggctttttttttgaacttggagctgagaaacccatttaaataatggagaacaataatgccaagtaattttaacaaggagtttcttttctttttcttttcttttttttttttttttacttctcttatttcattataggagattcaggtaaccttctctgaagtcttgctggacaaatgaccctggaaagaatgaggagaagagttgctggctggtgtgtgtgtgtgtatgttttggttgcgactgtgacatctttccttctgtctccattccattgctggccagcaaacttgtgttacatccctttcatgcctgtctgtgtcactcaggtaaggtttgcgtccttgcttcagagggtctcaggagactcctgggggggggttgctcatgcaccccacccagcacatacaccttgaattcacctcacctttattgagaagaaagtctaatgaaagaaatgttttaaaaaccagacttcaaatgaattatgctgttgccaacaggaaactttactagagtaagctgcatatttgagaatagaaattgaggggttagctgaccccttcaaggtatctgggaggggcaaaaagtgattgatcctatgcattctagttattgcactttgcttgcaattatagtattatctgattttttaaatttaaatttaaactttttttagcaggaagcagctatagaaaaattacagtattacctgaaatatctcccaagcctgccaacggcactggctcttgattttggaggaaaactttcatgtggaaatctttcttttatttccctcttttaattatcccctctcctgctactttcttcctgctctttttgcctcttcttcccttcttaaagcttctctgcccaaaataacacattttcatttataaattttcattttcatttataaatttccatactttttatatcgagacatttcttacttagacagcgatcatgaagtagtaggttgatcccgtagtattcctttagttaaataaacttggatgaacatgacgctgcaacattccaagggcagacagcatttacacagtgagctgaactgccatttaaaatgacatctgaagtactgtttataaacctcagtctttccctttcgaaaaaaatttcttagaagttcatggaaataaagaaagaaatcaaagtaactgagtggtcatgatcttgaaattactgtaacactctggagccagattgctacatttagaaaaacgcttttgaaaggatgctttcttgcttttaagttggattcattatgtctgttgtctcttttaatgaacgtctgtcttttcgtcatgctgaggatgaattgcttatctgtgcggtatgaggattagtatagctaagccaccatatcctttgtggatttccatttaattatgcatcttcagaaatgaaattattgtaacaagcaatttttgtattaagatatgtctcctcctgccattttccttcatattgcattctaaaaagtagttgataaataccctgcatattggaaaagatggaacgaaagcaaaaatatccagagaagctactacgttgctctctcacaaacatgtgttgcatcagttgaatacttacataggtagcatcttctaagatctgtagtataaatactgtatacaacaacaccgtatcaccacttgtagtataaatactgtatacaactacctcaaattagtaatacacacaaacccataattgggtatatttttagttagttttgctctcttcccccatatttttttgcagtagagtcacactctctttgtagaaaacatcttattaaactgcttttcaagagtgaattaactccatccaaatctatacacagccattactttactgccatgaaatcaccagtgggtatttagagttctgaaaaaactaacacgttgggttctgggaggactggaccaggcttaagcgtatgtcctgtcctcctactcaaagcttgaagaaaatctctttaatgattcaacagtccaaaactatatgacatcaatttcaatcgtttagacagggatactaaaaaataaaaaattcacacattgcttccctttttaagtgtgaaagatgcatgacattccatatagttacctgtgggggtctgactgacacctgctgtgagtttcaaagaaactatgggaatataaagcttacttaaaagacagggcaattccaaaattatgccagagctttcaaaagatggggaatggtgtcctgagatgtatctacatgttccttgacccccggagtttcaatggccacactttccgcatttcccacctgctgttttctcagcagctcctgcaagtagcacttccactcctcagttccatgttaccaggaagcaattctcaagttttcccaaaagtacagaattttatactactcaaatataatttagccagacccatctttagttttcctcctcttatgagaggaagttttcttcctcttcatagaattcagaaccttagccccttaatagaactcaatgtgttaattttctcagaactctaaatactcactgagtgattacgtggcagtaaaatattggctgtatatagtttttttgttgtttgtttttttgagacagaatctcactctgtcacccaggctggagggcagtggcacgatcttggctcactgcaacctctgcctcgcaggcttaagcaattctcctgcctcagccttccaaatagctgggattacaggcgtgtgccaccacgcttggctaatttttgtatttttagcggggacaaggtttcaccgtgctgtccgggtggtctcgaactcctggcctcaagtgatctgcctacctcggcctcccaaagtgctgggattacaggcatgagtcatggcgcccggcctggctgtatatagatttggatggagttaattaactcttgaaaagcagtttagtaagatgttctctacaaagagagtgtgactctactgcaaaaaagatgggggaacgtcatatagctctggactgtagaatcattaaatagagatttcctccaagctttgagtaggaggacaggacatacgcttaagcctggtccagtcctcccagagcccaatgtgtcagttttttcagaactctacatacccattggtgattacatggtagtaaaatattggacagaacaaggcctggctagaacttttcatgggttctcacactgtctgttgatcccaggggcactgcaggcctcgaaatcaaaataaaggtgttttacttgtctactcactagtatttggtcactggagtgtgtggatgagagattatgttgcacttcagtggctaaattctccctttaaattaagcagtgtctaagactaaaaagaactatagaggatcaaacagaatctctttcttagccatcagaagaaagaagtgctgtataagtacttatgtattagtatgatataaatctgacatttaggtcagtcttgccccctctcatttttttgtgatgtcgaatatttacacaccctcttcacaactatgtacaacaatataatcatccgtaatatataaatagcctacatatgcaaatataattgccctatatatttaacactctataaaacatagatgttaaccactgaaagataactatatgggtatatacctacagacctatagtcaacataatccccatttcatgctgctaatatacccacaaagacacacttgccaaggcttcatatttatccattaggtcagatattaccttgttaagagctttcaattggttacaagtgtctttttgtttgtcccccaggatactatggggacggtctaaatgccatcattgtgtttgccgcctgttttctgccagacagcagtcgggcggattaccactatgtcatggaaaatcttttcctgtgagtgatacttatgacaaagtgctttgagttaatgtctgtggcatgtaatggcagatagagcacctttaattaaagaaaatagatgatgtagaatgttctaagccttcagtgaaaagtcagtaaggtttctgtcaaggaatgttgctcaaggggctaaaacctttaaaggagctcttttgtgggtagactagactgaaaccaagatgaacagaattttgcttgcattttaaaattctgtaacatttcctttgggcaaagtattatttttgttccttcataacatgttcttagtcagctaagactgactataacctgacttcattaatatctgcccttatttaacctgagttacccttagtatttgataacattgttgacagttttgaaagtcaggattctttctaacccatacatttttctagtgtacctccatttaaaagatagatagccataccgataaatgagtaatactctcagaggaatgctcttaggtaattgtattcttcccaaggtaaagaggtaatatgcacaatcattcttaaatttcatacaccctgtacttttgatgttatgtaattatggtgtcaataggatgtgggaactgaaaacattcctcttccttcctgtgatcagatatgtaataagtactttagagttgatggtagctgaagactatatgattgtgtacttgaatggtgcaaccccaagaaggaggatgccagggctaggctggatgaagaaatgctaccagatgattgacagacggtatgtgggctctattatttaatcactattttgattttggtaaactgaagactaaacaaccacatggtatactgttattatcttcattatacacaagaagaaaccaagtctcaataagatcaaataaattgtctaagttgctattaagcatgtattcttttcaaaatagtaaaggtaatactgacgagaataaaagcatcattaaacaaaaatacaccatgttggttatagattcatgcactctaagaacacaaccattctattttacatttacttctatgagaaaatgacgtttgaatcatacaagtttcaaattacatctcaaaaagcattcttgtaattaatcatggccattctatatcttcctaccaggtaatagtaacttgcatagaactccctaaaattatacacacacacacacacacacacacacacacacacacatttttgttgttgtcgttgttgttggagtctcactctgttgcctaggctggagtgcagtggcatgatcttggatcacggcaacctccgcctcctgggttcaagcgattctcctgtctaacccactgagtagccaggacttacaggcgggcaccaccacgcccagctaatttttttatttttatttttatttttatttttagtagagatggggtttcaacatgttggccaggccagtctcaaactcctgacctcaggtgatctgcctgccttggcctcccaaagtgctgggattataggcatgagctaccatgccagacttaaattatatatattcttatttaggaatatgttttatgttttaattcccactgaaaatgggttaagagtaatgtattttttttcttttttcaaaataggttgaggaagaatttgaaatcattcatcattgttcatccatcttggttcatcagaacaatccttgctgtgacacgaccttttataaggtacagttaatgttgtcataaaataaaagtactactagtagttttaaaaaatatgtactcattgtcctaaaaacaagaattcataaactaagagtacccagggaaatatatttgtctctgtctttcctagaaaggtgctttggactattcatcaagaatcccgaattaagagagaaaatgctgtcatgatgaatatttcccccagatcattataaaacaggacctctaaattgcttgctataaacacggaagatgaagtggtgggattttcatgccacattagaaaggagaatagataatacatttaaagtgatatgctattatgtagagaatagaaaggtagagtaatatgacaatggaaagtaaagatgaatcaagggcagaaacagaagccatatcatgtctcaattgtgccatttcttctgaatagacctacacaacgtttatataactaccaaagttatatagagtctgggcagccattttgagagctgtgttttgatcacccctgaggagtcttggtttcaattcagtgaatatttatttgtcacttattttatgttaggttttgcataaccttacatcttagggatgcaaagtaaaataagttatgttcataatatagtaagacttcaaatagttaaatgaaagggatagtatttactttctagatagctttaaaaacaataaaatttgcccaccatcagggtacagattagattaattgaaattttcccatctcaaagttattaatgaatttcttttaaaaattctgataactttgcttctggggaaaaagataaactttaaaatcttttttttgtgtgtacatagattttactgtagcttccaaattctacctttcttgttaagtatttagttatatttatttattattcttattccccacttccaattgctaatgctgaaaaatatacctgaaaatcaagaattgttaaaatggtaaactgaaggctaaacaatcacatgatatactgttattatcttcattatacacaagaagaaaccactgaaaaaacgaagttatcagaatttttagacgaaattaattaataattttaagatgggaaaatttcaatttatcttcaattgagtagcaggattcaccctagtttccctctggcaaagattagctgtttaccatactgtgttaaattgcttttaaaaatattatgagcagccaagcggggtggctcacacctgtaatcccagcagtttgggaggccaaggcgggcagatcacttgaggtcaggagtttgagaccagcctggccaacatggtgaaaccccatctctactaaaaacacaaaaaattagccaggcatggtggtggtgtgcctatagtcccagctactagggaggctgaggcaggagaatcgcttgaacctgggaggaggttgcagtgaggcaagatcacaccactgcactccagcctgggcaacagagtgagactgtgcctccaaaaaacaaacaaaaatattagacctatttaaggtatacaaagagccacttattttaatattttcaggaaatgttgtaactagggagtaggaatcaatgtatgctgataagctttcaaaaagtttaatgggtagaaaggtaaacattagcatagttactgattcatcgatgtttgcttaataattcagcacttataaaacaaatgttttttcttgattaagtaatgttaaaagataaactttagacaaatcaatcagtttattagagcaaaaaatgatttatgaatccagcatgacttagaaccaggagaggttcagagagctcctcccagcaaagtgggcagacagtatttgtccagagaaaagcaaggtgatgtatagaaatagcttgattgggtacagctcagcagttatcttatttgggtacagtgtgatgaagcatttgccttatatggtcatggtctgatcatttggcaacctgtgattgctgaagctcagctgctttgattggctgagactcagctagtctttgcaaaaatatactcataagttaggttggaattttgtttacatactatgttaggttgcagttagctacctaggaactcaaactacagagaaagcctcaagccaaatgtagtttaacaataagaaaacatttgttactgtaaggctattaaacattattataattcaacactacttattgaagggagcttcaagataataacaacaacagtaataataaaattatagcaacagtgttgtggtaaattatgactaataatggcttaatttattgagtgcttatttgcattatctcatttaacctaatgacagtcctctgaagtagatacttttttgtttgttttttgttttgagagacggtcgccttcagtcacccaggctggagtgcagtggcacgatcatggcttactgcagcctcagactcctgggatcaagcaatcctcccacctcagcctcctgagtagctgggactataggtgtatgccaccacaatcagctaaatttttttatttttttgtagatatggggtctcatgttgtccaagctggtctcaaactcctaggctcaagcaatctgcctgctttggcccaaagtgctgagattacaggcatgagccaccatgcccagcctgaagcagatactgtttactatttccattatataggaaaaactgctgaggttcagggaggtcaaataaattgtctaaagcaggaaccagcaaacattgtttataaagattcaactagtaaatagtttaggcttcactggccctatgatttcagttacagctactcaattctgccattatagagcaaaagcagccgtaggaaacatgcaaacaagtaagtggctgtgttctgatgaaactttttttttttttttgagacaacctcactctgttgccccaggctggagtgctgtggtgcgatctcggctcactgcaacctctgccttcccatgctcaagtgattctcccacctaagcctcccaagtagctgggaccacagatatgtaccaccacgcctggctaagtttttgtatttttggcagagacaggatttgccatgtttccccggctggtcttgaactcttgagatcaggtgaccttcccatctcagcctcccaaagtgctggggttacaagcatgagccaccatgcctggcctctgatgaaactttatttatgaaaaccgaaattgaatttactatgatttttacattgtaaaatattctcttttttttgaaagggagtttcactctgttgcccagactggagtgcagtggcatgatctctgctttctgcagcctccgcctcccaggttcaagcgattctcctgcctccacctcccaagtagctgggattacaggcatgtgccaccacacctggctaatttttgtatttttagtagagacaggttttcgccatgttggccaggctggtcttgaactcctgacctcaagtgatccgcctgcctcggcctcccaaagtgctgggactacaggtacgagacactgcgcccagccggcatcatagaatatttttatttttacattttttaaaccaccttaaaaaacatagaaatcatccttcactcagggactataaaaatcagatagacttgtgcctataattccagctactcaggaagctgaagcaggaggattgcttgaggcaaggggttcaagatcagcctgggcaacatagggagatcctgactctggaaaatttttttttaaatttagctaggcagcgtagcatgtgcctgtagtcctagctactccagaggcagagataggaggattacctgagcccaggagtccaaggctgtagtgagctatgatcataccactgcactccagcctgggtgacagagtgagtcctagcttctaaaaaaataataataaactgacagcagctggcttcagccacgggctatcatttaccaacctcaggtctagggtgacacagcctagaaatgataggctccgtctttgaaaccaattgtctgcccaattctaaagaaaacctacatcaagtacttaataattgtattctacagtttcatcatgtaggagcctctttaaagatcctcctttgagtcaatttacttcagtgttagcaacttgtagatatgaaaaaagagatcactaaaatgtattataggtcttctcgctactgaagggtagcatctatgatagaggtatatggcaagttcattttaaacaatgagttattggcagtttggagatttctcaaagaacttaaaacagaagtaccatttgacctgccaatcccattactgggtaaatacacaaaggaatataactcattctaccgtaaagacacatgcacatgtatgttcatcgcagcactattcacaatagcaaagacatggaatcaacctagatgcccattaacagtggattggataaagcaaatgcagtacatatacactatggaatactagcagccataaaaaagaactaaatcacttcctttgcaacaacatggatggagctggaggtcattatcataagtgagttatcctaagaaaaccaaataccgcatgttctcacttataagtgggagctgaacattgagtatactccagacaccagggactactagagggtggagggtggaggacagtgaggatcaaaaaactacctatcaggtactatgctcattaactaggtgacaaaataatctgtacatcaaaccactgtgacatgcagtttacccatgtaaaaacctgcacatgtacccctgaataaaagctgggggaaaaaattagtaatttgtctgtgccaagcactggattgggaaatcacatagctcgattgctgtccttaaggagcacaaagcctggagcagacatgggcagacaagtgaacagttacaataacaggatacaattgcatcttgaggaggtgatgactcaaggtgagggtgagtttgggggtatacctggtagagagtgaaagctgataatctgcatcaagagaggctttgcagaaggaggccttccctccaggtgagttttaaaggattagcaggattggccagctgaaattagagagaagagcaatccaggttgaggaaacaggtagacaaaacgccagatacaaatacatcaataaagagagaacatggcatgttcagagaactgcgaaattccagtgaatgttaacactggagctggaggttttccttttgcatgacttcttttccctctcagtcacccactcagtcttttatcaaaaccgtatttagctcaacaactccacaggaggaaaaaggcttaatgtagcatatcactggtagtgtgtgttgacccaagacttatcaggagggacagaagctactgtatggagaggacggttgttcacaagtgtcttgggcccagggccaaaattgcaagtaaagtattaaagatagatggatagaagacacacctcaaaaaagcttcttactagaatgcatagtagttgaacacaaggtaatacagatggcagacagctcagcaagatcccagtagactagagagaccttttcatttgaaaccattcaagaatgttagacccttggatatactttttaaattagtttgccattacacaagtaataagaaaatgcaggccgggtgcagaggcttacgcctgtaatcccagcactttgggaggctgaggcgggcagatcacaaggtcaggagatggagaccatcctggctaacacagtgaaaccctgtctctactaaaaaaatacaaaaaattagccaggcatggtggcaggcacctgtagtcccagctactcgggaggctgaggcaggagaatagcgtgaacccaggaggcagagcttgcagtgagccaagatcgtgccactgcactccagcctgggcgacagagcgagactctgtctcaaaaagaaaaaaagaaaatgcattcttcagaaatgcataagaccaagttcttcctttaacaattaccaattcctgttcctaatccccttccccagaggcaaaatcttttatcagtttcattggtatccttccaagttgttctctgtgcatttacacatctctaaaacgaacacatttagatgaaagctgtttgtaattcaaatccaattattggaacatatttttgaatgttggttcatccagaataaacgttcaacctaaaactttaaaaaaaaaaaaacaaaaatttttaaaataaactaaaaaaaaaagaaaaatgagtttacatatatttttaaagtatcatcaaacttggtagattctgaaagaactaatggtaagatttttgtttgttacaaacaaataagtaaacagagacaaacaaggcataaagtagtgactattcagagtagcaggaaccaccgggaggccgcacaatatatggtcaagagtgtgaatgccaaagtcagactgcccaggttagtataggctctgccatttactaatggtgagaccttgggtaaacacttaactgctctgtatctgtttccttatctttgaaaataggataataatagtgtctacctcactaggctgtaataagaaatacctgcattcatatgtgtaaaccacttaagacagcatttggccaaatactgcatgatctcacttatatgtggcatctaaaaaagttgagcttatagaagtagagagtggaatggtggttaccagaagctgggggttgggagtgaggaaatgttggtcaaaaaccacaaaatttcggttaagaggcataagttccagagccctattgaacaacatggtgaccagagctaataacaatgtattgcatcctagaaaattgctaagagagtagattttaagtatcaaaaaaaaaaaaagcatgtgaagtaatacatacgtaaattagctcagttcagccattccacaacgtatacatatttcagaacatcatgttatacttttttacatggcaatttaaaaaataaattttaaaaacagaataaaacatcaccaccaacaacaacaaaacagtgtctggcacattgtaactcgtcaaataatgttagcctcttagtaagagtgctgtggcaaggtgttaagtatcaggattttcaagaaaaggcaatagccttagaatggataaggtagtgactaatgatacatatttttttcttttttttttttttagttcaaaattcagcagtaaaattaaatatgtcaatagcttatcagaactcagtgggctgatcccaatggattgcatccacattccagagagcatcatcaagtaagtcctgacagtttcagagatgtgttaagaaatagtactagtttgaggctgggtgtggtggctcacgcctgtaatcctagcactttgggaggctgagtggaagaatcagttgagcccaggagtttgcaatcagcctggacaacatagcaaaaccccattcctactaaatatataaaaattagccaggcgtgatggcatttgcctgtagtccagctattcagggggctgagatgggaggatcacctgatcctgggaagtcaaggctgcagtgagctgtgatcgtgccactgtactccagcctggtggcagtgagaccctgtatcaaaaaaaaaaaaaagtgtgtgtttggagaagtgggttggaaaagaggtcagttctggaacaggggaaatggcactatcttatttttaaaacaatattaaatatcctccaataaatacaattttttcctataacctatagataattgttgtgttcttttagatcctctttcacctaatcttttcctggggttatttgattattgttcatttttagcttgaactttactaccactttggaaaaagtaacagttacattggttaattggtatactgtctctactggttaacagtgtatcagtttcttgtgtcccccactctgcacagacacaagacggtcttagcatagcttggatttctttattgtcttatacaaagtaatttatctgcatgatgctaggaaaatagaaagaaataactctttctctgtttcttctaaaccttttttgtttgtcatgattaagtagagggcatttgcccagtggtgggtgaggtggtgaggaatggtttccttgctcaatagagggtaacgcagtatcagcgtcagcatcctgcatgggtactgaaggtctcaggatgatgctacaaaaactaggataaaatttaacaaaataaatacttggagctgggattttaaaacagggatatcggagaatgaacagttgtatctggtacattgttgcaaagaacgattgttttctgtgtgtctttttttttgttgttgttcactgtatctgaatcactagcttttttcatttcatttgaatggagagggacttaaccattagctcaaagaaaacaggcaagtatcattcatcttcctccataaaatggatagcaaaatgtacctctcgtttgggattccaaaaaagagtcctctcactttaaaaaattaattaattaattaaaaaggcccagcctagaaactggaaggaaagaattctcatgtaatgtgtgtctatgatatgccaagcatagcagtgctctatttatatcatttatttaactcttatagtaaacccctgttttacagatgcaggggacgtaacttagtaggaagttacttatgcacagtataagtaggaaccaggaagagatggaacggaaattcaaattcaggtcagcctggcactaaaattcccatgtccttttctagtagattcctttacctctctcagagaatccttcaaaattcaaacctcagaagtagattcatttggttctcctacataagcaatatcgggcgtgaacacaggatactgactgggcttccggtggtcagctgggctcagctgaatcaaacggagtgttcattagatcctaatgacggcttcaaccctcattagcttcacagcgtttccacaaccagcatacctcatagctctgggctgctgcctcaaaaaggtgtactccgtcttcaaatcccacttctactctttaaatttaaaaagtatggaggcagagagggatgcctcacacctgtaatcttagcactttgggagtctgaggagggtggatagcttgagtccaggagttcaagaccagcctgggcaacatggtgagccccccgccaccccatctctatgaaaaaaacacaaaaattagccgggtgtggtagcatgcacctgtagtcctagctactcaagagattaaagtggtaggattgcttgagcctgggaggcggaaattgcagtgagccgagatcgcaccactgcactcaagcctggttgacagagtgagacgctgtctcaaaaaagaagaagaaaaaaaaaagatgaagaagtatggaaacactcacattctataagatgacaaggacattctctcttctagtggaattgagcattgaccactttccaagtaaacacggtaacacttccatggtgtgacagaggcaatagaatgaaaagtgaatgggctttagagacttagatttgaaccttctctcctacctctcaatgtctctgagacttcaagtcatctattaaaatgattaattaattaaaatattctgagtctcagcttcagcatctgtaaagtaaggaagtaagttgcacttcctggaatggttctgagggttgaatgcaaacagggtacacaaagcacttgcaaagcctcccagcacagagttcgcaatccagaatcttatttattgttacacctgttgcttttagagactctccatcatatgggaaagttcaaatgagaagttaagtatacctaggacatttttcattcaactgcacacatcagttttcaagggctccatttgggaaaagttacttcaggaggaagggttctagttggaaaaatttttttctggagaaagaaatttaccaccattcatgtgctgcccacatgtccatgtgttctgttttctgtaattcatctccttgggatgtcctttctgccatttctgttactgaccttcatcacctcaatttcatgttttgcaaatttcaaatggatacgagccatggctcctttttatcactgaataacattcaaaggatctaatctcagccactcccacaaccagtcctcagctgagatggagcctgtcatcaaagggcttaaatgaaagaaaaacttgcccaacctagaaccaaatttataatcattggttacagttgattctcattatttgtggcagttatgttctataaagtcactgcaaacacttaattagtgaatactgaaatagtgttccaagggaaaatacaggatgttcagttcctgcaagcatctggtcacaatgttttcatcaatcaatcaatatataacctttttttatgtgtgtttctgtttaaatgaaccttacttagtatacattgttgatttatgaacattgaactcatggccaacagtattgtaacttgtgcataaacaaagcttatctaatacacatattttcttcataaggcacatcacagctttcctgcacttgggaatactagtattcccaatacagtatttcagccctatgcttggaagccaatttgaacagcaaaatcaccaaggaaaaatacaaaaatgagcggaaaaaaaggcactaaaaaggttgtgaaaaggacacttgtttacagtatgaaacaagaagacagagcctcacacattgccaggtggcaacatgaatgttgggcaactcaaatttttctccactctgcacatgtccacaagtgacccaaaaagtactttgtattgattttgtgtttataaatacatgctagtgaagaggcaaatttacaaatatagaatctgcaaataatgaggtttgactgcatatatttataaattataaacattgattgttttctaatgaaaataagatttcccccaaatgtcaattttattattaccatcatacatcacctaatgacagagacatgttctgagaagtgcgtctttagatgttttcatcattgtgtagacatcatagtgaacttatacaaaccaccccgatggtagagaccactacaccacctaggctatctgctataacctgttgctcctaggctacacacctgtacagcatgttactgtactgaatactgcaggcagctataacaccatggtaagtatttgtgtatgtacacgtagaaaagatactgtcaaattatggtattctaatttaggggaccactaccatatatgtggtccatcactgacccaaatgatgttacatggtgcatgactgtatctggataggcattttctctcatgatttgactgtcatttaaatcatttacttgtcatttttcccatctgtttgctcattttccttatggcactcgttttttatcttgtaaggtacgatgaagagagatcttataagagaagtgtgaggtaaaatctcctgatctcctattcatgctggaccctgtgtgtgtacaccagtgttttacttgtgggtgacctcaacaagctaccagagcaagaggtcactgtatcagtcttttgtatgccattttcagtctttgtcctgtgtgtaaagctgttgaggtcaacctaatttgcaactgaaacctactaaaccagatacatccctgacttggcccaggctgcaagctaacttgaactgtacccaccagactgacgtggatgttttcagctttattcagccagcatgtttctgatccctttgcaacttatgtctacattttatgaaggaatttgcaaagtaaatgtacataaacactgaatgggaggcaatgacaacatatttaatggaaggagtacgtctcagggctccagaagacagtttcgaaaagcacatatgcaccactttcatttggccctgctttgctgagtgactgtctcatgctgtgcttgcttctcttttgtttcttttccacaccaataatttttgctcctgcagactggatgaagaactgagggaagcatcagaggcagctaagtaagacttggttttcgtttagcggctggcatgatgttggcttgcatttcagaactgaattgggaaaatctgcatgcctggtgttttattcctgcttcctgataataatgcactttagaaattctctttctcctatgatagatgtaatctctattattcttactacaatctatttttccccatgatcttgcttatactgaggaatgtatttgtcactgttgttgttgttttttaatgtacacgcaattctaggcaccacaacaaaagagcacatcacaggcactgccacatatagtgtgacatcgagatgatcattaggtattgaggcaacagaacctcactaattcataccagtggggaggaataataacacatcgagatttggaagatttttgtagaatcaatttcacggccttctatgaattaaaacaacaacttacttaatgactttggaaatattgcttaactaacagcctttgagctattttgatgaatagaaaaacaaaagtcattgcccactattgctaaagtatgaatctcaaaaaggcaaaattacaactctcatgcaaatataaaatgaacacatgccaatgattttattcaactaattatttaatgcaggaaccactaaggtgttaaagccagttcaaagaacatttgagcagctagatatctataggcaatttatagaagaatatttggataagattgttgggttagatacaaaactggttaataaacaacagggcaataaactgtaatattgaggttgtcttttccactggacagaaattatttgcatctctgctggacagaaactacaagttaacctctgcccctattgagctgtaaaatagcccaaccaatagaaagtcagacccctgtaatcccagcactttgggaggccgagatgggtggatcacgaggtcaggagatcgagaccatcctggccaacatggtgaaaccccgtctctactaaaaatacaaaaattagctgggcatggtggtgcacgcctatagtccgagctactcgggaggctgaggaaggagaatcgtttgaacctgggaggcggagattgcagtgagccgagatcatgccactgcactccagcctggggacagagcgagactccatctcaaaaaaaaaaaaaaatccagtcattctcttttctcgtttccaagttacaaagaaattttctgataatacatgttagatataaccaagtactatttgaaaagtttgctgaattaagcacattaagtttcttccctattttaaatgttgcttatgctgttaatttttaaaaccagctcccattttaatagacattgcaaaagcagaaggcctggacaatgtcctaacagctataaattctgaataaataaaatctaactaatagacattttctgcatagttgtaaatgccaattcctcattaaaacaatccatttagacatttttcccctatggtacatttttattataataacctataggattatttgcttgtagtgtgccaatcttttgtgttaaaaattaaaggataggtttttgctttagaaagtttagcattagtggagtttactgttacaatattccagtcttctcattttctttcaagataactgacacccaattagataatgaaactcaaaactgtgtaattttttattctaaaaaatcttcttagtcttgatcccaactgtcacaaacaagaagttgtggaagtaaggaaaatactagtaatcaaggaactgagtgttggtgtaacatccctttagcatttacctgcactcaaattgctttgtatcatgagatttcctagagagagagaacgctcagtgagagttctctttcagattttttcagttttctttcagatttattttttcaggatgataacatatttatgaaattaaagcgctattttgaagacaaaagatgggggaaagaacatcaataatttttcagacaaacctgtcataaagtcatattgtcatgtttctttcattattaccatgaaatcttgcttcttttaatagatttttttcctctatatttatactctttctgcttagctgccacagtaaaatgattattgtttttgggtagttttgtagctttctcttttttctctcacatccactattttgttctcttccttacccctacctaccctctcccaatgtgtctaaatggctcagagggtcctgagacattttgatctccctcctaaaggaagcactatgctcgtgcctggtacatagtagatgctcagtaaatttatgctgcataaattaatgaatttgcataacattcagttcattgctgttgagcagtgggttctcaaactttattgtgcattgcaatgacctggagcacatggtaaaacacgaaatcccatgtctcacccccaaagtttctgattcagcagctctagagtggagcctaaaaatctgcatttctggccaggtgaggttgctcagccctgtaatcccaggactttgggaggctgagtggggaggattgcttgaggccaggagttagagaccagcctgggcaacatagcaggactccatctctacaaaaaaaaatttttttaattagccaagtatggtggtatgtgcctgcagtcccagctacatgggaggctgaggtgggaggatccattgagccctggagttcaaggttgcagtgagctaattgatcttaccactacactccagcctgggcaacggagtgagaccctgtctcaagaaaaaaaaaagtctgcatttctaacaagttcccagtgatgctgatgctgctggtctcaggacccagctttgagaaccactgcctaaaagtcaagggccaaataaaaataatcagatttgttttggaggtctatgctcttgctttggattcagtgggtaagccatctgcctgaagaatcctccctctaggatcttttgatcctacctttttgatggtaacatcacatgtatgaggaattgaaatatatttgcacatttgaaaatgtgtacagagaaaaaattctactctgttgaccccacaggtgattggaatgccttagaatcccaccatctcggccaccagcaacattttttcaactaccttttagcctctgaagtagcccctgaattctaggagaaactgtatgataaacatgatcactgcagatctatggttagaagccagacatgcccaggttcttcctgttgacagatgcgcctgactttccacatgacttgttcagaaagcttcaggctaggtctaaccaaaggcaaacgtacacttggtcagggaacaaaacctatctgtccactgttttgctttatgcccactagtttctcaacattctccctctcccctcacacacacacataccaccactcaaactgcaccccaactctaattgacttcagaaggtgatttcctcagcctgccttatcttttctttaaaaccttagctgtatacaggaaagaaagtattatacttctgaaggataaatagtatacctagaaccattcttattttgaaaattgggaagcatccgtgtgttgcctttggagtgacagtattaaagggtttgcaaattgctgttttccttgggaggattactcaaaattaaaaagcagaaaagctgagtttggaagattgccctttcttgattccattccagctttgctaggttttttttagcacgctgtcaacacttacttgactgtccttgctcactggaattcccaaatattccctataaaaatatcagaccaccagcaagaagggtggggagtgagaaaggaaggttgctatctcacctggggagatagccgcctgtcattttcaacaaaacacctgaccttcatcatggatcctcttatgtgcaaacagataaattagcttgtgaaattatattactaagaggacaactgcacttaaaaaggatcatagaagctctttaaatagaatagtgtttgtttgtcaataataaaatatttatgggaggccgggcacagtggctcacgcctgtaatcccagcactttgggaggccgaggcaggaggatcgcttgagtccaggagtttgagaccagcctggggcaacatggcaaaaccctacccctaccaaaaatatgaaaattagccgggcatggtggcatgcagctgtagtcccagctacttgggtggctgaggcaggagaatcgcttgaacctgagaggcagaggttgcagtgagccaagatagtgccactgcacttcagcctgggcgacagagcaagactctgtctcaaaaaaaaaaaaaaaaattatgggaggggtataaaagttgaggtgtaatgagtattcatcaagaattaataggaagcaaatttgaaatttgctcacagagaaatcacaccagtatatcaaaaacagctaatactacacaaaaaacataaatgccataaaaacacttttatttattattttataaggttacatttgttttctgggcatactcagttgaggtaaatggtaggattcatttgtatcacctggacacagctcagctgtatggagtggtaagtgtcctgttatttctgtaacaacaacaatgaggagagctgacgctgacattttttctttcagtgtattgggaaatcctcattctcgtgaaaactgaaaattaactgtgttcatgggtgaataaaattaggctgcttgagagggattttcctctgtgtgtattttattatttggggtaccaaaacaattttgtaatatgtcccctgaataagacaaattgaaaaggcagggaaaaatgaggacagaagagaccactggaggtgtttggagtttttaatctttgctttgtgtttttatatcatgggcaatcacttgtatttcaaaaccaatggtaagggttacagcttaatcttatcatctgttcaggtatggatttgttcagtattagcaatgggaccacattaaacagtttcaaatgcctcaaatctgttgtgctttcacagtggtgacagtggggaaatgttgactgcttcctattttttccttgcactcagaactagctgcctttacaatgatccagaaatgtcttctatggagaaggagtaagaattcaccatcaataacagctatgtggttacttgtagtgttgtatggctgggctctgaaagaaaacacactgaggactgggtaaaccctgtttagatgttcagctttcctgtgctccattcctgaaattagaaacctgaagctatatttgccagcttcacaccatttcattcacgatcaccccttaaatttctaaaggacaacctgtggacatggcattctatttttccaatccaaaaatgggaagaaaatgaatattaggaccagatgtaagaacatttgggcaagaggaatgcaattctgctttctgaatgacatcatctctattttaattagtggaagttggaacttccatttaatactttggtggatggagagaaaatgtgcttgttttgcaacatccaggaggaattcgagcctgtatgagactgtaggaatgatctatttagaggattgccatcctgtgagaagcagaaattggacatgtagtgagttcttaaccacgttccagactgtaaaaagcttcacacgcagtgtctgattttaatcctcagaataagtttatgaggtacatttcacagatgaggaaagagaggcatggagagacgatctgaccagcccactgttttacagctgtaaaaatggcccagagctggaatttggaccttggcagtatagctccagggccaatggtttttaaatcagaaagaggtggtcttaatgctagatgggtgtaccacttccaatttaatgaaagacaaaactattcacctaagagaacagagcgaattagtggccaagtcagtttcagggaataaactgtggtcaccagcaagctttcagagagaacttggtcatccgacaaggagcttccaatttggtttgagttgtggagaatttaacattgcccttgttcctagcaatcaggaagcagaggggaaagatcagttttaaatgtgtctcatctctattgtcaccttttgctgtctttggacctcctttgcgttgaggtccaaaaggaagttggaaaattatagtgaaatatcttcacatttgccatgttgaccttgcaacttaaaggaagtttaggcacaaaaactccagagacagtcccaactgaaaaagttcacaaagagcaaagactgggccaattctggatgcatgcctatgagttagccctgctctgcaaggaaaatttattttttctaaataaaattttaaaaaaagaacaaagaccatagagagacctttgaaatcacacagctatttttccaaaggtcactgttgtcccacctcttttagatgaagataacaattgcttcaaggaaattggcacatgaaattctgcaaagcaataatacctcaattccccagtgcacgataattctttttgcaactatttcttccctcagcaaaacagcaccccccttgagcagttaacagagcccacagttaacaagcagcagagagggcacatgtggaagcccagccaatggctggcccatcgctgctacatcttggggcttacccacttctttgcttgccttgtctgtcttgcttcttattcctacgtagggctgtttggttgggaagagggcaaccattgcttcctgtctgggttcatttcagggctgggcatggaggagggagggatactacaaattgttattgttacttcccactttttagaagaacatattcttctcaagtcttccctttcttcagccctctctttcctgagcccttaagaggcacaagatcacagtgtggatgatgagatcaggataaggggcaagagtaaccaagaattttttttttttttctgacttccagtcctggatttctggctttctttggtattagaataagggctgcatttacttcttctggcacctttacactgtaggccatcaaggacagaggagcattctgtgtggaagcattttacaccttccagagctagtgttgaatgaatacactgcaaaatgggcaagggttcttccaatgggctcgatcagtccaagaataagatggagtgtgtgctgttatcgtagtggcctctcattttcctcagagacagaagggaaggttatgcccattttcttctttctacataaaatgcaaatgtttttattcatcattaaacaatattgtctgacagtttgtaaggaacctcatttaatacgtgttagacacaaaaatggcctattgtaaaattatcagaaggttgctctgtctcaggaaaaagttgcttatagaaaactaagcccatttgcccgaggattaagaatattcaattctaattaaaagtattcttttttccaaaaaggatacttttatttatttatttatttatgtatttatttatttatttatttttaaatagccctgggtgcttgtctccttcccttttaggtttggattttatgaatttcttcatgttccaaaacttgcaacatgcctttttatatttttacatatttgtttaaagtacagtgatcaagagtggctctatttgaagaagcttaaattagcatcattgttaatagctttgttaactccacaacgttgctgttctctcaaatattaaccttccaagtggtttcctgtatttacttacaagaaaattgttcacttttgactatctcatttatttcataaactgggtaaacaggttccagtcttttagcttttgagttaacgaaagctgaagggatgaattaaatcctagaagatttacaaaaaagtcagtacgaaaaataatcgagatgggcatcctggtgtaagtgttagctcaggggcccgatggtgaaacaaggtgaccatgttcttttaagcttccaagactatttcacatattctgacccactctcgcagtttttagacgatgtgccccaaattttggtttagtaaatattctcttcatctatgggaaaaagtcaaccaacaccgtgagagaaagaatcaaatttccaatcaccaaatcaaacttactacagatttccgggaacaggaaggaccttttaaaagcaaaaacagtatattttttaaatgacctgttttgtaaaggtatatgaaaaagatgtcggggtcacagtggataaaaagaggatacctctaaagcaaactctgcaggtaagaaaacaagtcagagggcctgaaaactagaaatattcatgatgattttggctttccaaaggagacaagattgttgcaagtagggtaataaagcgaagagctatttgctcatttcaaaaaaacactgaggggccgggcatgctggctcatgcctgtaatcccagcactttgggaggctgaagtgggcggatcacgaggtcaagagatcgagatcatcctggccaacagggtgaaaccccgtctcgctaaaaacacaaaaaattatctgggcatggtggcgtctgcctgtaatcccagctactcgggaggctgaggcaggagagtcgcttgaatctaggagacggcggttgcagtaagccgagatcgcaccactgagctccagcatggcgacagagcaagactccatctcaaaaaaaaaaaaaaaaaaaccacacacacaaaacaacaacaaaaaaaatccaccgaggtactattgctgctaataataacagacattatgatatgttcattatgtacaattgaaaatgctttagacttattcattagcaagctgtgaaagcggtatgaccgttccattttacagatacagaaatggaaacttagagaaggtgggtgacttggccaagtccccactgctaataagtgacggaattgctgactatatttcaaaggaaagatactttactactgtaaactggatgggcaggcagcgtgagttgccagtggctttatttgcaaagcttctagaatgaacactgctcagctgccgcaaattccacaagtaaagcacagtaacctttgcaacatgcaagcttatggctcagggagcagagataagcaaaatccacagatacgtgccaaatcaccctttgcaaactaatagtttctcttttatcgcaactgaaattcttcctctatttactggcttttggttttcttcctcttgggtggatgcggtaggaagttgtgctgtgttcactaagaagcagaagagagacgtgattcgagtgagttttaggcttactcctcagatacttgggaacccatttgaccttctgaaaaacaagcttttctttagttataaacatccatctcagtaaggtaggctaacccctttcagtcaattcctttggcttctagaaaatgtttggtgttgttttgttgtttaccatttcttactatttagtgcttgtcagacattacttacttgaggcagaacatttgtttgcttcacaaggaaaggtcacttattaaataaaatggcatgatttctggaatacactaatgctccttatcttaattgactttgggaatgagcctttacatgagttttttacctccctggatcattttgaaaaggtgtaaaatgcttccagaaacgattttgtagaactaaacagatttcatatgttggagaaaagcctgacaagaggaggattgggttttaccagatttttctattataagaaacttgcatgatttaaatattttcagtatgtcctttgaggaaaaaagcaaacacagtgctacccaaatcattactaaatgtctctcatttggtttctcatgtttctctctctttttcttttctttgcagtattgacttgaagctgaaagaaaagccttagttggccatgctggaagaagaggatgcttttctggttcatggttctgttgaaacatatctacctgaaagagacagggctgatgttacctttttccactttgcactacctggtgccattctaaatttctaaggggaaaaatagaaagtttgtttactcttaagatattttatgaaattgtgtgtactttcctattttgccaattatgtgcctcaaagattttagttgagccttagcaagaaagtaggaccttccatttcaatacttcattaacacggtgtagtgatactttgtcccttagactggtgtttaccagtaagatacctttaatccactgttaagtatgagtggatttgtttccatagattagctggatttccttttggtgattgcattaggtttaaagtacacaggtctcaactctccccaggaaagtttcccctgtttgactccacctttaaaatcctaagcctgactaggacagccacaaaccacacaaggtgtaaaaccatcatcagctaagtgcccgttttgttcttgtttaccagaatctcctttaacttctcaaagggaagccgggctttctaatccacgtcaactttattttagttgtcaaattgggcattatattttatgtaaattggtcttttaacatcattttcctgatgaatgttggtgaccaccacattgtgaaatttaagaatccgtgttgcatgtttggtagctctctgagtttcaggccataaactcagctccagaggttaccttttaagtgccaagaactcaagtgcaaggtggcctactcaaaaatcatttggtagcattcagttattcatgaattcctctctcgcatgcattataaaaagtgatctgctttaaaacaccgtaatctgatcataggcttaaaattaaatatgagtattactttcatgtacaaaatatttcctttatagtcttcatatgccctttaaaatgccaacaagatttcaagtctgtaggcctctagtgaggtggggtggcaaaccacagctaagtctcgctcaccactgcaagctaagaatggtttttacattttgggttggaaaaattttttttgaatatttcatgacacatgaaaattattcaaatgttagtgccgataaataaagtggtactgaaacacagccacacaaacttgtttttgtactgtctacagctactttcacactacagccgcagagctgagcagttcagcagaccgtatgtcccacaatgcctaaaacattgactatgtttacagaaaaagtttgctgacccctgctctagcaaacgcatcctttcctactccaccccaatttgtatttagatagtttctctaacagaacggacaaatgaggctgcaaactaatttatttttgtcaaaaatcaatgttttgacatccacagacagtgaaataaaagaaatggcttgctgaaaaacatgaggagtcctagccacaaaatcactgcttaggttgcaattgccaaaatgaagccttcttagaagcacttctttagtatatacaggtgttggctgaagtccgtgcctcactctgggaaccattcttagtctccagtgtctcctattacaaagaagctggcagaaataaaaatgaaggggtgagagcggttccaccctagtctcatggtggaaaattcattggggagagctgtccaggatatttggagtcctgggtagaaggagcttgtaactactttaaagtcgacatctttgcacaggtgattgagtttctctgacctcattgcttcacctctgtctcctcccgtccttccgcacgtgcccacacacacgcagttcagccctctttcctccataagcctccatcgttttctcttttctcctcttgatcctttcaagcgagtatcttgttgaattgtatgttctgttggatctcctccttcataacatctggcttgttggacagaaaaaccctacagcccaccccctcccacagcccacctccacttttgaaagcccaaattacacctctcccagaacacagtgttgacgtaaatacagttacccaatattcctgtttgttcacctatttgctactttcactcagtagcatcccattttgtaaaatgaattccatggtcaccctgtcacaggaagtaatgaaaaatccagtgttcagtgtagtggtgcaaacctgagggcatagagctgttcatagagggctcttgttatagccaaacagacacagcaacaatctcaccatttatatatatatttttaacttgtccagctcatctatggaaaactactcaggtggtatgctgtttgaagcctcatcttcctacatgaaaattatgggcatttgtcccaatgattttgtttcagctgttctgtaggctgcataaccactctgatatttaggtatctgctattttattatcttaaaagacaaattaatttaattgcatgtgctagggaaaagctaccatgtacattcaccccaagtaaatagaatcctagatgaatcctagaaaaataatccctaagcagataggtagacagaggtaaacattcacatgatttagctctctagctcttgcactctgaacattcttgctttggttctgacttctgggaactgctttgcatttctcctatagatctgtagttaagggaaccaaggggtcattggggcaaaagcattgtttctcaaagctccttgattaagagaaagaacagaaatttgcacagaagatagtgtcaaggagtgagaaagtttgtttgagggcagtagctcagtgtggaagaaaatcctgaagtttctgttgaagccatacaatgttctatggggttactctctaagacattctctgaggtgtgtgaggaagtcactactcctagcctttgttaagatgtaattttaaatattcagttatggtactatgtttgcaactctcgtcttatcacaatgcctcagtagtttgttcccttagaaacatttagatgtgcacaaattaatcttttatatatctaaaggtttttctatcatgcattggattgctcagaataaagtgtctgttagacttcgttttggtaaataaattctccataatgtagattaataatataaaagtctttaatgacacaatatatctatatagcctcactgtataattcagaaataaaaattgattctgca

SEQ ID NO: 418 - DNA, 9896 bp, Homo sapiens
tcccacgtatccactgttgtgtcctgagacacgcggtgcggaccctgcgcgcccagaagctgctacggggggagctagaggctcacagtgagcctgggacgggggcagagcgcaccgactgcactgagccgagctgtggcggtccctgcgcggaccccgaggggcgcccgctgcccgcggagtccggagccgatcggggaacggggtggtggggctgcggtaggctggagcgcggagagggcgcggcgcctgggccctgcgggcggggcacgggattccctgggtccgggctaggaagagcgcaatctcctttcctggggagaccctaactcctggaacccggcttgagggggatccctgctgtccagctgcggtccccgcagtgaccaggcgaggcgctggcatcctggcactatctccaggcgtccaggctgaacgcgcggtcaccctcggccgccgcacccagcgcacttcccggcgcgattcctggacgcacactgcagggtagtggtcagggccggagccgccccggactcctgcggccacctccaccttgaaagctcgcccggctcggcttggcctaacagccagtccccaacctactcactgcggcttttcggggcccggggctgaggctgcccctgctcccagcgctcaggggtccctcccagcgaacccctcttgagcgcgcccgccacctcccgcgagccggggcagtccgaccgggccccgccagccccggggcggcccctaccgaagggcggcctcccggcggagtgcagggtcatcgggagccccggacggctttccccagctcgcgctgcgcggactcgccccggagcctcagtgcgcctcggagaaacgcctgccccagaaagggagggggtagggagagaggggaagaaggggagagtaggagcgggggcgaaggagggaggagggcaagatggagcgcggaaaaggcggagaaaagggacgagggagagcgggcagaaggcaaagacagaagggagcgagggagggagttcctcgggcctggcccctttactaggtcagtctggcaggtacctcgccggcccaggacggggctggccaaacctcaccgcttgctcccgggctggcttccagaccaagggcacgcagaggtcggagcctgcccagaagccacacctggccaggcggagaaggaagggactcgggacttccatgctagtgggaacatcacagtggggtgggctacgtcagccgccataatcagagaaagccccctgccccaggcctggcccctccccaggtccataataccctctctctcggctgtctgggtctgaaagccaaggttcccccgacctaatcagagtggtgggctccgctgcactggtctccatattccagagcagaaaaacccgtttgctattggcctaggactgaggcccagccaggggtggatggccccacaaatttccacggattcttttcctactggggctctgaaacctgctcagctactcttcattctttcaagtttgaaatgtttgggtttttaccatcctttgacattttttgtgtgtgttctccgaacttagaaacttggctttgggtgccatagcctataaaaggggcccccactctgcaccctggcacccagaccttggactcgaccactgactcagttgcctttctccagaaaaaccgaaggtgtatcaaggtgtccgagtgaagatcacagtgaaggagctgctgcagcaaagacgggcacaccaggcggcctccgggggaaccgtaagcataagcccttccctcattccccagcccatgccaggcctctttcaaagctgtgtctgcaaggtgtggaggccactcaaggccccacgcactcaccattcccagacctggccttcctctgctgttcctatgacttctgtacccagctgcatcccaatcgggaagctacagaggacagctggggcatgttgtggggctcaggatttgggggagcccatccatcccccatgggtgaaagtaaagtataaaaagtgcgttggtcctctgcagggggaggagcggccagcaggtaagtatacatcgttttgttaggaagacagtggatatatgtacagcccttgcagacccatagaaaatctctcccagaaattcacctcattttaggggccccttccaggatagcatctgtgtggaacatcctcccttccctcctcattcttctggaactcaccctctgagatcatttatctgtaaatcatcagttacctaaagtatctagcagaaaagggccctgtctctgcagaagagacagctggagtacaggaccacttccctaaaatgtatcaacaccttaagcagtttcaggttattacaaaattgaactgagcagtcataagggtataccctgacactttatacaccttcctacggtaagtactgccaaaggcactcagggcagcaacagaaccaaataaactaggtggggttattgcccaagagagggcagctcatccctaaaaagcctcaatcatacaattgcttgggggttggtttgggtgtgaacataggatctgacagctggggctcatattgcctctgttaggattggtccttctccagcccattggcatctgccccacaacagtttttgtgcctgatgctgttcatgtgcaatgtgtgacttcatgaaataggcctttgacagcgggacttcttgaaatgggagggggcaaatgatgtaggggaggtaaacacaggttccagaaccagatggactgggctcagatctcagttcctccatggtgtgtatcctcaagcaaattacccaattcctcttgcctctgtttattcgtcttcaaattggggatgataggattttgtgagggttaatcgagttattgcatacaaagccgttagaagaatgctttccacatagtgagtgctcaataaatgttagttgtcattatttgagaaataataatattatctggggaaagcaactaatattccaaccaaggattgaaagccagctatttggtaatgtttgttcacaccctttgctcagagtttagagttcagatgcgagccagctgcaatttggcatatacagcacatgcagctggaaaagtaaggacctccatgtgcagaatttcaggtaacgcattaacactcccttacatttctagaggacttcacagtggttcttcttttaaagcacttttgcacagccactatttcatttagtttttataacaaccagcggaggtaagtagatcagagatctgtacctcgattacaggcaaaattcaaaaccttgaagttgctcatggcaacgctaaaagtaggactaaggtctttttcttagtgtaatataaaaacccttctgttggctctttatgctctaaattcatcattctgcagatctgacgatactaagcaggagtctgatagcctcaaccccttcagttcagagatggttatataattaacaaaaccaggtacaagggaactggaaaatgcttctggagaaaaacatcatcaagactttcataataaaatgtaacgtttccttaaggagctttggtacttgctacagttctgctcagctgcacctggagagccccatgtgagtgtggcacttctgttgctgctgggcccttacagatgggtgtggccactgttcccttcttagctcgctacaggagctaatgtgagggtaacacacttcacttgtgtatctgaccagtttctgttccccggagtagtttgacttatttaaatttttctgaattccctcctgagaaataaagcaggacttctgaaccagtgtcttataggaacaggcagagtaaagcctgctctactttgcttcccttaagactgcatcagcctatgccctcgcaagcaagcaggtttaacacgcatataatttaattacaaaagccagacgtaaaatccctcactggaagccatcggatggatctgggattctaaagaagctgtgagagcgtacttagtaggcaagggtagcagacaccaggggatgatgttgcctgcttcttagtgtagacctttctggtataacagagatgatccccagtttgttcatttgttgaaggatgcctctgggaaactttaagccaaggagagggttaattatatcaaatactacaaagtggcaagaaatctatcttaatttgttataaagtcagtgtagtatccacaatttaaaattttaagaaggcaatcacgaatggaagttataggttgagacagacattcagtaaagaattcaaatattcttcaagcagtgccggaagaaactgtgtgtatgccggattggaacactcgattttaaaaaacttatttcagccagatcaatttgcaaacatgcgcatgcacgcacacacacagacacacacacacttgcctttggggtaaaaggaaacttgagttagtcgttatcaaaagatatcatttacctttctttttttaaatcattaattttttaaacagccttgatgtgtttttataaattgtagactgtgaatttttgtgctgtttgaaatctaagagagagttgcctttctttgtattcttggagcaaagtagaaagtgaacccatgactagaaagataatatcaagtaggatattgtaaacacacctcagggagataacatggggtggaggcagacaaacaggccaatccgggggaggaatggagttaaggaaagctctacaatgaggcagattttttaatacccactccttccaagtccttcagctcaagctgcagccaaatatttgcataaagagctggtaaaggattccagcttcctggttcatgacattacagcatggatcgttttcaaaattaatactgcctcctgtttcagcagtggctgcctgcacagctctccctgtggctcagagtatgggagtgagtatgccctgtaacccaaaagaggtgtggtgagctcggcttcccagcacagaatcacagagcaatacgggtacctttaaactttaaagccacacctgaaatttaaaaaaaaaaaaaaaatcctaaattactcagtataattattaattcaactgaaaaatgcaggctgctttactttgaatagttaaaaagagcagtctcataaacttttaagtatttaaatacagtagtttaaataaaagcaacttttatagatagtagtacaaaacatacaaagtactggaataattcccgaccattaactagaatgaaagtaggttccaactcaccaaccacagctttaagaaaatattttctattttaatatttcatgtatactaagaacatgtgaatatttttagctactcagaattaacaaaattaagaattgtgttctttggggaaacgactccctaaggctaagtagccagatggtatatgaaatttttgagaaaaataattgactaagccatagatagttgagattaaataaatgttagtccttaataattttaaatcgaatagtttaataggaagccttttgctgcattttctcaaactgttacatttttaccacataaaattatttacattaattttttactaaaaattaatcacttttaaaatttaagtagaagaatctgatattaggaaaaaaactccccaagcaagcaaacataaatattggatctagataaaacataatattggttgtatttaagaagtctgttttatgattcgatttcaggttttcattgttccaatgcaattttccagattgaatcttaaaaggattataaacgtcaaaaggcattttaaattctacacggacttaatacacctaccgcaattctatgcacctgtctttcaaattctataaaatatttgttgacactttccctttcacttgttttttacaatatattttgtacaaaaatttgtcaaacattgaaaaaaaaaaagaaagcaactttttctgagaaggaagaatctggcttaccttatagcagaaagaaacatagtcctcatcaaaatgtcttagctttcccttcagagcatttctttcagcctgcttcacggtgatattcttgctttgacagcggtccggaggcagcagtgtccacctttcagacccagttgcaccatcttctgcaggtcagtacagccagcattaacagttccctcaaacactctttcaaaagtccatctcaaaagtctttcagtcttgattcaggggttaagataggcaccaccatttaattggaatccaaccaatcagaaggtgaaaaaggcatagtcactccacatgcaagcccagcaagaaaacaagcataaatgttgtcttcatttctgaattctctactctctgctatattgtctcaagagtttgttcttcacatttattccagttcctcatcgccaagtaactaaactgaactacaaaatcagaattgttctcaggaacttatctttttttagtgcactgttagatggaatacagaacatcccaagacactcaaataatgcctttgctctgttcctttagtttccagccgacaggggcttccctccccttctctgttcccagaaagcagttcaaacaagtgtaggttttctcagcccaataagaataactcgattacataaacactcctacctctgctactcaacagctaagagtttaaggaggtcgtatataaggaaacctctgcctatggcctctccccactaaatgtgtcaccgtagcttcaccttaaaggaacttgagacctcaagaagaacacagtgtcctttagtccctttgatgagcacactctaatcctctcttcttccagcatttacagataattatcacaaattgggcctattaataataaaatggaaaaggagtaatgtttactgattatctttgtttgatgtttaacaacttactttgatcacatcatgatgttaacatgttcactgagaaaacatttttgctttttgtacttccgagccaatagtgttaattggtactctatgttcctggtttccatgattatcatttgcattctcatttaaatcacttctcaaaattctctcctccaaacttaagttactgagtaagagtgaaaagttcaaaaaagcaatcaccataagtcaaaagaattatttcccgtagcatcagaagttttctcaaagcctcaacaactttgtcagttacttctgagaggtttacgtgaactgccggtaggggctggatgtccatggttttacagcccaagaaaggggaagtttgagccattatttgactgtgacacttggacacaaattgggtcaccatccttttatttttgccctaaccagttttacagccagtttccacattattaaccatgttcatttccctggagcttgaattagctaggacaactaaagagtcaaaattgcattcccgtttacttttctggatttgttaagccccctttccccctagacatagtaaatattcagagtatagatctccattcaaatctgtgttttgcaatttttatgcaaaaacctgcctttttcctttctcctctaggactgtattttgagcctgaaccaatttcttccacgcccaattatttgcaacggggagaattttccagttgtgtttcatgtgaagaaaactcaagctgcctcgaccagatctttgattcctaccttcagacagagatgcacccggagcctttgctcaattccacacaaagtgctccacaccatttcccagacagcttccaggccacccctttctgctttaaccagagcctggtaatttttctcagttctttatatacctgattgtgtctaactatggggtaatagtgctttgtgagtttgcaccatcccgtgggaaatcatacaaaaactatcagcaaggaaatcatccaaggaaacaagcagagaagaatttaaaagtcaatgtatagaagtagccacacactgcagggcataaacctttggatacacacgtaatttagatttcccaagatttagatttttcggccaccaagtaagttggtgggtagcaataaaaagaggttcctggcaatattcatttaatgttttttaaactgtaaagtcaagagacctactaattggaagtcagtggtttaaacaatggctcttggattttttgatggaattttgagttcttggaaatggaattaaggctgtgtatatatggtaacaaacttcatttcattagggggaggttttgctttgttttgtcattgaactggctctactaactgatagtttgagtctgctataagcacaataactcatttgggtctgagatggttagtaaaaatgaagccgtaatctttgaaaaaaattaaattggttgttctcggtggatctcaaatgtttgaaaatgtgttatccttcaaaatgaagtaaggtttctattagtggaaactagttatttcagttgtcttttagagactcacaggtttgttttgtaaaccttaaattgtaaagttttcttttttaaggaatgtaaatactttttgcctttggattgtcaaaagtctgtgtgggcatcagactaaattttagagcggatgggaaattaactctgcagaatatgcacattgtcacggggaaaatatggggccccagtgacccagttccttcccagcctccaagttaggttttctcagtaacaattgtagacttgcttaagagaaaacagacagtagctctcactccagggaacaagactttagtggcgagacaggtagtgacacatcttggcatatgccagggatactccaagatccttgaagatccaagttatgcctttgcatgatcacctgattcttcatggtgagggtgtggagaaacatccagggtgccacctacagcttagattgtggcatacagcaggatttgatatgcaggtgacttgaagcacaatgggattttgtggtttcagaacgagcaccctctaaagtaggattataacaaaggaagccagtgaagcaaggcaatttattgtttggaaagaaataggtaactatagattgtggtgtcatgaaatcatgtagtcagcaaataaaattacttctgcagacttgggttgggtgttgtttcgtttgatttggttttttacccctcattttctcactctgcattggtaaacccacactgttcagttctttgatcctgtctaagttattaagctctttgtttcttggttgtcatttctctagatcccaggatcaccttcaaattcctccattctctctggctccttagactacagttactcgccagtgcagctgccttcatatgctccagagaattacaattcccctgcttctctggacaccagaacctgtggctaccccccagaagaccattcctaccaacacttgtcctcacacgcccagtacagctgcttctcctcggccaccacctccatctgctactgcgcatcgtgtgaggcagaggacttggatgctctccaggcagcagagtacttctacccgagcacagactgtgtggactttgccccctcagcagccgccaccagtgatttctataagagggaaacaaactgtgacatctgctatagttaatagaaattacagtaattcagaacatggcatgggtatatctatttttctaccacgtctagatgacactgcaaaatatgcaacttggtaacacaatatcccaagcacagtttacatgtcactatttccaattttctgatgctaagcattcatatgaagtcctcagacccggtcacagcgccactcctactttgtatgctcatagtttaaatttttgtaggaaactttcaattgttttactttttgtataacgaacaaatgctgtctccttttttactaataaataattttgtattactaa

SEQ ID NO: 419 - DNA, 167877 bp, Homo sapiens
gatgcccgcctgggctcaggcacggacggagtggagccaggtggcagcaggcagggcgcgccgccagagtgcccagctcccggggctgcccacagggtggggccgccctcgccgccgctccctctccgcgccttccccatccccaaagaggacacccctccttccgcccggcccgctccccacccccgccgcggcaccgcctccccagccgcccgcccttgcccagcgcctcccaggcagccagcgagcgaagggagcgctctgggatgggacttggagcaagcggcggcggcggagacagaggcagaggcagaagctggggctccgtcctcgcctcccacgagcgatccccgaggagagccgcggccctcggcgaggcgaagaggccgacgaggaagacccgggtggctgcgcccctgcctcgcttcccaggcgccggcggctgcaggtgagcgcggcgcgctttcccccggctctgcgcggccgggcggcctcgaagtgcaggcggaccgacccaccgacagaataccgagcctgggctgcccgacgcgcaggcgccctccccaggcccgcactgcagcccccagcgccccggggccccggcgccttcgacccctccgaggacagggggagagggagggcggcgctgcccgacccctcggccgggagagctgggcgcgctccctgcgcaggacaagccgcgctgcagccgccccggagtgccccgtgggggcgctgtggcacgcagcggggacgcccagaccccggccaccgcgacccagggaaagggagacctgttgagcgggtatgcagggtgattcctattccacggacagccgatggctcccccttccctcttcggaacctggtattttcatgcccgtgtcatctggattttgttcttgggtctctatggcagctaaacctccagcttccctatattgtggaagagggagagaaaggggaaggcattttgtggtagttgctagaaaccccagaacaatttggagccgtttggggagaggacagagaaatggggactgtccctggtagggtctccaggactgggggcacaggaaagtgctctcctcagggacactcgcgcccaccctgaacaaacccaattgaccaagtttcaatttgtcataaatcaggaagccacaatgcatctgcaccaagcacacttaaaatcggcctttaaggaatggggcagtcaagagacttcagggacccgtggtcgagagcagagactggggtcagcctgcttgggtttcaaccccagctgtgaagtttacagggttgataacttgaaggtacccaagtatgcctcagtttcctcatctgtctaatgaggatggtaatacccacagaactgtgaggattaaatgagatatggcggccgggcacggtggctcagggctgtcatcccagcactttgggaagccggggcgggcggatcacctgaggtcgggagttcgagaccagcctgaccaacatggagaaaccccgtctctactaaaaatacaaaattagccggacttggtggcgcatgcctgtaatcccagctactcgggaggttgaggcaggagaatcggttgaacccaggaggcagagattgcagtgagcggagatggtgccattgcactccagcctgggcaacaagagctaaactccgtctcaaaagaaaaaaaaaaagatatggcaagtaaagtccttagaacatttccaggagcattctaagattaggtgagttccatggcttgtctttgcagaaatagcaaggagctgctatgagcagtgaatgtacctcttccccagttcagaaagagaggctctccatgggtacgtgagggtggcagataagccacgtgtatgcaactggtagttccatgcaggagtccacacgggcgcagttctccctgcttgctcccaaagggccaacctcataaaaccatgtcaaaataccaacatgggtttatgacctggaatgtttcctctcagtccctgaaacttggcacttagaatcctctgtggagaatgagatacttatggctcttcaccttgcattttcctatctgtccacactttttacttttatttctgccaatagaattcaatctcaggcccccgagttaccaggacactgtcttctataaatcggggctctggggtttcttgttcccaggcaacccagggccaccaaggcctaagcttgcttgttggaggtgtcagagcagagtccaaatctgaaacaccctcgagcagctgtcatgccctaagctcttatcagcgagtgccatatgtccttgtttagcaaaaggtagttaaaagtgtggcctgagatttaaagaaaaggagagatgtttgctctttgaaataagagagccattggaggttctggaaaaataattctacagtttatttagaaacagttctgactggcacctaagagagggcaaggagtgaggtggggagactaaaagggggagagaccggcttaggcctcaggaaaagcaggccgaagagggtgtgacaggtctaacgctggcctgagcaaggtgttgggtatgaggctgggcaagcagtaggagaggtgagtggtttaagaccagtcaagttggcagagagcctctagtgctgcccctggcactcactgccctctgatctgtagcacctgcaggagcgtcccttccagggattccccgtcttctagggaagctatggaggactcccctgtttaaagcatatggcaagataactcaggagggccagggaaagagggaggctgagcatatgccaaggggagaatggggaatgtcattgctgttgctagtgaatggtgccagggaggtccttccaaggggccacttgccacttggagcttcagcccatgaggccatccttgaaccctgccatgtggctcggcagacagccaatactgcctgaagggggctcagatggaatggcagggctgggctgttgccagtaattggtgttaatgactatgacagtggctttgacatggatgagatggagttggggtacaacccaaagcacactgctcttggcacccgaaagacctgggttgcagttctagcccctcatacctgcaaagattttggaaagttacttagactctctgtgcctgacatctgtttcttcatctgtaaatgaagactggattttttgggagaattaaattagttaacaggtgttcagtgcctagctcagaataaatgctcaatatttgttagctatacttactattattgtctgagccttggtttatatcatctgtcaaatgggcgtgatactatgtcatagggttgttgtaagggttaaatgaaataattaatgtgaatttatccaacagtgtgtgaagggtgtaaagtactcaaagtgagtcaattgaaatggaaaatttcacaaaatacctgcatgtaaaaatcagcggctgagcaggtggatcagctaacatttttggaaagttattctaaaagtactgtcagaggaacctttatctacttatggaaagtggggctcactgcccatggggataccctgtagttattttatgttgttgtattagttgcctattgctgctataacaaatttcacaaacatagtggcttaaaacaaccctaagatgttatcttgcagttctgaagttcagaactcttaaatgggttttgtagagctaaaatcaaggtgtcagcagggctctgtggttccttttgtaggctcttgggaaaatgtctttcattttctgacttctaaaacctgactgcatttcttggctcttggttccttcttccatcctcaaagccagtaacagcatcttccaacccttctccccatcctgactctcgtgtctccctcttacaaaaccatacctagaaaatctgggctaatcactgcatctcataattcctaagttaatcacatctccaaagtccccccgtttttttttttcaagacagagtctcgttctatcgcccacgctagagtgcagtggcgtgatcttggctcactgcagcctccgcctcccaggttcaagtgttctcctgcttcagcctcccaaatagatgggattacagccatgagctaccacacctggctaattttttatatttttagtagagatggggtttcaccgtgttggccacgctggtttcgaactcctaaccttaggtgatctgcccactttgtcctcccaaagtcctgggatcacatgcgtgagccaaccgcacccggcccaaagtcccttttgccatgtaaggcaacacagtctggggattaggccatagacatctttgacatattattctatctgccagaaatattagagtattagattgggcatgatggtaagaaaaactatttagaaaaaagaaagaaatattagagtattagagaaaatgatctaaatcaaagagttttagctcacttctgtttagggcttctccctgtaccctcccagttaggtgagtttgttttcacatctctttttttcttttttttttttttcccagacagtttctctgtgttgcccaggctagagtgcagtggcacaatctctgctcactgcaacctctgcctcccaggttcaggtgatcctcctacctcagcctcccaagttgcaacaccatgccctgctaatttttgtatgtttagtagagacagggtttcaccatgttggccaggctggtctcaaactcttgacctcatgatccacctgactcagcctcccaaagtgctgagtttacaggtgtgagccaccatgcttggctgttttcacatgtcttaaagaccaaaagctcaagaccagaggggtcaaggctatggatcaaatgcttcttgaaactcagttcagaaatggctccttcctgtcctttttgggctttctccctccccttgagtaaccctcaaatttgtttcttttttagatttttgtaaaaactttttttttacagagacagggtctcgccatgttgtccaggctggtctcgaactcctgagttcaagtgatcctcttgcctcagcctctcaaagtactgagattataggcgtgaggcaccacgcctggccagtaaccctcaactttggcccttagaacagtcactgttgccccatcaacagcatttgttgacttttctagctgcttctcctcttccatttctagtgaaatagaaaaaatgccctcatgtccagagcaagatctctgtgaagcaaatcactctagtgacgtttgacctccctgagattcccagacggtgtctgtactagtttcctattgctgctgtaacaagttagcacaaacttagtgacttaaaacacagatttattatcttacagttctggaggccacaattctgaaatggttctcatggggctaaaaatccaggtgtcagcagggagaatttgttcccctgccttttccaacttccagaggctgcacgcattgctcggtttgcttccatcttcaaagccagcaatgtcaggctgcatccttctctcactgccacacctcagatctctcttctgccttcctcttcttcttcttcttctttttttttttttgtttgagacaaggttttgctctgtcgcccgggctatcatgcagtggtgcgatcacggctcactgaaacctcagtctcccgggtttaagtgaccctcttatttaggctcccaagtagctgggactacaaggattgtgccaccatgtctggctaaatttttttttaattttaattttttgtagagacagggtctctctatcttgcccggctgatcttcgactcctgggctcaagcaatcctcctgccttggtttcccaaagtgctgggattacaggcatgagccaccatgccctgacctcttctacttttttttttttgagacagagtcttgctctgttgcccaggctggagtgcagtggtgtgatctcagcttactgcaacctctggctcctgggttcaagcgattctcctgcctcagcctcctgagcagctgggattacaggcgcgagccaccatgcctggctaatttttctatttttagtagagatggggtttcaccatgttagtcaggctggtctcgaacttttgaccttgtgatctgtccgcctcgacctcccaaaatgctgggattacaggcacaagccaccgcccctggcccctcttctacttttgaggacgctcgtgattacattggcccacctagataatccaggatcatctccccttttttaaggtcatctgattagcaaccttaattccctttgccatctaacatcacatattcccagcttctgggaattatgatgtagacatctttggagggcaattattctgcctgccacaggacctgagaaggagttccaaatagtgtccgcctgggctgcctcattcttaataaccacccccttccagaatgtgcacaatggcccactcaagagagaacacctgttaaactcttcaaaatttctcccgcagctctcaggtctctcagtccctctgttggtggaaggatctgagggcaatagagcctggaactgcacactttatttgttaagttaatttttttcttttaaatcagaggaacatataaaaaggtgcacaaatcatgagggaaatctcaatggagttttacaagtgagcactctccactgtcatgtaactgcccccaagatctgcacccatagccccctttggaccccaaataaattatcgtcttcccctaaggcaactactattttaccttctatcaccataggttaattttgtctgctttatcttactttattttttatttttattttgctctctggatctgtgtagagtatttgcctgtttttttttttttttttttttttgaggtggagtctcactctgtcgcccaggctggagtgcagtggctcgatctcggctcactgcaagctccacctcccaggttcacaccattctcctgcctcagcctcctgagtagctgggactacaggtgcccgccaccctgaccagataattttttgtatttttagtagagatggggtttcaccgtgttagccaggatggtctcgatctcctgacctcatgatccacccgcctcagcctcccaaagtgctgggattacaggcgtgagccactgcgcctggccgagtatttgcctcctttttaagcaaacttctctttttttcttttgagacatggtctgactgtcgcccaggctggagtgcagtggcatgatcctagctcactgcaacttcctggctctagccaacctcccacctcagcctcccgagtagctgagactacaggcatgtgccaccacgcttggctaattattgtattttttttttttttttttttgagacagagtttcgctcttgtcacccaggctggagtgcaatggcgcaatctcggctcactgcaacctccgcctcccaggttcaagtaattctcctgcctcagcctcccgagtagctgggattacaggcatgcaccaccatgcccggctaattttgtatttttagttgagttgggatttctccatgttggtcaggctggtcttgaactcccgacctcaggtgatctgcctgccttggcctcccaaagtgctgggattacaagcatgagccaccgcgcctggacaattcatgtattttttgtagagacagggtctcacaatattgaccaggctggtcttgaactcctgagctcaagcaatctgctcggctcagcctcccaaagtgctagcattacaggcttaagccactgcgcctggcctacaaacttcttattgacgtatacatacaaaaaagtacactaatcaaggaagcagctggattagttttcatgacataaacccatgtgtaaccagcattttgatcaataaatagaacattgccagcacccagaatccccgctcaggctctttctgtgcactaacaagccaagtctaaccacaatcctgattcctatgattgtggatacattttttccatttttgaatgttattttgttcaatgttatatttgtaaatttctcatgtaattaatatgccgtaattaattcttttttattgctgcgtaatatcccattatatggccacaccacagtttttctgtactattgttaagggctgttgagattgtttccattcacacttctttttttttttttttttgagataaggtctctgtctgtcacccaggctgaagcacagtggcatgatcgtagttcactgcagcctcaacctcctggtgctcaagcaatcctcccacctcagcctcccgagtagctgggactataagtgtgtaccaccatgctcagctaatttaaaaaaaattttttgggggggccaggcacagtggcttatgcccataatcctaacactttgggaggccgaggcgggcggatcatctgaggttgggagtttgagacctgcctgaccaacatggagaaaccctgtctctactaaaaatacaaaattagccgggcatggtggtgcatgcctgtaatcccagctactctggaggctgaggcaggagaattgcttgaacccgggaggcggaggttgcagtgagtcgagatcgcgccattgcattccagcctgagcaacgagagtgaaactcagtctcaaaaaaaaaactttttttttttttgtagagatgaagtctcactatattgcccagactggtctcaaattcctgggctcatgtgcttctcccacctcagcctcccgaagtgctgggattacaggcatgagcttctgctccttgcctacttcattttgaaagggagtgactacctacccatatctcagttgtcataaatgcaattccacctgcagaaattcaggaagggaagattgtatttagcactggtgccaaatgcattcattaggagagacttaaaaacagtctactggttaggattaagttcagctgcaagttacagaaaaaatgaaatgacagtgggttaaagaaagaagtttatttctgtcttgtgttcaagaagtctggagacagtgagtgtccaaagtgtatgtggggtaaggccccatgccctgtgcctggttgcttttagcatgcatagcttccatttccatgcagtctcacccaggatttcgggatgactgctgagtactaaaccaaaaaacaaaaacaaaaacaaaaaaaaacaaaaccgatgttagagaggcaggtaaggcatttgaaaacattgttttatggaaaaaaaaagttatggaacatttataaaatgaaaaaagcagttttttctaaattaacacattattttataacttaaaatgttttaaatatgtatttgtgacttaactgatacattattataagtagatacttgatatttcatctatatcctttaaaatattcaagctgaccaagaaattgtatgtggggtcttccaatcaggaaaaataggagccaggcacagtgcctcacacctgtaatcccagcacttgggaggccaaggctggaggatcattgagcccaggagctcacggccagctggacaacatggcaaaaccccatctctacaaaaaatacaaaaacgtgggggtactggtgtagtctcagttactggggaggctgaggcaggaggattgcttgagcccaggaggtcaaggctacaatgagccattattgtgcaactccaacctgggcagcaatgcaagactctgtctcaaaaaaaaaaaaagaagaagaagtccaggcatggtcgctcatgcctataatcccagaactttgggagagcaaggcgggggaatcacttgaggtcaggagttcaagaccagcctagccaacgtggtgaaaccccatctttactaaaaatacaaaaaattagctgggcatggtggcgggtgcctgtaatcccagctacttgggaggctgaggcaggagagtcacttgaatctaggaggtggaggttgcagtgagccgagatcatgccactacactctagcctgggcaacaagagcgaaactccatctcaaaaaaaaaagaagaagaaggaagatgttatcctcctattacagtcgcctacattcaggcaaacatagtacgtagaggaagacatggacttgactttggtactttttggatgcagaaccagggccattttgcttcaactaatattttgttaattaatgaaagatcaataaatatgtttgttcaaattaataattttaaaaaaatttattcacacaatttggtacctagcacaagaagcaaacagaggtgacaaggtgcatgctgcagcagacaacaaacccattgtcaggggtctatgaagcagtcagttctcattagaaaaccgagagaatattttacagcatgagtgacatgtgagctgaggcttgaggactgaatgcaatttcgatgaatgtagaatgtagaaatttcagggtgagggaccggcatggatggaggcgccccgctatgacaagagtctgagttcttcaagccctaatggggaggctggggtggatgtgggggccaccatggtcagagaggtgggcagtggccagtcaaggagggccttgaatgttaacattgcacagtgaggccacaggcagattcaaaatcacaagggaagggccagtagatgagggacccaaggcagggagggcagttctgaggctcctgggagtctggctgagaaagggtgtgggtagaacattcgctgcagcagtgggaactgtcaggaggcctggacaggggagctgtgcagaggtgggaacaccagaatttatccactcacaaatgtgttgaggatacagaggacacgtggaagctggctcccaaatttctggcctagatggctgggcagatggggttagcatgaccatgaaaggatttgaggaaaagatgactttgtgtctggacaggctgaattggcaagcaggcctgcaccactgggtggaagttacagacagcatcaggtcaacatcgcggagaactgaggtctaacatttagagctgcctgaagattgtggatggccttgaatcctagccagaggttgtcttcccatttgctagggattccaggattaggtggaagacaggaaggtacagcctgaaattcacacagctccagtattgtatgattctctgtgaactcatagaacagttggtgtgcatacctggtatgctgacaaagagatctttggcaaaactattgagcctgatgtctaggaatttatcgttagaaaaatctttctttcttttttttttttttttttgagaccaagtcttgcattgtcacccaggctgcagtgcagtggcgccatctcagctcactgcagcctctgcctctcgcgttcaaatgattctcctgcctcagcctcccgagtagctggaattacaggtgtgcaccaccatgcctggctaatttttgtatttttagtagagatggtggaacaggaattaaaagaaattaaagaatatgtgtaagcagaagctcagttgtatataagaaaactcaattccccctgagaaagagaaagagctggagtcctttaaaaattaactgcctgtttttctgtggctagtgagccttatctctcctcctctcccaggcattgtgaagaccctgtttctctagctgtgcagctgcaaggttactagacagataaactcaagtcataaaacatgtttttccttggaaagtaagaaatgatgtaatgcatgtctctcaattaattgaattattgtctttgtttcttgctgtaatatgcttccccctgcacagatctccccacaccccacgaaatgcttaaaagctaacttaactctttgttcagggctcagtcctttggatgttaatccgactgggctgatgcacacctaaataataaatatcctcctcaaccccattggtctctctgattccttaaaaaatcctgctacaatgggatttcaccatgttgtccaggctggtctcgaaatcctggcctcaagtgatgcatccttcttggtctcccaaagttctgggattacaggcatgagccaccatgcccggcctgaaaatcttattcttaacaagtagactgactgcctgagaggtgccagggtagaatattgtctctgccagttaacaagttctgaggccttggagaggtctttccacctataaatcttagtgttccatccatcaaatttggaactcatccacctcacagaatgattgtggggatcaaatgagatgatactgtgaaaaatgcccagttcactggctgtcccatccagacacttaataaatattagtgtcctgtcccctttctctttttgtctggaggtggggttaccactggagaggggatcttgccaccttcttcaggatagcaggatcttgccaatggtctggtttagattgagaaacttggctcccaggccatgcctcttattttatggatgactagttaaagcccagagagttgttacctaggtgaggtcatgcaggtgtgcagaaccaggcctctggtctcaaggcccacaccatacagttctggctctggagggaattctattcgcctgtggatttacttgcaacagtgatgcttagaagaacccgtagttaagacagaataatcttctctctcttcccccacccccttggtgaagttaaatgaaaagactcattgtcccatggagaagagaaaaactgttaaaacaaaagtcaaagccgttgtattattttaaaatattctttccatgttcccaaatgcttcatggaatctgttcggactgaattaacctctctatttctcagcacagaaattcttctcagatgcccaaaaatgaaaggaactgttctcaaatatcattccattttccagttagaaatgggtcctgatcttcaaatgctgacagctgtaaatgccaaactgagaaacaaccattgagatggatacatgcactgacttatttttttcttgtttcactgccattgcagtttttaggaaaaaatctatcttgtctggtactgatattgccacactgattttatgttggcatctatatggtatccttttcccattcctttattacttatctttttttttttttttttttttttgagacagagtctcactctgttgttgcccaggctggagtgcaatggtgtgatcttggctcactgcaacctctgcctcccgggttcaagcaattctcctgcctcaccctcccaagtagctgggattacaggtgtgcgccaccatgcctggctaatttttttgtatttttagtagagacggggtttcacaatgttggccaggctggtctcaaacttctgacctcaggtgatctgcccgcctcagcttcccaaagtgctgggattacaggcatgagccaccatgcctgacccttattatttgtctttttcacaagcccacagttaacatcataattcctttttttaatgtattatttttaatttactttctttaaaaatattttatattaaaaatatttctacttaaaggaactttagaagatttcatgttagttttcaagtcactgtaagattttctttctttttttcttttttttgaggccgggtcttgctctgtcacccaggctggggtgcagtggcagtgatcatggctcactgcagctttgacctcctgggctcaagcgattctcccacctcagcccctccctcgagtagctgttctaagttttcttcctttgtgccaccatgtctggctaatttttgtatgttttgtagcgatgggatttcgccatgttgcccaggctggtctcctgggcagcatgacctgcttaccttgacctaccaaagttctgggattccgagtatgcaccaccgtgccgagccaaggttccagtttcttcacatcttcaccaacacttggttacgtcagtcttttaaaaattgtttttaaattttttcatattcctaggtcactattatactcttttcaatatactcttttcaattttatctattccagcagatttgttgtggcgtcttattgtgcttttaatttgtatttttctaatgactaaagatgttgaacgtgttttcatatgtttatttttcatccgtgtatcttctttggtgatgtgactattcaaatcttttgcacattctgaagtgggtttatcctcttctaattgagtgataagagtttacatagtcccggccaggtgctgtggctcatgcttgtaaacctagcaccctgagaggccaaggcaggcagattgcccgacgtcaggagttcgagactggcctggccgacatagtgaaacctcatctctactaaaaatacaaaaattagcctgtagtcccagctactcaggaggctgagacaggagaatcgcttgaacccaggaggcggaggttgcagtgagccaagattgcgcgattgcactccagcccgggtgacagagtgagactctgtctcaaaaaaaaaaaaaaaaaagtgtatatagtctggatagaaataatcgatcagatacatattttacaaatattttctactagtctgtaacttgtcatgccattgcactttgtttgtttgttttgagacagagtctcattctgttacccaggctggagtacagtggtgtgattatggctcactgccacctcgacctctcgggctcaagcaatcctccagtctcagcctcccaagtagctgggactgcaggtgtgtgccaaccttcccagctaatttttttttttttttttgagacagagtctcactctgtccccagactggagtgcagtggcatgatctcggctcactgcaagctctgcctcctgggtttacaccattctcctgcctcagcctcctgagtagctgggggactacaggtgcccgccaccacacccggctaattttttgtatttttagtagagacggggtttcaccgtgttaaccaggatggtctcgatctcctgacctcgtgatctgcccacctcagcttcccaaagtgctgggattacaggcgtgagccactgtgcctggcctaatttttgtattttttatagagacagggttttgccatgttgccctgccttcgcctcccaaagtgctgggattatgggcatgagccactgcaccccagccttttgccattacattttgataaaaagaaagttttaaatatttttagatactaatgtgtatttaacaattatgggtttgtatgtcattattaggataatatacataagtaagcataaaatctgtctaatatacattaagtggcttaatatgacaaaattagcagtgtatactttcttttttttctttttttttttttctgagatggagttttgcttttgctcttgttgcccaggttggagtgcaatggtgcaatcttggctcattgcagccttcaccttccgggtttaataaattctcctgcctcagccttccaagtagctgggattacaggcttgcaccaccatgcccagctaattttgtatttttagtagagacgggatttctccatgttgatgaggctggccttgaactcctgacctcaggtgatacacccaccttagcctccaaagtgctgggattacaggtgtgagccactgcacccagtcaacagtgtatactattgattggtttgattacagaataataccaaaaataataacagcaacaacaggccgagtgtggtggctcatgcctgtaatcctagcactttgggaagctgaggtgagtgaggagttcaagaccagcctgggcaacatgatgaaaccccgcctctactaaaatacaaaaaattagctgggcatggtgtggcgcaccggtagtcccagctactggggcggctgaggcatgagaattgcttgaacccaggaggcagaggttgcagtgagccaagatcgtgccactgcactcctgcctgggcgacagcgagactctgtctccaaataacaacaacaacaacaacaacaacacggaatagctaacacttaaattcagcactttctatgtgccaggcagtgtttgaagtgctttaaatatatctacatatgaaccgattgattctatataacaattaggtctactgttatctccgttttaaagatgaggaaactgaggtcaagagagggtaagtaacctgctcagggttggacagctagcattattttgctttgtttatttttaactcctcactcttcacctatcctcagtgccttttggttagcaatggtgacttgaaaatacaaacatttcttgaaatccacagtaaacccaaaccacatgcaatgatgtttgttttttggaaatgatcacacaccacatcatattccaagtgttgagtgcatatgcctcggagtggaagtgggccttgagagcatgttgtatacattttgaaacaaataagcctagactttttatctgctcggtttggagaaaggggaatagcaataaaatcataaatcacatataaatgatgtaacacactgaatagtgttttataaaataaggtgagggcatgatggtgcacacctgtagtcccagctactcgggaggcttgggtgggaggatcactggagttcaggagttcaaagagccagtgagttattgtgccactgcactccagcctagatgacagagtgagaccctgtcctcccaccactaacaaaaaccctgagatgataaatagcaaggcagcttgaaagtaaatagtaagtttaggatttgagaaaggggcaagatgttctaagttttcttcctttgttcagaaggaatctcagagttaaagctatgaaaagggatcaatctaattagtaaagagtttaaataggctgggtgtgttggctcacacctgtagtcccagctacttgggaggctgaagttgggggatccctcgagcctgggaggttgaggctgccgtgagccatgatcacaccactgcattctagcctgggtgagagagtgagaccctgtctcaaaaaaagagtttaaatggtttaaaaaggggggtgaggagagtagttatttgtaatgagctagtgcaggggtccccaacccccacccggaattagtccatggtctgttaggaaccaggccgcacagcaggaggtgagcagtgggcgagctcagcttcatctgtatttacagccgctccccatcgcctgtgttaccacctgagctctgcctcctgtcagatcaccagcaccgttagatccattagattcttttttttaaattgctgctgcacaaattaaggcattagattctcataggaacatgaaccctatcatgaactgcacactccttatgagaatctaatgcctgatgacctgtcactgtctcccgtcactcccagatgagaacatctagttgcaggaaaacaagctcagggctcccactgattcctacattatgttgagctgtataattatttcattatatattgcaatgtaataataatagaaataaagtgcacaataaatgtaatgcacttgaatcatcccaaaaccacccccacagctgggtctgtggaaaaattgtcttccacaatattggtccctgatgccaaaaagattggggaccactgagctagtgggttctggaacttcacctcttatgagcgatgtaaccttgggcaagttacttctctgagatactctataaattaaatcacttaatacgttgaaggcacttggcccagtgcctggcacataggagatgctgaataaacattcactatttttaatataatcttaatgcatagtaaaattatattaaaaagagtgagctagttcaatacagcaagtgtgaaaaactggactctgaaggttgacaggcccaggtccattcccaggtcaatttctggaagcaatttgctgaacaaacagttcgctgaaatagtgaggtttttttttaagttttgaaacatggtccctgccccacccctgccctgtccctgcctctgacaaagaaagaactatggcatttcatgacttgatttctggggattttcctttcagttttctactaatcaatgcattggaaaattgacctgctagtcctgggtttgaatttgttttacctttttttttttttgagatagggtctcgtgctgtcacccaggctggagtgtagtggtgcagtctctgctcactgcagtcctgggttcaagtgattcttgtgcctcggcctcctaagtagctaggactgcaggcacgagccaccacacctggctaatttttgtatttttagtagagattgggtttcgctgtgttggccaggctggtctcaaactcttggcctcaagtgatgtgcccaccttggcctcccaaagtggtgggattacaggtgtgagtcaccacacctggacttttttaactttttaaataaatttaaattttttttttgtagaaacgaggccttgctgtgtggaccaggctggtttcaaacttctggcatcaagcaatccttctatctaggcctcctaaagcactaggattgcagacatgagccatggcacctagacttgaccctgggtttgaattctggctctgacacttgctaactgtgtgtgaccttgggcaggccactgacccttcctgagccttatgggaatgtgggaataatattaggtaatggagcaagttaatataggtaaagaatttagaatagggcctggcacatggcctcagtctagtaccagagtccaagcccataaccactgtgccaacactcttgtaataaatgtatgtgggagacagggaggctgggaggctggatatgtgatgctactttatgtcaactacacatgaattttatatgtataatttatataaactaattgatgccatctactattattagactgaacaaatattgttacttggaactctcagatatgtaatagcttttttttattcaaatccaaaatgtaaaatgtgactatgagtaattgataatgaacttaactgataagaaacttcaggatagatttttctcaagttttccattcagtcttacagtgattaaagtgatgaaaaattccaactatgcatgccctgctcggagcgtccaagaagagcctaccaacgggggctacttaagctctcaaaggccaaacacacaaacggcattttgagtgcaagtggtctgtttgaactctgaaaaggcggggcagcgggcctgcagctcctggagttcagggagacccggaaatctcaccctgccctcttcttgtgttgtgtttgtcacagccttgcccctcttgctcgccttgaaaatggaaaagatgctcgcaggctgctttctgctgatcctcggacagatcgtcctcctccctgccgaggccagggagcggtcacgtgggaggtccatctctaggggcagacacgctcggacccacccgcagacggcccttctgggtgagtggtggtgctcacccccaaaagtgggcaggtgggggtggtttggggagggctcagggacagggattggtgactgtttgagaagctttcctttccctgggtccttgttggatgtgctgggcctggggtcctcactggtggtgaatgcatccggagttgagcacgtggttgcacacgagttttcaaaataaacttttctttgaagcctttaattgaatctgaggcttatggcttttctccaatattcagggcaagatttctcatctgaaaatgtccttgttgttggacctatctgagcaaaggtgttatgaaaattttttattgggtttgcccagctagatctgttaataatgcttccctgcatggcagcagggaagtaagagctgggccagaagagaggtggggacattgtgaactgaatcgaggtattaggaatggaaaatgccaggggtctattcatctgatccagtgaacatttttcctagaaaaaggaaatgtcatgaaaacacacggaaaacatgtaaatcagctgattctaaacaagggcattggtaagcctggcatgtggaggttataggaaggttgggcagtgccaagagaatgagttttggcattgacctgggttcaagtcctgcctctgctactttccagatgtgatataacctccctgaggctatagatgtgatataacgtaggtgatataacttccctgaggctcagttttatcatctgtaaaatggaagtgtgaatgccaaccttggaacatttctgagaaataaatgaggtaatatacatacattctaggtactcagtaagtaaaagctttaccacaactgtcattctattaagttctttgaaactgtatttgacatttataccttgttggccagccactcgaatctgaccccctgcaaaggctactaagagaactgcccagtgacctggtagcctcagtggcatccgaaattacaatcagggaccacagggacctaaagagccctgttttcagaggtcagaatctttattgatgttaactaagtgaggaccccagtgataggtcttccaggttcctgaaagtccttgtttccatagtgatgtaaacaacacttttgcaaatgtgaaaaggagtgggaagtgtttagtatgttaattgaaacgttttaaaaaagaaattccaagatgataaacaacatctctctctctctctctctgtctatatatatatatatatatatatatatataaaactgatgatgcacacaatcttggctcattgcaacctccgcctcctgggttcaagcacatctcccaccacagcctcttgagtagctgggtttacaggggcacaacaccacgctcagctaatttttgtatttttagtagagatggggttttgccatgttggccaggctggtctcaaactcttggcctcgagtgatctgccatctcgacctcccaaagtgctgggattacagacatgagccactacgcatggccaagatacctgatttctggatcaccagcagtaactgcccagttgggtttctgatggggctggtctcaggaaaagccaccacacacttgcctggaaaagcacactgcttctctaggctccaagtctctctctccctcccttcctccctctgatacacacacacagaccacatcacccccaccttccctggttgtcagcattcactgtcgtcctcctttgcctagaagcccattttgctaaaggcaccaaccctgcatccagcattgattccttcttctcatttttcaagagaatgtgtcagagacaaagaggaggatggggcacaacctatctttcccaccccaagactggaagtgggcatgggtgttttcactccgtgagctgtgcaagtggctgctcccagatatgctggagggctgcttggcttatgaaaatggtggagtgggccggacatggtggctcacacctgcaatcccagcactttgggaggccgaggtgggcggatcacaaggtcaggagttcgagaccagcctgaccaacatggtgaaaccctgtctctactaaaaatacaaaaattagctgggcatggtggcgggtgcctgtaatcccagctactcgggaggctgaggcaggagaatcgcttgaacccaggaagtggaggttgcagtgagctaagatcgtgccactgcactctagcctgggtgacagagtgagactctgtctcaaaaaaaaaaaaaaaagaaaatagtggagtgacaatcatgaaaccagaaagcaaacactatagctgtggcctggattctcaagtgcaatctgcttttttttttctcattttgatggggaacaaaaatggaaaagcatgctcattggtagtccttgccccgagggtatgaccttctcttcattcttagaataatgtagtgttttgtattttatgcatgtttgcttctcttggctcttggactatttgttcagaatatggcccaggccacatttcactttttaatggcaaatcattttggctgaagttatggcatccactggcatgatggattttactggttatttgcttgcaagtatgttcctgaaagtttaacagagtagaaacagcagaattgtttcttaggttaattttttttgaactttctgggttttaaaaatgtttatcttttatgtttaaattcaggtcagagtctcagtaacaacttgagtcagtttgaaaaaataacgcatgtatatatccaccatcctgtgaacatctgtgggctgttcactcggcagcctgtgatgtctgtccacatgggcttatctcttacctcattcatttatctggaatttctactctgtgccagatgccggttgggggtgtgggggtagtgtttaagatgaatagacaccatcaggaggtgcacagagtagtggaagagacaggcatgtgaaaagatcattaatttggtagaatcggtgtgcaaaagtagaggcatagctacattatagctcaactctgcctgctgagcaggcttagtgtaaggcagtggttctcaagctttggtctcaggatccttccttttacgctaaaaattatttttattttattattttattttattttattttgagatagggtctcactgtctcccaggctggagtgcagtggcatgatcatggctcgctgcagccttgacctcttgtgcttaagcaatcctccaacctcagcatctcaagtagctgagactacaggcacatgacactacgcctggctaatttttgtattttttgtagagacagggtttcgccatgttgtccaggctgatcttgaactcctgggctcaagcgatcctcccccctcagtctcccaaagtgctgggattctaggcgtgagccactgtgcccagccaaaaattattaaggatcccaaataacttttgtttgttttttaagaatcctgaggacaatcaagggagctttgtttatgtgggttagatctattggtatctacctgatcagaaatttaaaaataacaataataaaatcagaatgtgttaacaaactatatatgtataaaaaactatattttctggccaggtgcagtggctcatgcctgtaattccagtactttgggaggctgaggtggaaggatcacttgagcccaggagtttgagaccagtctgggcaacatagggataccttgtctctacaaaaataaaaaaatgaggccgtgcacagtggctcacacctgtaatcccagcactttgggaggctgaggtgggcagatcacttgaggtcaggagtttgagaccagcctggccaacatggtgaaaaactgtctctactaaaaatacaaaaattagcctggtttggtggtgtgcacctgtaatcccagctactccggaggctgaggcaggagaatcacttgaacccgggaggcggaggttgcagtgagccgagatcacaccactgcacttcagcctgggtgacaagagtgaaactgtctcaaaaaaaaaaaagaaagaaaaaaaaaaattagccgggtgtggtggtacacacctatagtcccagctaattgaaatgcttaggctgcaggatcacttgagccccagaggtcgaggctgcatgagtgagccgtgatggtgccactgcactccagcctgggtgacagagtgagaccctgtctcaaaaaaaaaaaaaaaaaaaaaaagaagagtagcaccgttttacagttttgcaaatcttgtaacggtctggcttcgtagaagacagctagattgtcatttcttgaccattcaatctgtcatgaaatgttttcgttagattatatgaaaatgcatggatatgtagttggaaaagggaagagcatttaaatagccttttcatataattgtgaatgttctttgatactacaccaaaacttgacaaagagtagtttcttaaagtttagttgcaatgtgaaatctaaaatcagatcaataaactttttgttctctatatacccacaagagaatgagagtatgaaaggcaaacattcatgttattatggaaatagttctgacctcatggatcctctgaaaaggcctcagggacccctagaattccccaaactacacttgagaatggctggtttaagagaattgttcccagtgaaggtcctgcccacggagagccctgtgggacagcaggtggcagaggcatgaggatggagtgtggcagtggggctccgatgtggcgctgggtctgccagacaggtggtctgagctggagataaggcagcaataatttaggacctcgagggctccaaggaaggagttttgagcttcattttgcaggggtaggagctgtggagggctttaagcagtcaacagtgggtgtcgctttgtctttgcacccactgtactctccggacagacttgaccttcctgggttgtggcaaagagcagggatctaaatagcaggctgcaacaggagaaggaacgagcacctgctctagcccaaagacccctccaggccacaacgctggcaggtagagtcggagaatctgactgtgctgtacccagaaccctttggacttggattcttccccttgaccagccttatcagtggcacccatccccttccacactcctcgctaggccctcctcaagggggcgctaactggaaggcatgctgccccactgctaatggccgcctgcttcgtttgtgcacactttttctctttgttaccccactttcctatgaggaggtggacctgtctccagaacaaccagtggggtatatcagcctttttggaaaccttaaccctccttgcccaaactcccagagtattcttatttatttatttatttatttatttatttatttatgatagagtcttgctgtgtcaccaggctggagtgcagtggtgggatctcggctcactgcaacctccgcctcccaggttcaagtgattctcctgcctcagcctccagagtagctgggattacaggtgcctgccaccacgcccggttaatttttgtatttttagtagagacagggtttcaccatgttggccgcctgcctcggcctcccaaagtgctgggattactggcgtgagccgccgcacccggcccccagtgtattcttgattccctccactccacaaactactctacagtcagccagcttgtggtctctggtggtggtctgtcttatgaggtcttgttgacatatgcattcttttctaaatttaccaaactggctcattttatttctgctaactaaacttgaaagccttttcttttcctattatagactctcctttggatcaatactacacactcagaagttatgtttgtgttttaagagagcattttgtggcaatatggcatcaattctagaagtgggagacaaagatttaaaaggaagttggccctgcagtctggtcaggggatggtagggcctgagctccctcccaccccacaccccaccacacacactgctggaagaattccagaggtgttccagggtagacaccacagcatttagtaaaatttactcataacagttaatttactacttaaaaactaatgaagaaaatctaagaattcacctttttttttttttttttttttttttagacaggatcttattctgttgcccaggctggagtgcagtggcactatcatagctcactgcagcctgagctcaagcgatcctcccaagtcagcttcccaactaactgggactacagtcatgtactaccacgcccaactaattgtttaatttttttgcagagacagggtcttactatgttgcacagactggtttcaaattcttggccttatgcaatcctcctgccttggcctcccaaagtgttgggattacaagtgtgaaccattcctcctggcagaattcaccttacacagccccaaattctgctcttggggaatcacagtgtattaagagacacttattttcatttttgcatgtatctctaaacctgacatcaaaatattcataaaattgcaatacgtttcatataatgagctgaaacctcctaagtgagcaatgtgaagttgttggctgcctggagaattaaatgtaagcatggcctgctctgtgttgctaatggaaatttttacctaggttgatatttattaacccccccttttttttttgagacagagtcttgctctgtcacccaggctggagtgcagtggcgtgatcttggctcactgcaacctccgcctcccgggttcaagcaattcttctgccttggcctcctgagtagctgagattgcaggcgcccgccaccatgcccggctaatttttgtatttttagtagagacggggtttcatcatgttggccaggttggtctcaaattcctgacctcatgtgatctgcccacctaggcctcacaaaatgctggaattacaggcgtgagccaccgtgtctggctccaacctacatttttaaggcttagctgccactcaatggatttctacatcccaaaacaatacctttaattgacttttattggcctcctctgtgaaggacggaaagcagatgccagaagccatgagaggctctggctctccgaccaacccgtggaagccactagtcttaaatttcctgaagccattttgccatgattaaaacttttgtctccttccctgagctttccagagctttgtccattctcttccttctacctggaatatccttccccagacaagacccattctcatccagggccaggtcaaatgccacctcctccctctccaggcaagacctccattgagggaccacacacattgcaggccctctgccaaagtgccaaccctctctgccttacattccaaggggtaatagtgatacttacctcagagggattcacattttagctatttttgcacttgtctcattttactactagactgtctcttcaagatagggactgaatatttttcatttctcatagcacctatgaaaggcaactctcatttactgagcccctgctgtgggttgggacgtgttatctcacctaatccatagcaggagcaaacactgtaaggtaattcttgttatattctattttcagacaaggaagctgaggctcagataggttaagcagttttggcaaatttgtcaagacttctgcaaacctagacagaaaaggtgctcaacccccagcccctttatggaaaggatgcatggcttaggggcagatatgcgttggagcaaagagaaagacacgcgtactcttgaatgtactattttagcccctgcttgctccttgacccagagtttttgtgtagaccatagaatgccctgcccatctgtatttggaggtgctgctgcagccggtcacacctgggttctactgacctccagccctggctgtggtcctgcccagggctcagtgtgtattgaacaagtaagtgaatgagacatgcagaaggctgatttcattcttatttgaatgatttcaatcttgattaaccttcttagcaagaggttattttcttctcctggacctcagttcattcatctctaaaagaaggaagttgaagtcaatgatctctcaggtctcatctcagatgtggtgatgtcaccaattcccctgacatcccttctatgtgggaaccctgatgaaatccgcagctttccctcactgtgtccaggtaggaaagccaaggaggaaccatattctggaagccaaggaaggagaagttttgagacacagggtggtcagtaggatcaggcaggacaacagggatggggcagtgggatcaggtaacacagcagggctgggcagtgggttcaggcagaacagtgggctgggcaggggatcaggcaacacagcaaggttaggcagtgggatcagataatgcagggctaggcaatgggatcaggcaacacaacagggctaggcagtgggatcaggtaacacagcagggctgggcagtgggatcaggcaacataacagggctgggcagagggatcaggtaacacagcaaggctgggcagtgggatcaggcaacacagtagggctgggcagtgggatcaggcaacatagtagggctggacagtgggatcaggcaacacaacagggctgggcagtgggatcaggtaacacagcaaggctgggcagtgggatcaggcaacacagtagggctgggcagtgggatctggcaacacgacagggctgggcagtgggatcaggcaacacagtagggctgggcattgggatatggcaacatgacagggctgggcagtgggatcaggcaacacaacagggctaggcagtgggatcaggcaatatggccgggctgggcagtgggattaggcagtgaagcaggggttgttaaacttcattgtgcatcaaaagctcctggaaggcttgttagaacacagattactgggccctgtgctcaaagtgtctgattcagtaggtctgggttggagcctgataagtggtattcctggaaacctcagtttgagaactattactgtagagaaacctacaaggttgggtgggaatgggcaggaggaaaagatactagaagaagatgctgtggggcatgagccggaaagacaatacaagatgagtaacatctgcagagaattgcagctgcagagtataaactaactgtaatctaggtccagcccttctgaagctttacaaataagctgctagcattgtccagccttatagggaattggcaaaaggtgagtttcaggcctacatgggagccagcctcttacagcacagcagttagcaatacacatctaaagaactaagtagctggcatgtgtctttatcatcagaatagattatacaaatgaaggtcgatgcattgagcttatcaaattgttttaaatatagcaacgtttgttttaaaatttttttttaaacctttgaagtaaaactgcctctttttcagtgctcagctgcagtgcatcacgggcagtacaatgacagctggaaacatggaccccatggaggcgctgtcatggccgccctcagcacagacctgctgttccctatcaaattcatcctctgtgcctatgctctgtttaatatagatttttataaactgtatgaagtaaaattcttcattcctatcttgtgattaacgctggaagaatccaaaaagcacagcgtctgacctccaataagccataaagttaaaagcttttctaggcaatgaatatataacctgatttttttctcctacagatcctctctctccccttctttctccctttctcctttgtgtgaaactctttctttatccctttccttttctataaacttccttgatctttccctctccagtaccccccttcctcattcccttcttcagttccaggatgttctctcctcagcttgcccatatattttgcacctgcaactcatgtgtgtgtcagggagtagaggtgagggattatcccttccgtgagtgacagtcacctttcttttctttgctggctggtgcttttaggagacaaggtgtacaaccttacccctaaggagccagtcctgtccttcgtctctctatctaatgctaataatgataacaatagtagtgatgacggccgggtgcggtggctcatgcctgtaatcccagcacttggggaggccaaggtgggtgaatcacctgagatgaggagtttgagaccagcctggccaacatggtgaaaccttgtgtctactaaaaatacaaaaaattagccaggtgtggtggtgggcacctgtaatcccagctactcgggaggccgaggcaggaaaattacttgaacctcggaggcggaggttgcagtgagctgagatcacaccactacactccagcctgggcaacaagagtgaaactccttctcaaaaaaaaaaaaaaaaaatagtagtgatgacaagccaccatgtgccaggcactgtggtaggcagctcacacttcactctgcatgtactattatcccttaaatgtctcatacaaggtcattcaactactgagcagccagaggtagaattcaagaagcgaacttgctgttttctctacttaaactcttttatcacccaggctgcagtgcagtggtgcgatcatggctcactgcagcctcgacctccaggcccaggtgatcctcctatctcaacctcccaagtagctgggattacaagcacgcaccaccatatccagcaatttttttttttcatatttttttgtaaagacagggtttcaccatgttggccaggctgttctcgaactcctgagctcaagcgatcctcctgctgtggcctcccaaagtgttaggattacaggcataaaccaccacaccccgccttcttgaactcttttctataaccccacccaccctgttttatccagttgaattggactcatctttcaggtctcagtggaagcgcttctaatcttctaggttgggatttaataccccaactattgcattcccatggagtgctgtatgtccccaaaactgcacttagcctgtacagcaattgcctgcttaattgtctgtgtagttcgtcactgtaccagcatagctgagcaaggtgcctggtacacagcaggtattccataaatgcctataggaaaagtaaattaacggactcttcctcaataaatatatatatgttctagaaatttgagttgtatattagtttcctagggctgctataacaatataccacaaagtgggtggttaaacaacagaaatgtattgtctcacagttctggagctagaagtctgagctcaaggtgtcggctgtgttggtttcttctgagccctctctccttggctcataggtggctgtcttctccctgtgtctccacgtggtcttttccctctgtacctgtgagtgtccagacttcctcttcttataaggacaccagtcacattgaattaggctcgccctaataacctcattttaacttaatcacatctttgaagaccctaactccaaatccggttacctcctgaaggcctgggggtgaggacttcaacatatgaatcgcgggcagggagagggacagaagtcagcccatgacaagctgctttgcttttcactttcccagtttgtggaggacagtgtgtcatctttcaacatgtttctaaatagcctctttttcctttctgattcactttatgttcccacttcagggtgatatgagaaacgctggggaagcatgttcaaagacttgagcagtgggtcacttattactttaccatggcatatttcagagtcattaaagcagctccagcaagcgcagtgggctgtgcagccggaatcccagggctgaagatgggacaggagtgcaatctaaccaggatgtgaaaccaagtccaagtaaggtttttcaaaagccaagaattagaacgactaactcagtcctgtttcagtatatccaggggaggctgatttatagggaaagatgaaaggaggacaatgtgtatattttggctgctcagaagaccatggggctagacatgggggaggaggaagttattataagcctacagccagccaatgagtaagaacatcaaagaggaaggctggttggccagatggaccaagagctggggcacaggcaggatctttgggagaaacaagatgaatggatgcttcggacaacctaagttcagagcccggaggggcctttagaaaggcatgatggattatgtgtactgtgggtcattgcgccatgagaagtcccatgggggatgagccccagaggcccttaaagtcagggtggaccattaagtaaactgcggaggaatttcttccaggagggctcagacttggcaaaggctgggaagggctgctttccatctccggctcttaatcccccagccctgacactggggctcgcttgttccagcctacttgatccatttattgaataaagatatactgagaaccagccgggcgtggtgactcacgcctgtaatcccagcactttgggaggccgaggtgggcggatcacgaggtcaggagattgaggccgtcctggctaacacggtgaaactccgtctctgctaaaaatacaaaaaattagacgggtgtggtggcgggcacctgtagtcccacctactctggaggctgaggcaggagaatggcgtgaacccagaaggcggagcttgcagtgagccgagatagcgccactgcactccagcctgggcaacagagcgagactctgtccccgcccccccaaaaaaagatatactgagaacccttttattccaaggtctgcattaggcccagtgaaagatgaggaatccttaaatctttgggacttggtggggtcaccggggatacatcctcctctcctaggtaccgttcatctgtttgcacccagatgtggcctgtcccatgtgattgtcccaccactgaccgaagcaggcctctccattctcctcttccagttaaagctgaatttgtctccaaagtgaagaagaataggaaaaccatcaattttatggagctttttaactatgccaaaatggtttcattctgatacactttttttttttctttttgagatggagtcttgctctgttgcctgggctggagtgcagtggtgtgttctgggttcactgtaacctccgccttttgggttccagcgattctgctgcctcagcctgctgaatagctgggattacaggcacgcaccaccacaccaggctactttttgtatgtttagtagagatggggtttcgccatgttggccaggctggtcttgaactcctgacctcaggtgatccacccaccttgacctcccaaagtgctgtgattacaggcgtgagccactgcacccggccctgatatactattttgtttcataatttgcttgggtaatcattgattcatccattcaacaaatacgtatgaagaagctacagtgtacaaggctttgctttgggtgccaaggatactgcagggtcaggccagggtcacatctggctcaccaccagtcaggctttagggtttggtacaaattccacggcctcaggcaccatgggtgcataggatcagcaaaataagtccttaaagagatggaaaactcactcataaaaccatctgggcttgatgccttttgtagaggggatatatttgacaacaaattaaatatcttcaaaatccatttgtgcattcaggtttttcatttcttcttaagtctattttggtcattgatatctttctgaaaagttttctcatttgtctacattttcaaatctgttgttataaattatagctcataatactgagttacgttttaatagggaacatgtattttataaatacatgtttataaaaaatagggtcccactatgttgcccaggctggtctcgaactcctgggctcaagcaatcctcctgcctcagcctcccaaagtgctgggattagagatatgagccactgtgcctggccaggggacatgtatttgttttttttttttttaacaaaaagtacacagtgttaggccgggtgtggtggctcacacctgtaatcccagcactttgggaggccgtggtgggcagatcacttgaggtcaggagtctgagaccagtctggccaacatggtgaaaccccgtctctactaaaaatacaaaaaattagctgggtgtggtggcgggcacctgtaatcccagctacttgggaggctgaggcaggagaactgcttgaacccaggaggtggaggttgcagtgagccgagatcgcaccattgcactccagcccaggcaacaagaacgaaactccgtctcaaaaaaaaaaaaagaataaaaaaaaagacaaagaaaaaaagcaaaaagtgcccagtgttttattctcatagatcacaaagctcttagcaaaaattctgaagaaacactgagacctgggggatgggtgtgtgttgccgggagaggagtcgctattgcctcttgggtttctccgataacacctggcttttgtagaagatcttcacagtttttcaaagcacccatcccttgccttacctctcctgtctcccttgtctgcctgatgcctccaacttctcagaagtgccagggccagggcactgctgggcccatggtgtgggtctacattgcagtaaaaggctcgttacccactcccctcaacacaggagtctcctgtttttaggcagcttaagaaagcagtcttgtctgtggaggaatgcccagccttcttggtgcagatgctgggtttggggacccagctgtttgcaggagttgtctaggaacgtcagtacccagggactgtgagactcctgggatgttatagtccccatgctagcagagggaagacactgggcccatgagaagttgagtttaggtagccagtcctgctgggagaaaggaaagcctcagatgccagcaagcttgctgtccagccattttctgacaaccctgcttattgcaccatgtacagtaatcaacacagacttgcatctgctctgaggggtgcaggtggtgctccatggaacacacacatgcacgccttcacccaccctttcctgtacctttggaattcgtggcataggaacactatatctattgcacttgggtgtggttataatgccagggtaaagataagtttctctgtggagtacctgaatgacaagatcatattttgtgtcagttccacatggaagggctcttcctcacagacattggaagggtaacagtagaatctaagctctaggaaggcagggtttttttgttttttgttttgtttttgtctgcacatgatagacacttagcaaatatttgctggatgggtggacaaatggaaactggaatgaaatggagatgcctaggtgagtgtgggaaggactctgcctctcctggtctttgccctgtagatgccaaatatcctaggcgggaactgggaagttggcagatgctgctgtgtagagagtcagtggagcaaagactggaaaaacatccagcctgtgtcagctagcaaaagaggggttttgggtctattttggggtcagaatattagaggaggtaacctgtaccctcaggcttcagagtgtggttgactaggaggctccaaagagtaagtgaaacccaaggggacggagataggaccacttgatccatccttgtaggttcagagctatgtcttatcaaatgttttcccttcatgtagtagcatgataatgaactcttcctactttggtttgataatgcaatggattatatggatagattttctagtgttgaaccaatccttgcattattgaggtaaactttacttgatcataatgtactttttaataccttactagaattattttgctaatctgtttttgtatttagattcataaattaaactggcagatattccctctaattttcattttttgcactctctggttttggtatcaaagttaagttagcttcatgaaaataagttgtttttgtaaagtaggtattagctattccttaaagagctggcaaatttgttcataaaaccatctgggttgaatcccttctgtaggggaaatatgtttgaaactaatttaatttctttaaaagccattagtctatttgacttttctatttcttttgagtctattttagtaattgatattttccttgaatgttagccatttgtctacattttcaaatctgttggcataaatgacagttcataatactgagctgtgttttaataggggacatgtgattctttaaccaaaggtgcccagtgctttgtttctgtaggtcacaaagttcttaggaaaaattctaaagaaacattgagacctgggggatgggtgtgtgtgctgcagggaggggagtctggattgactcttgagtttctctgataatatctcgcatatgtgaaaaagccgtacagtttttcaacacacgtattgcttgccttatctcttttgtcttctcaaagtccttgaaatgtagattttataatcagtctcaatttgtagataaggaaaggccaatcagacataccagtttatctataatatagatgagatcagaagccactcctagatcacaccattttaattagaagagagtttagagatcatctcattgagaaactcttaacctgggatccatgtccctcaaagtgctcttgggtagacttcagtggctccataatttggatgagaacaaaattacattatttttcactaaactctaagtgcagtttagcattcccttctattatgattgcaagcaacaaacaccagagtagtagcagtactgtgtctccagtagcaatcacagatattttcatggcacattgtagccatcagagataactcaaaatactgtttacactcatcactacttcaaaattacactagttagtagacccgcctcttgatcttgacatgttgtttttaaaagtacatgttactctataccaaatttttaaaaatattttgataactgcagttcaaataattggcctcctttctaatcctttgcattcatttacttgtttattgtgataaaatatacataagataaaattgactattttaaccgtttatagtacatgtttgatggtattgagaaaatttacaatgttgtgtaaccatcaccactatttccagagcttttcatcatcccaaatagaaactctgtaaataatgaagcaataactcctcattcttcccttccccaccccccagtaacttctattctacttttttctctatgaatttgcctaaatacctcatacaaatgaaattctatcatatttatcctttggttgttagcttttttcatttagcttagtgttttcaaggttcatccatgttgtagcatgtatcagaacttcattctttttgtggttcaaaaatacgctacattttactccattcacctgtcaacggccacaggttgttttcacctttggactactgtgggtttttttgttttgttttgttttttgtttttttgagacagggtcttattcctatcacccaggctgcagagcagtggcgtgatccgggctcactgcaaccttgacttccctggctcaggtgatctttccacctcagcctcccaagtagttgggactacaggcacacaccatgcctggctaattttttgtattttaagtagagacagggtttcatcatgttgcccaggctggtcttgaactcctgggctcaagcaatccacctgccatggcctctcaaaatgctgggattataggtgtgaaccactgtgcctggccacctttgagctattgtgaataaggctgctatgaacattagcacacaagtatcttcttgagttcctgctttcaattcttttggatatatactaaggagtagaattgctgggaaatatggtaattctatgtttaactttctaggaactgctaaactgtgttcaacagtggctgcagcatgttacattcccaccagcagtacacgagggttccaatttctccacatcctcaccaatacttgttattttcattaaaaaatattaattaccatcctagtgggtgttgcattttattttaggcatgtaaaaactttattctgagaaggagtcatgggcttctccagactgccatgggggtccctgatacaaataaaggttaggaagctaggatgagggaactcaagagctcagagatattgtcacatgtccaaggtgaggtgatggactagcagcagcccaggcattagaactaagtttcctgggtctcaaaggagcccttttccctcctaccagatggtctgttctcatgtacatgatccaccccagccagtggtcagaactgagtcagagctggagctaagccattgaccaaccagctactgaagctgaggccagcaccagacacagactagatagacataattaatccctgtttgcaaatcactgcaatgtagaactaccatgcaccaccacagctgctaaatccttatccagcctacaaacatccactgaatgcctgtgtgcagatcaaactccatattcagttggagtgtttgggggacacttacggggacatcaatggacaatttggtttataggtataaagttcaggagggagaaataaccctgtgtatgtttcatttaattacagaataggtgtcttgatctctcgtttctttgtggggaccctctatttccgcagaggcaggttcagatggcctcttgagtctcatcgcccattttcttactgagctctgtcagccttggctcctgaacctttccacacttgtcagctcagtttttaaaataaccatagctgactttttttttttttttttttttgagacagagtcttgctctgtcgcccaggctggagtgcagtggtgcaatctcggctcactgcaacctccatctcctgggttcaagtgattctcttgcctcagcctcccaagtagctgggataataggagcctgccaccacacccaactaatttttgtatttttggtagagacggggtttcaccatgttggccaggctgatctcgatctcctgaccttaggtgatctgcctgcctcggccccttaaactgctgggattacagaagtgagccaccatgcccagtcatcatagctcactttttttttttttttttgagatggagtctcgctctttcctccaggctggagtgcagtggcgcaatcttggctcactgcaagctccacttcccaggttcatgccattctcctgcctcagcctcccaagtagctgggactacaggcgcccgccaccacagctggctaatttttttttttttttttgtatttttagtagagatggggtttcactgtgttagccaggatggcctcgatctcctgacctcgtgatccacccgcctcggcctcccaaagtgctgggattacaggcgtgagccatggtgcccagcccatagctgacttttaatgagttttaattctagctctccactgtgcaaccatgaataagtaacttaaccaccctgaagttcagttgtcttgtttgtaaaatgaggataataatgatacctccctcatagagtggttatgaggatggaataagacaatacacatagagggcttggcacagagcctggcacagaggaagcatttcattagcgctgttattgttgattttaaaatttattattaaaagtcactttgacgcctataatcccagcactttgggaggctgaggcaggtggataacctgaggcgaggagtttgagaccagcctgaccaatctggtgaaaccttgtctctactaaaaatacaaaaaattagctgggcgtggtggcagacgcctgtaaccccagctactcgggaggtgccttgtggtaaaagatgggccaaggagtttttggttttaaagcgaaagcctgtaatcactgtgcctgctcacagggggattgctatggctaagttcatagataattgggtagttggctgaggcaggagaatcgcttgaacccgggaggtggaggttgcagtgagccaagattgtgccgttgcattccagcctgggcaacaagagtgaaactctatctcaaaaaaaaaaaagtcactttgtaagttgcaaagtatgactctactatgagatctttacaactaggaattaagccagttacgatggcccatgcctataatcccagaactttgggaggctgaagtgggaggattgcttgagcccaggagttccagaccagcctgggcaacatggtgagagcccatctcaaagaaaacctaggaatcagagcttctcatctctgggcctaaaacatctggtggagtagcttctcaggaactgtatactgaatgaatgagtgagatgacatttactaacagttttattaacttttatcttttatttacctatttgaccatctactgtactgacttaaatataaaatagcagtttttctctttcaacctttttttttgaggcagagtctcactttgccacccagactggagtgtggtgatgcaatctcggctcactgcaacctccgcctcctggtttcaagtgattttcctgcctcagtctcccaagtagctgggactataggtgcgccaccgtgcctggctaattttgtgtttttagtagagacagggttttgccatgttggccaggccagtcttgaactcctgacctcaggtgatccaccggccttggcctcccaaagtgttgggattataggtgtaagccaccatgcctgcaccagcccctccccgcccccttttttttttgagacagggtctcactctgttgcccaggctggagggcagtgccctgatcttggcttacttcagcctctgcctcccatgctcaagtgatcctcccatctcagcctcccaagtagctggggccacaggtgtgcaccaccatgcccagataattttttgtatttcttgtggtagagatggggttgcccaggctggtctcaaactcctcaactcaagcgatccacctaccttggcctcccaaattgctgggattataggtgtgagacaccatgcccagcctctttcaactttaaatcaagtatcagtcttagaatcaattctctgtagaatttgtcatatgagtcagtctgctctctatttctatgagtttggcttttttaaattccacatataagtgaggtcatgcagtatttgtcattctgtgcctggtttctttcatttagcataccatggggccaaggacattttttcttttgttttctttttcttttctttttccctgctccagctcaaaggatggggctggggaatctttagatgagtcgggggaaggcctcagtgagaaggtgactcttcttcacatacctgaaggcagtgacaggatgaggcaccagaataatgttgcaggcagagagaacagcaggcaggagtatgcttgaattgttcagtacagcagggaggccagtgtggctcttgccgagtgagtgaggggcccacggtaggagatgagatcagagaagtaacaagggggcctttagtggggccattgaaacagcttaggattttctctgagagagatgggagccattggtaagggaattacatgatttcactttttttttttttttgagacggagtctcgctctgtcgccccggctggagtacagtggcgtgatcttggctcactgcaagctccgcctcccgggttcaggccattctcctgcctcagcctcctgagtagctgggactacaggtgcctgcaaccatgcctggctaattttttgtatttttagtagagacggggtttcaccgtgttagccaggacggtcttgatctcctgacctcgtgatccgctcacctcggcctcccaaagtgctgggattacaggcgacttttttttttttttgagatggggtcttgctctgttgcccaggctggagtgcagtggtgcaatctcagctcactgcaacctccgcctcccaggttcaagcgattttcccacctcagcctccccagtagctgggactacaggggcgtgccaccacacctggctaatttttgtattttttggtagagacggggttttgccatgttggctggtctcgaactcctgacctcaggtgatccacctgccttggcctcccaaagtgctgggattacaggtatgagccaccatgcctggccgatttggtttttaaagaatcacttcttctgctggattgggaatagtctgcagagaggcgaaggcaagcagtgcttaggaggctaatgccatcatccaggggagggatgatggtagggttgagtaatccctggagtgtaacaaacactaaggattattttattttgtggcaaatgtcctaaagctttcttgaacagtaccaggttgctgggaatgtatagagacagcttacagagcaccctacagttttagcaagggaactttcacgtaatataaaggcatgcaggttgtactcttgtatagttgtgtgtacattggttgtttcctgtagcaaaatcatgaagagtatgaattctagagttagagtccctacattcaaatcatggctccaccagttactaactgtgtgaccttgggcaaataaattaccctaacttctctgagccttcagttttccctctagtaaaatggggacagtgggttgctatgaggagtaatgagttagtgcgtgtacaacatttagcattatactgatatataaccatggctcaataacatagtagctatcattatggatatgaatataaccatttgtaaaggtcaaggaacatctctatttaacttagtttatttatttattttttattttttgagacgtagtctagctctcttgcccatgctggagtgcaagggagtgaccttggctcactgcaacctccacctcccgccttcaagcgtttctcctgcctcagcctccagagtagctggcattacaggcatgcgccaccaggcccagctaatttttttttgtattttcggtagagacggggtctcaccatattggccaggctgctctcgaactcctgacctccagtgatccgcccgcctcagcctccaaagtgctgggattacatgtgtgaactaattaacttagtttatttagagccatagcatatggggctgaaaaagaactaagacacttcatttagtctaaccctctcattttacaggggagaataaaaactagagatagaaaattccatagccaaaataaaataaaataaagttatggtccgggtgccgtggctcacacctgtaatcccagcactttgggaggccaaggcaggcggatcacgaggtcaagatatcgagaccatcctggccaacatggtgacgccccgtctctactaaaaatgcaaaaaatagctgggcatggtggcgtgtgcctgtagtcccagctactcgggaggctgaggaaggagaatctcttgaacttgggaggcagaggttgtagtgagccgagatcacaccactgtactccagcctggtgacagagtgagactctgtctcaaaaaaaaaataaaataaaaaataaagttatgcggccagtgtcacctagctggtagcagagtggggactggaacacaggtctctggactcccagtctggtgctttctctgctatgccacattgcttccatagaaccctcagtgcagcaccaggtgggaataataataacaacaataaaggcttatttgactcttactttgcgccaggcactattctaagtacacatatttgctcattttatcctcatgacaaccctatgaggcaggtacaattattgtccccatcttgcggaagaggaaactgaaggagagagggataaagccacttgcccagggtggagaatgagtgtggtgtgggagacatgggcaggaggctgctgccccgttacactgcacgacctgcttctccctttatgtaacagggaaattgaatccagtcgttcaagtcctttttcagccttcaaatttgcagaccctaaatgcttttctattatcgggtcttgaataaataccattccacttcattaaaactgctgtctttttaacttgtcttcatcttaatgatcatctacaagaaagactatttgcagaagagcctagaaaccaagtcaccaagcctgtgagagattcctgaaatgttatttctggcttccatagcaaccctaacatagggcgttaagcttaacggagtcagcgagagcagctggagccgggcattgaagcgctgagagcgctgaggaaacaaatcgttggctcaatagttttccttttgtgtaatatactgtcccagtgtgtttagggagttacgacttctgccaagtaagaatggaggaaatgaagcattgtatcaaagtgtacagagtttccaagcaaattggaggatgagtacaagtctgtgtctaggggagtctctgcagaagatgagggtgggcctgcagagacgtaggggtggggaggaggggcagctctgctttccccaaccttgggtgactaggccttcaggtcagctttgtgaagaggactgagcatgcctggttgccttttctgttccaccccgtttgccgacctcagtagagagtgggggtgatacgtgagtgaggcatcaaagaggccaagatgctgaggatgacagaggcagatatgctgaggctgacggagccaccagggccagtgcaggaaacagagctctctaggtatttcaggaagaaaaagatttaacacggggaattcggttatatagttgttggaagggctggaggagtgggagcccagggaccaccacgcaagagcacctcactgggatcaggatggtgctgccaccagaactgacgtctgtgcagctgctgagcagacaccagaacacgaagtctggctgccgcaactaactggctttctaaaaccttgcttgctggcagagccaccatccaccccacttcatcctttgtgaatatattgaattggggttccccaattcttacccagaaccctagctgcctgaaagatagtctgggaaatatttgttttgtccttttagcttctgcaacgctggaagactcatggggagagttgggagttcatgccaagtgccaatggacatggacagcaatcgattttttttttttttttttgagatggagtcttgctttgttgcctaggttggagtgcagtggcacgatcttggctcactgcagcctctgcctcccgggttcaagtgattctcttgcctcagcctcccaagtagctgggattacaggtgcacaccaccacacccagctaaattttgtatttttagtagagacggggtttcgccatgttggccaggctggtcttgaactcctgacctcaggtgatctgccttcctcggcctctcagagtgctaggattacaggtatatgccactgcaccctgccatttttttttttttttttgagatggagtctcactgtgtcgcccaggctggattgcagtggtacaatctcggctcactgcaacctctgcctcccgggttcaagcaattctcctgccttagtctaccaagtagctgggactacaggcacgtgccaccacgcccagctaatgtttgtattcttagtacagatggggttttgccatgttggccaggctggcctcgaactcctgacctcagccgatccgcccgccttggccttctaaagtgctgggattacaggcatgggccaccttgctcagcctgatatttatttcatttgaaatttggattaaataggtagaggagttgaacaccaaatagagatgagttgaaagggcccatcgttgacctaaactatttgctccaccatctgaaagtcctttgggattaagtccagggttagataacagaggggcagaaactcaactcccagagacaaaggagtggccttaacattctctctggtgccttctctattagtatatacataaggaaacattaatttacacccaagagtaggctgggagcttggatgggaggggaagcagggttgggggtcaggcctggagagattggctttgggctgggccatagatggagaagactgaagtctgggctgtcaggaacccttagaataagcctaaaataggaagggcacatctaaaacccttcagtgctcctcgtttgtcctaataaaatccagaccttttttttttttttttttttttttttttttggaacagggtcttgctctgtggcccaagctggagagcagtggcacaataatggcttactgcatcctcaccctccagggctcaagccatcctcctgcttcagcctcccatgtagcgaggactacaggcctgcaccattacacccggctacttttttttttttaatctattgtagagagggggtctcaaactcctgagctcaagtgatcctcttgcctcagcctcccaaagtgctgagattacatgtgtgagccactgtgccctgcctgaagtccagacttcttatgcaggaggcacatgccgtccacccacatggccctgtcttccccaacttgtcctttaggacccagccttgccacatcacctgtggttacctgggtgcgtgtgcatcccactctgttctggcctccagcttttgcatacgctgcccttttacctaaatgcacaccccagcttgttgcctggtcaacacctgctcaccttataataacatcatcctattataatactcatcaccttgtccagggatcttcccccaccccctatcttgggactggtgatctactccaggctctagtcactcgtccttttttgttgttgctttgttttttgtttttagagacagagtctctctctgttgcccaggataaagtgcagtggtgtaatcatagctcacggcaaccttgacctcttgggctcaagcgatcctcccgcctcagcctcccaagtaactgggactacaggcgcacgccatcatgcttggcttgtgaaaaaacttttttttttgtagtgatgtggtatcaccatgttgcccaggctggtctctaactgctgggctcaggcagtcctcctgccttagccacccaaagtgctgggactataggtgtgagccatcgtgcctggcctgctcatattttttatgaatcttaatgaatctgtcttctctacagggttgtaagctcctcccaggctgagactggttctcatactctatccctagcacccagcacaaagaggggattcctgcaatgtttgtacaactcaaccaaaccaaaatgatgatagaattgtctccgaagacaaactttgcctttgctggcacagggctgtggaaccttgtgccctgttatctaactggccccttcctccttgtgtacctacacctcctcccctcctccttccagggaaaggccctgaggcgctgtgttttggggcctccacctccttcctctcctctcttgcagcccagccctgtgttgctatttattcacaggtctctgctctgctctggctttcacttgctgaattctcagaaagcagatgaagcaatttattcagttaaagtgcccctgtgggtcaaatgccagcttgctttttaaaaccttcctatgctgctttttactttgcagagagcagaaattacctgttttgtttcctggtgctttctgcactctcttgtattgagggatggttgtgtgtctgtgtgtgtgtgtgtgtctgtgtgtgtattacaattttaacgtacatgtcatttctcaatttgagaaaggaagaaagatagtgagggggtttgatagagaatatcaaaattattttgtatgtattcagtcagctcattttttaaaagaaaatgttttaatatcactggctatggtttttattttattttattttattttattttattttattttattttttgagacagagtctcactcagttacccaggctggagtgtagtggcgcaatctcggctcactgcaacctccacctcctgggtttaagcaattctcatgcctcagcgtcccaagtagctggaattgcaggcacgcgctacaacacctggctaatttttgtatttttagtagagacggggtttcgccatgttggccaggctggtctcgaactcctggcctcacgtgatctgcccaccttggtctcccaaagtgctgagattacaggcatgagccactgtgcctgacctgactattgtttttaattttaactttaattttaagttcaggggtacatgtgcaggtttgttatgtaggtaaactcaggtgtcacaggggctggttgtacagattatttcatcatccaggtattaaatctattacccattagttatttttcctgatcctctccctcctcccaccctctgatgggccccagtgtgtgttgttcccctctatgtgtccgtgtgttcccatcatttagctcccacttataaaaaccactgtttcacagcttatttgtacttctctttatcaattaagaaaaagactgtttgtatagcaaactccgagagaggacgtgaggggtattttttggtgagacttgagcaaactgctttacgttgcaaggaaattcaattcattggaaactttttcctccaggactaaactggggcagctttcattttggctctctcacaaagaaaattgtccagggtctggaaaccacagttgttgaacctcatatgacgtctcttttctttcagctcatgcaacatttactagaggagactggtgtgatgtggcgtgtttttcctttccttttttttcctttccattttgctggctcgttggtgcacacttcctgagggcctgagagggctgtcttcctggaggaatttatgacagtcagcagggacaactgaaatttgagctggtgtgaacccataatccctcagggccctactggctggagtctctttagggagcatccttgctacccaaagatgcacacccattccccagcaccttcataaaacaacaacaaaatcttaccatggcattgccaagcatattttgcatacaaacttcccaggatggattctatctccatgggcagatggaatccatcccgaaagcatctttctctgccagcacactcacctgtctctgctctgcaaatgcccttcttggtagtagcttgttcaagggtacgcagagcaaatttggcaattctgaaatttcagcttttgtttgtgaacttcggctctgctcaggaagaacttgtcagaatgaaggttgacattcagcctgtatgtcgagcattcttgagagaagcacacggtgcctggcatcttgaatggcatcagctgcttgctacccagttctttgggacaagtgggtccatgagagaaaatatacagagcagggataagactgcacccgctctggcaggacagggagcctggctaccccaacttccttttcccaagccatctgctacttttcttcttctgcaaccaggcattcaaagcagggtgtatgtgggggaagaccctggaaatcacctccatctgggtgtacattgttacttttatcctcagtagttggtcaagaagtagagtgtattctctatatatctttattgggttcatccccacttattcagaagtagaatctctaggccgggcatggtggctcacacctgtaatcccagcactttgggagactgaagctggtggattgtctgagctcaggagtttgagaccagcctgggcaacatggcgaaaccctgtctctttcaaaaatacaaaaaattagtcgggtgtggtgggtgtgcctgtagtctcagctactctggaggctacgttgggaggatcacttgagcctgggaggcggaggttgtagtgagctgagactgcaccactgcactctagcctgggtgaggctttgtttgagacccagtctcaaaaaaaggaaaaagtttttagaaagttttagaaatactaatttttaaaaaagaagaatctctagcgaccgttcagtgtgatctggagttaggctgttctggttaaacgtagattgtgcctatcgaataataatttctcttaccctgcctagctctacagtcgcctctatacttgtctcaatgacccctgcactgtgagcttcttgaggccaggacctgacgatacagcactaaccattgtattttgcctgtggtgccttcagtacagtgccttctatgtgccggccctgagccaggcatcgatgaaagatgaataagtccaagtcatgacctcaaaggtggcttatagattgatgggacttgcaggccagtaaataccataagtatttgtggggcgacatcactgcacattaagttactcattgggcttactgtcatcacgacctggtgctgagaaggcacatttgaactccggtaggtgcagcagatgaatcactggggcctgagcgatgcctcccagggcactggcctgggcagagggtgaagtggggagatttgcacttaggcgactgtgtcttgagttgagctttatctcctgggtcacattccaggctcagctgccagtcaatgtgttatctggtgatggggagggtaacagggctcttcactcttggccacctactgggagcagtgggtaaaaatgcaggtatgagagtcagaccaacttggggtttaaatccctgttctgccaccactcattaatcccctgactgtgcacttgtcacttaacctccctgagcctcagcttcctcatctacaagtggagggtaacagtgcctatcttctttattttctgaacctaattgaatgccagatatatctgtcatgcatatgatctgacaatggaacagaatatttgcatcaggagacaaaagagactccaggctgtatgattgccatattttcaaggccactcctggtttgggggaagaagatggcaggacatcagaatggggtgccctgccactatcttcttttctagacccttggcagatggtctctcaggctcacataaccctagagacagagttctcaaatttgttgtgcttaagaatcacttgtagcaattacaaatgcagattcctgggccttaatcccagagattctgattccctgggtctagggtacagctggagtgcagtggtgcgaccacagctcgctgcagcctctgcctctcaagttcaagcaattctcctgcctcagcctcccgagtagctgggattacaggtgcccgccaccaagcctgctaatttttgtgtttttagtagaggcagggtttcactatgttggccaggctggtctcgaactcttgacctcaagtgatccacccacctcggcctcccaaagtgctgggattacaggcatgagccacgatgcccagccgtccccacctctttctgatgttatcgagctgtcgagtatcccagctgcaacctgttctttattgtgtctctgctgaccagcgttcccagcccattccagctcatggcagggtatctgcaatctttctcttccctgccctcccaaacccccacccacaagctttacctggaagctcatgtacacaccaaagggaataagcaaggacccagacaggcagccaggtgcctggcactaggccgggtactagggattcatagaagatactgcttgtggccaggtagctgcatgtgtgagatactggtggaagacactcagacagaggtaagcagggagtgttggggctcagaggaaggccactgaggccagtggagaatggcccattaaggaaaggttttcaaaataggtgaccacagggctgagtcttaagctgaacagggagcagagggcatgcctagcagagagggcgctgtgtagggactacagacaggcagtgtgacattgtataaggtatagggcagggagtggtggctggtggagaaggctgagttcatgagttcattctcccctgaacatcagcaaccttgccattagtgacccttgggatggtggcttttgaagaaattgctttgatggaatagctccccaagactcatggatactgggagtttatgtatgtatgtatgtatttatttatgagacagagttttgctctgttgcccaggctgtagtgtaggggcgtgatctcgactcactgcaacctctgctttccatgttcaagtgattctcctgcctcagcctcctgagtagctgggattagaggggcacgccaccatgcctggctaatttttgcatttttagtagagatggggttttgccatattggccaggctggtcttgaactcctgacctcagatgatctgcccacctcagcctcccaaagtgctgagattataggcgtgagccactgcacccagcccgatactaggagtttaaagctgtcatttctggttcttgggactcagatcaatgaaactcactaaaatattcattcatgggaaagttctggtagaaaggggaagattaaagtccatttttgtcaggagagtctctctctgggaaagccattgatgagatgactggggcataaggtggtgtggtggtgtgtgcctgtagtcccagctactctggaggctaacttgggaggatcacttgagcctgggaggcggagtgattgggagtaattggaaagtgacatctggaagacaaatcggtttattttcataagctccctccagtctatgggtgatgggaaattggggtgctgtgtcaagaggaatcctgtggttggactttgattctgagaccaggactgattaggggtgtcggtcacagatgccagggctggggacatgggggtgacatgcaaggcttggacttgccatcctggctccatattttatcatgggaccagctgtctcccttcctttggtttatgcagttgatttcgaaccctacgtgcagggcttgacatttttaccaattacacttcatcttactagtttctactcattattccatccctcagaaaccctttctgggcctgtctgtgttactcagcttattaacagttcctcccagcatcgtatgcagtggtgtagggagaaccataaatgcctccagaatttgcaaaaatgtttggaaaatgttaccaagtgggaaatgatttgctaatgagttcacaatatgtcttagacccattaagtaatccagggtgtctccctaatatagtagaagcaagttttcagaatattccccagcggttttttcagaaaatgtgaatagagcacgactgagtcaaagaaagccctagctcatcaactgcattctacagtgtcaggcctcatgtgatgccgcagctggcgactgactaataagggaattggagaggggagaattgattatttcctggacaaggaccatggtgccttaatcaagtgccctaaatgcaggggactgcaggggaagtcgcactgtggtaaaaaaaaaacaaatatagtctaaattacatctgaagtagcctttcaattacccttaagcactgagagctggtcacagtctggaggcacacagggacagaagcacctgaggaggctcaggggccgcatctcaggtgtctgtggacatgcccctgagggagcacagtggtgggtgggatcccactgctgtgtcgcacggtcgtctttgctctcagtccatctgtctctctgtctctctttgacaagcccatgtagttcaagtctcataaataaaatgcgtacagccggggttcccaaaccccatgctgtggaccgatctcagtccgtggcctgttaggaaccaggccgcacagcaggaaatgaatggcaggtgagcattaccacctgagctccacctcctgtgagatcagtggcgacattccgttctcacacaagcgcaaaccctattgtgaattgtgcatgcaagggatctaggttgcacactccttatgaaaatctaactaatgcctgatgatctgaggtgaaacagtccccctcttccccactctgtccctggaacatttgtcttccattaaaccagtgcctggtaccaaaaaggttggggactgctggcttatcggatgcaatttccttgtattctgatgtgctagttttatattcttatagtggaggatccataccgctttcacggttttatgagaaatatctcttacaatctttctatttgttttgctctgaccccatgcccacctggcagccctccctcatgagtgcagttttacctggaagctcatgtgctgacccttcacatagccagccttgtctgcctgcccttatttctcactgaaaaagaatgttagcctttatagtcagacggtgtctcatatgattagctagtttacctttattcattttttcagacgtgggtaaaattgagtacttcaatctttgttgcagagcaccaggctctaagaccaggttggtagaaggattctatttcatgtgccagttctgacaaattgtttattggtactcaaagtgccatgttgaaaggatccaggctgagggggacagggccagaattgattaacaatgtctgccagggactgaaaaaaatggcattgttaagcttgccttagagcctgagacagtcaaccattccctctctcctctaccaaaaggtagtcaaccactccctcactgtccttctctctctcagcatgtatcattagagacctccttccagactggcttgatctgtttatatttatcaacaacagcacactgtatctttttggtctgcctgcttcattgtatcccgttattgtgtccttttcacagtcaggagtcttttccttcctctgtatccccaggccctggcatacaataggtatgttgaatgactggctcacaacctaagagttctacctaattgttctgcatgcagggaatctgccttattagggtcagtcgtttgccttgctgagatccatactacagagttccgtggatcctcttggtctgttccatctaggaataaaacgtacattttgcatgcccttttttttttctttcttaaactcctgctagctcattacgatcatggcttgctgtctctctctctctgttcttctctcatcataaaacagcttcaacttttctccccagtgtccctttgaaactgttggtgagctagttttttctctgtccctttaggaaattttaatcatgtttttaatcatgcttcatagtgttttgggtcacccttcggtaatttttaaaatcctctggttattcctagttctaagaacaattttagctcttggcttactgctactctgtccagcattacccttgtcataattgttggtgatttcaagatccacatgaatcatgaatcatcctttaatagctttgagattcttttctccaatattcttgtcttccaccagatctcagccactcacttctctctctctctctctctctctgtctctcttttttttgagacggagccttgctttgttgcccagattggagtatagtggcacaatctcggctcactgctatgtctagcctcccaggttcaagcgattctcctgcctcagcctcccaagtagctgggataacaggcgcctgccaccacggccggctaatatttgtatttttagtagagacggggtttcaccatattggccaggctgatctcaaactcctaacctcaagtgatccaaccgccttggcctcccaaagtgcggggattacaggcatgagctactgttcccagctagatttcagccaccttcttctcttatcttgaccctataattacagtaactttattcctgccataatttcagtttaaacctcctatcttcccagcttacctgtactagtattccaactccaacaattctgtgaccttatctggacttccagttaattgatcctgctattttttcactgtctttcacctcaattcctctatttcctgcttccccagcttcaattctatagggaatcactatagtcactgtcaactacctttgcccctttcctgattcatcgttctcgtttggctacatgataacccttgttaaattcaacttttaccagcctgccccccatatctgtgtagctgaatgtggctgtagcaaaacatgcaaccacctggattggtctcatgtaaatttcataattgcagcctttaagtaggcctttaatgtggcctggaaatcatactctagttccctaatcccttcactcttccactgtcctagaaactgttacagttttttttcacttgtgttattacatttttcatggttctcttgttaagtgcccacaaaccatctgctcgtgggaactttgctgggaattgatatggaacatcacattttctgaaatcaattttcctgggtatttgactactgtccagactgtagtccttctattccccacagcccctcaaagatcggtgacctctctctttccgtcacacctgtcccgtccttcattctccccctggcccttgaccgtactgaactctccgtaagcgcttgtcgaggagtaagaatgggaaccatcagtggcttgacttactgggctgctgctatccaggcaggcaagcatctgttttcatcatattattaagtgtttttttttttttttcagcacttggcaggaggtaggcaagtttgggccatagctttcaggccctgagtccaggcaaggaaagaactgaccccagagagccaatccagccctggtgcatcttgagtattctggaaatggcagatctaaaaggacaaaatcatttcatattcatcatgagtatagcttggtggttaagagtgcagactacggagccatcacgatgggttcagatcccagctcctctacttcctagtgataaaagaaaaaactcaaccaaattaaatttaaaggagtttaactgagcaatgaacaatttgtgaatcgggcagcacccagaatcacagcagattcacagagactccagtacagccacgtggtggaagatttatagacaaaaaaagggaaatgatgtacagaaatcaaaagtgaggtacacagcgggtggattggctacaggctggcgtttgtcttatttgaacacagtttgaacactcagtagtgtatgaatggttgaagtacggccgctgggattggccaagactcagctattgttacaggtgcatactcctaagttaggttttcaatcttgtgtacttataagcttggttgcagtttttccacaaagactgaaatatagaagcatggagtcattctcaggccatatttacttcacttttatactagataggagaactcaagcaagttatctaacctctctagactcactgtcctcatctattaaagaacagtaacaacacctactttctaaggtgtgttctttcctactttctaaggtgtgtgtgaagaataaacaagccaacacctgtaaaccattcagaacaaggcctggcactaattaagtgctcagtaaatattagctataaattacgattattttctcttttgagtctcacaacagtattgtaaggtattattatccctattttgcagaggaagagactgagggtcacacaggttaaggagaggctcaagatcatttggacagaaagtggcagaggctgggcttgcatgggatcataggactctaatactgtttcacttaggatttcagagccccctttggtctccagatgaaatgattttacccttgtcatggagattcatattcattccttctccaaatgtgtcctaacttccccatgcagatggcaccaaatatttacagtatgattacactgccatgattgaatttagccagaacgggagagaggctgattagtgacaaggctgcaatcttgagaggaggaaatagttctgatgttgcacattgtcattctgctggagtaggaatgttgcttaaaattgtcctggctcagttccctttctctggaagagtaaaagacactcatttgcccaatacatggactttggagtcaagctgacagtactggaagagctgttaacagagtccagatcatcactttatggttagagggatgacgttttattatgggcccacaaactgtcctccaactgtggctgaaaaccctgtcatgagaggccagaaggaagatcattgtatgttcttctcccaggccaaggagacaggatgtccttcatcagaaccagttgtcagcataagaagaacacacaccaaggaaatccatttcctggaaacatctctcaacagttcccatgtggagaaactgtgaagcttttcacagcaaatgttttagagtgttcccaggtatttgcaaagctcctatcataatgctggctgtactgataatttcctaagggtgcctgccatgagacgatggaaagggcatcaggtctgaccatggtgagccatgagggccttgcagagatagagtcaactctctgggcctcagttttcctttctataaaatgagtgacttggactctgttgggacccctctgcctctaagattctactagtctgtgattccatgagtcaaacttcagaagtggttatggtccctcataaaatggcaaagatttgggtcctagaatctatgactccattagcaggaccacatctcctctagaacattttggcttcgtgcttgtcatcatctttttgtactaactgctctgattcaatctctttccctgaagacttgcttccaccagaattccatttaattccacagatgttgaatgaagactttctgtgtttccaactgcatgcctacaaagataaatgagactagtttcctaaccttggggaattcccagtgagatagcaaggtcaagactttatagaacttcttttctccagagagctctctatttctttgacctgtgtgtgtccctagaccagtaatattgacttcaccagggagcttgttagaaatggaaacctacagaatcagaagctctggggttgtggtgcactggtcttagttttgttctgttttgttttgtttttgtttttgtttttgtttttgtttttgagatggagttccactcttgttgcccaggctgcagtgcaatggcatgatcttggctcacagcaacctccagctcccaggttcaagcgattctcctgcctcagcctcctgaatagctgagattatgggcatgcaccaccacacccagctaattttgtattattattatttttttttttttagtagagatggggtttctccatgttggtcaggctggtcttgaactcccaacctcaggtgatctgcctgcctcggcctcccaaagtgctgggattacaggcatgagccactgtgcatttggcctggtcttagtttttaacaagtcctctagagagttgagatgcacacttgagtttgagaaccattgaactagccctttcagggacaagctatgagactgtggttctgagccctcaagggacccaaggacacattttgaagaaaattcagttacttgggctgccaggacttggtgttttcaactcagaattacagctttcttggaacctccaacaacattttgaacctttgtggcgtttttgtacatgtgcaggtgttgtggaaactacccatttgttttgaagggagagaatccagtttagcacacaattctccatggaacttccaggcttccctttaaattgattgtgatgcttggatagatattgacaccatgactaagacccataataaaggcccaatccaaggaggctctgctacttccaaagatctccaaaggaagagagttctcagagtgcgagtcttgtgtgaatttccctcccttcaaaggtgccttaattaatatcctcctccatggcagggtctaagcctggcccctcttctcagcaggtaaagattattgggtcacactctccctgcagtaagttcagacatgaagggtcgggcaggtgtggctcttggagagggcctgcctgggtcttgggaatgctcccccttgtcctccttcctgggatctgcagatccatcatctactgccccaacccagggctatatgctaaaccacaggagccttcatgaaaattagaaaagcactcctgccttttttttttttttttttttttttctgaggtggagtcttgcactgtcacctgggctggagtgcagtggcgccatctcagctcactgcaacctccgcctcctgggttcaagtgattctcccgcctcagcctcccaagtagctgggactacaggtgcgtgccaccatgcctgactaattttttgtatttttagtagatttggcgcttcaccatgttagccaagatggtctcaatctcctgaccttgtgatcctcccgcctcggcctcccaaagtgctgggattacaggcgtgagccactgcacctggctgaaaagcaccccccttaaggtgcctcttagggtggctcagcccctggggctcagggcttggctggatttcagttcctctcacctccttgagcaggtgcctgtgtgcagcaccaaccacatagccatagctgtaaccctgcccctacccagcctggggctggacacgagtgagggctgatggaggggtggggagagcctgtacatgcagccagcacacgtcgggagttcccaagtgctggatccttcattacatcatttccttaaattcttacagctgcccaacgaggtggatattggttgcacctctgtatatttttttctttttctaaattatgaaagatttcaaactctcagtgctcccatgttctcatctatgcaatgggtatgatgcttcttgatcctttctcaaaaacttgttctgaaaatcaaatcacaccaagtgacaaagtgctctggaaatgttaggtttcatatagatcttatcgctgaaccctcaaaggctcactttctggggcctctgttttgagacactcaccctggactcacccagccctcagggttatgcatgggtatgtcagaacgttggtttcttgccaggctactggtatttgtgggtgcctcctcccctaaaatcattagacttgtgaggcggcaaggatgagttgtgtgtgcaggcactcagggacgagtcacagcctggcaagctggcctggacaggatgacttcatgggcctttcccacttctcatttttatgactagctttactgtttcattttggctttctctctctttcttgcagctgtggtgattaggatttagggcaagcatttgggatcccttttctaatacctttcaaatcctgattcagctgcaaagtccgggaagggagtagagaatgggggaggagggactcaccctggtgaaaggcagtagctcagaatatccgagaaactcccaacaggaatgcccagcctccacccactaaagctggaggcctctcatctcatccaatatcaccctcgtactagaaacgcaaaagggatgagtttgtctatggactcaaacctttacagtcttcttgcttagcagcttaaggcataattatggtagtcatggtggtaagggacttaacatttgcctttttccaatttaactgtgtcctttgttgaaatatttcttagtcaggtccccttttctctatttccactactgtcctaggattagatctgagtccccctctcaatgagattagtccagaaattgtgtataccatccatcttgcaaaccactgccagactctgttgacttttcattatgtaacttccctatgggagaggtgagttacataatatgatgctaagatgcccctcactggtggcatcatgtacatatttctcagtctgaaaggaaaggtctttttaaactggcttcaggccatctgtccaactaattcctgcctgcaactcctagtataccctctactacaaggtctcatcacttattctgttacccaccacattcattccgtcttgggctttggttcatgtgatccactcgatgtgctccttctctctaatccaaacaccacgcatctataaggtcagctcacgtcccatctccttgaccccagcccattcatatccctattctcttagcagctattgtcaggacgacacagttttcatgccagttattctttcatggttttattagttaattctccccaggtagattagaagctccttaactttggaccctgtcctaagcttctgttatattctctgcagtgcccagccaagcttatgtgtcatgcagtaaagaataaaataattttgaccctgatcaggtgtttggttacataaaaactgcattggcaactttctagaaactaatatattcatttatcttgcaaaaaggattgctatctgattatagccagtagtcatgatcttccagccatgcacaaatatacccttataactttcatgagtggggaggaaaattgatgaaggaggtttcaaaggtgatcatcagtcccaggatttccaacaatagccagtctgccctgggtccttaactctcttttaatgtttttattcttatttttatttttttaatgcagtctcactcttgttgcccaggctggagttcaatggcactctcttggctcactgcaacctgtgcttgctggattcaagtgattctcctacctcagcctctcgagtagctgggaatacaggtgccgccaccacacccggctaatttttgtatttttagtagagacagggttttacagtgttgaccaggctggtcttgaattcctgacctcaggtgatccacccgccttccaaagtgctgggattacaggtgtgagccaccacacctggcctctcttctaatgtatttgacctctcctctttccccagagagttcctgtgagaacaagcgggcagacctggttttcatcattgacagctctcgcagtgtcaacacccatgactatgcaaaggtcaaggagttcatcgtggacatcttgcaattcttggacattggtcctgatgtcacccgagtgggcctgctccaatatggcagcactgtcaagaatgagttctccctcaagaccttcaagaggaagtccgaggtggagcgtgctgtcaagaggatgcggcatctgtccacgggcaccatgactgggctggccatccagtatgccctgaacatcgcattctcagaagcagagggggcccggcccctgagggagaatgtgccacgggtcataatgatcgtgacagatgggagacctcaggactccgtggccgaggtggctgctaaggcacgggacacgggcatcctaatctttgccattggtgtgggccaggtagacttcaacaccttgaagtccattgggagtgagccccatgaggaccatgtcttccttgtggccaatttcagccagattgagacgctgacctccgtgttccagaagaagttgtgcagtaagtcctgctcctttgtcactcttctagaggaaccactagaattcattcattcatcttcaagtgttcattctgtgttactatgtcccaggtactgtgctggcaataggttttcaacaaaggccaagataaacacaacgtgctccaggggcttacactttggccaagagacacatgtttttatttatttatcttttagagacagggtcatgctctgtcacccaggctgtagtgcagtggcatgatcacagctcactgtaacctcaaactcctgggcttaggtgatcctcttgccttagcctcatgagtagctgggactacaggtgtgcaccaccatgcctggcttattttttaactatttgtagagacaacgtttcgccatgttgcccaggctgatctgaaactcctggcttcaagcgatcctcctgcctcaacctcccaaagtgctgggattataggcatgagcacccagctaagacagacattaaatatataattatacaaataagtaactatagttgtcacagtgtaatggaggaagaattcaggacatgaaggagtgtgcaaccccaggaccttatctaggcctggatgctcagggagattgccctggggaagggacacgtaagcccaaaccacagaatgaggaagagtagatagacagagtttttcttcagcacatggagctgccctggaattccctaagttggaattcatgagttggagtacggataggaatggaagggcagaaaaagtaacataatctctccttggatggtgtggaataccaaggcatttttgccccatggtggtgctggcaggggatgttttctcagctgacaaagaggtccagcgtatacagaggaccaaggtgtggtcctggcagctccccacctgttaagattgtaggggccactcctcacctgccaactctttctgcaggaagatgcctctcggagcccctgagctgcattcttctatgttggaagctttctttcctcttttgctttctaaccctcttttcacagggcttctctctcccttccttcccacgcactttccagttatctctacccctgctgctgcccccactcttctcagcaggtcagcctgcattctccccagtttcctgcctctgcggctgcctttttgttccttcctcctccgggagggcagggggccagccgcccaatccaggaaactcgcatcctgatttggtaaacaatgtcccaccctgacttgtccattcccagtggtccctgtcccctccagctaccatgaatctttggtggggaaataaagggaaataatctatttttaaatatctatttgtaaattatctatatgtaaatatctatttgtaaaatgtaaaatatcttcctagagcagagtggagaatgagctttagagccagactcagcaccaactccccaggagagggcacccaggagggggttctcagaatgtgacatattctagacctctaagatatagcccccagcgaagaacaatgtgcttttgatgtgtattaaacaaaatcccctgctgagaactaacttcaaaaagcacagagatctcatttgttcttgactccggaatcaaaagatttacttaagaaatcaatgccatgaagaaaaaaagaacctttttccttgccatgccacttggaaagtgttcagaagtgccatttccctggcactgcagaggctgtgttgttgtggtgtgttgtggcctaagtcagctggaacacttcaatcagcagaacacactgcaaacattttcaaggtttatgactttaaatgacttctgcagaatttatgtttcccctttcctgaaaatattaaaagggaaattggttctgtaaccattttgacagcttattcatttgtgttggaaaattttaatggaggggttctttttataagccttctgtatttatcagaaaatggaaagataacatgataaggctgaggagctacacaatgggactgaccgcccccctccccccacccccgcaatcctggtgtcgaataggatataccaatgtggacttgtctgtggaaaaaccatctctgtgtgctttctggcaaggcagcaaaatgaaaaggcagtttggacttttcctcccttcatcttctttgttataatctggaagctctaagaaaacattagcgttatcccgcttgttcctgtgcctgagaaatgaatcccctgtgagtccccccatccactctgcaggagacagggctgctgtctctcactgcactgcactgcccggctttgctcagcagactcagcagccgtcttgaaaggctgaagaggccccagggcctctttatcaacttcatggtaaagactgtagtaactaacatttataaagcactttcccttatgttatcgcagaaagccccaggaggcaggcagcacactcttgccactctctttttacaggttaaggaacttgctaagtgaatcacctgaaaaacaaatagccaagagatagttggatgctaattccaaacctcttgctcatttcactcctctgcatgttgggaattacaaattcctcttttaaggtaaaccattttctggtggccacctccacagtccagcctggccaggtaaacctactttgcaattggcattcacctaaaataggtgaaactctgaaggcagccttcgtaggaggaagaggagctgactctagttgtacaatcttgagcaaatcctttgtgctctctgagcctcagttgcctcatctgtaaaatggggattttatatgcagaaagtagatgagtgaacaggtgttgtaaatggtagagccctattcagtgtgcactgtgttatgtattattacaatcaaatacactgaggaccgatgggctaggcagatggcctcagttttgatctgcactcaaatgatcagacaaaaatggtgagcattttccaagttgcagatgacatctctgaggtttgggaagtctcatttgttccttaaacattcattgaacctgtaaaccaaaaagtatctgagacaagtcccaatcaatgtaaaagtttattttgccaaggttaaggacatgcctggagaaaaggaacacaaaatcacaggaacaatctgtggtctgtgcctttttccaaagatgattttgagagcttcagtatttaaaagggagagagggagggcatggtcacattactgaatccacatgttgcaagagaaaaggagcaggtaggggaacagtcaatcatgtattcctctagtgctcagtaaatcaacactttacataagataaggtgaacatagagtagctacttatgcagatatttaaccttttatctgtagctatctgcttaggaacaaaagcaaaggcagtttcttgcattactcagcttttagcttaatttttttccttttggcatagtgatttgggatcctgagattttattttcctttcacaaactgtaccccaataatagctaatcttgtcctgtgctaggtactttcaaatacagtattccacttaatacttaaaatagccgtttgagataggtactatcattatcttttttttttctttctaagagataaggtctcactatgttgtccaggctggcctcgaactcctgggctcaagcaaccctctcacatcagcctcccaagtagctgggactacatgtcactatacctggctctattatccctattttacacaactggaaattgtcagggtctgcctgggggctccaggagagctttaaagatgaggtgatactaataatcactaacatttcttgatattaatgtatgcatgtgttgtttcaggctattagtgtatgttaactcactttattcacacaacaaacctgtcaagtagatgctcttatagttcccattttatggaagaggaaattgagaaccaaagaggttaaataacttgtccaaggtcacaaacctgtaagtgctggagcttgtttttttgtttttatttgtttgttttattttgttttttgagatagggtctcactctgtcacccaggctagagtgcagtggcatgatcatagctcactaccgcctcaaagttccatctcagcttggactacaggtgtgcgccgccatgactgaataatttttactttttaaaaaagaaacaatgtcttactatgttgcctaggctggtcttgaactcctgggctcaagcagctctcctgcctctgcctcccaaagtgctgggactacagacatgagccactgtgcctggcctgtaagtggtagagttgagacgtgagcctaggcattctgcaggcagaactgaaaatcaatgctacatctgcagattgggacaggttctgtctgggtgtgatcaaggcaggacctttatcatacagtgaggaattgattagactctgcagccagacctcgctgggtgagagtcctggcttttttctctttggctgtctggctgtacaatcttgagcacagtggaggctttatacttgcaggcagggacttcccataccagccacagcaaggggaatcctgaggttgcattctcaggccacccttgagaccaccagggagaggccaggtgccctgtgaattgaggtcctgtctacaagatgaccaaaccccacacatcctggagtctgccatttttgccacccagtaagagaaaacatggaatctatgggctgaaaacgctgtccccagtgttctggtgattcttgccacctgggcgagattgcttttaattaacctctaggtgctgactttatcagcctcatctggtattttggagcagggagccaggctgttcctaccctaatagccccaccccacccaggccaggcacaatttaaggccctaatagtattcctaggacacacccttcatgaactggcctgggcagtctacactgatggcacccctttgaggtcctgatgtgaagtggggaggctggactgacttcacaaacgttgagtctactgtgcccagtaatacaagacctccagcccacctccctacactgaccactcctttagtcattcatacaatcattaaaaaaaggactgttcttatttcctagtcaacaaatccaatcccaccaatgacttaggctgctgattagttattcctccccgctgaacacaaggccttggctgagtgtaaacccagagggccttctgagaaatgaggctcataggactgtttccagcaggccggtggaggaggcaaggctgtggtctccccttggctctcaccgcaaaggcccatcccacagagggcaaggcatgaggcctggatgctctgaaagtcactcagcactcacccacagcattctacagatgggaaagttttattctagtttagtgaaggtgtttgagattcttttggttgaaagtgtcaggaattccatttttttctaaaaggaggggggagtgcattatattatccatggaaataaggatggcagttgtgagagtcctgctttcactgcatctcccctccactcctctccttctccagtccacagtcaggaagcatggccccaccagcccctgaggctcacttgttctcagtttgagcctccttttattcagttctggttcctaaatgccagtaaaggactctgattgtcaaaccctgtaccaaccaacagtggccaggagtgagactacctcagaccaccacggcagctccccgatgcaaggtgtctggagtgagaaggaagggcagtttctagaaaaaccaggtaccagattaaataataggtgtctgtactgaggtccctagaggctgtccatgcctttactctacaggtaaagaaatagcctacaagagctacctgatttcccagaacttccctcacttgttcgaggtagaggggaactagagcacagtcttctagctcccaatccagtgccttttccattacaccaagttataatcttttttagttccagtttctcttatggcacatggccaaaataagccttagtaacaagctgtcattctgaaacccaatgcaatagttcttttaattccccctccccactaactttttttttttttttttttttttgagatggagtcactctctgtcacccaggctggagtgcagtggcacgacctcagctcactgcaacctctgcctcccggtttcaagcaattctcctgcctcagcctcccaagtagctgagcccaccaccatgcctagcttatctttatgtttttagtagagatgggattttgccatgttggccaggctggtttcaaactcctggactcaagtgatctgctcacctcagcctcccaaagtgctggtattacaggcatgagccaccatgcctggcctaatttccgcaattgataggtgaagaaagtggagttcagagaaaccaagtcatttgcacaaggtcatagggagtggcgaagctgagccttcaggtggtctatttccggtagccatcctctccccacgatgctgcctgctgcccgccagatattttctctgcctcacatctcctgtcttcttattttgtctgttagggtctcaccaagaagacaggcaccaggtacatcacttgggcctcccactcatgacagtgggtgactgccgtgtagttggttgcctacacactacacttccttaattatggagagagacagtgacatgctgtgagtgccttagaaatgtcctctgcccgtgggtaatttgactccagcagtccaggaaaagaagagagtctttcaggatgcaaagcaaatgcaaattaaaagtgggataatgattacccctcaccatacgattgtcaaaacttgaagtttgataacaccaagtactgaagttttgaggggatgggaatcgttaggaccatcgttgctgacatgagctgtcttggaaggcaatcaggccatatctgtttaaagtgagacccagtcctagagaaaacatcgtacatgaattcaaggggacgtgttcaggaatgttcatcacaacactgtgaaagtgaaaacttggaaaccacccaaatgcttaccaatggggaaatggccaaataaaatgaggaaagtcatatgaccaatggataaaacaattgggagggataaactagatctaaggttttgattaaatctttaaatctaaaatacagctagttttcattattcacaataattatgttttataaagtcactgcaaacactgagttagagaatactaaaccattgctccatatattcctgatggaatatagggttaggttcctgcaatcctctggtgacaatattttttgtcaactaatcaatacgtagccttgttttatgtgtgtttctgtttaaaaacatcttattttttgtttgtttgtttattttttgagacagagtctcgctgtgtctgcagtggcacaatctcagctcactgcaacctctgcctcccggtttcaagcaattctcccgcctcagcctcccgagtagctgggattacaggcacctgccaccattcctgactactttttgtattttttttttttagtagagacagggtttcaccatgttggccaggctggtcttaaactcctgacctcaactgatccacccaccttggcctcccaaagtgctgagattacaggtgtgagccaccatgcctggccgaaaacatcgtatttgatatataccattgattcattaacatcagacccacagccaacggtaactcctgactgaatgaaacttacctaacacatgttttccctgtaaggcacatcgcagcctttctgcactgaggaacactagacggcgcatcaccattttaaaccgcaaaatcacttacagaaagcacagaaatgaaaaaacaaacaaacaaacaaaaaaaccacggtgctaagtagactgtgaaaaggatgcttgttcacagaatgaaagctgaaaaagaaggcagagtggctccttgttcaacctcagctgagaacatctgcaccaggcaacacatttttttgtagtctcagctacttgggaggctgaggctgaggcaggaggatcactggagccccggagattgaggctgcagcaagctgtgactgtgccactgtactccagcctaggtgacagagcaagagcctgtctcacaaaataaactaaatttagagatattttaaattgagtgctcatgcactctgagcatgtccactagtgaccgtgaaaacgctgtgagtattggtttgggcttacaaatacattttagtgagtaggcaaattcacaaatatggaatctgtgaagaatgaggatcaactgaacatgtcttcacagtttgatatctctgaaactggggtgcattttagattccatgaaatacagtacatgtatcaacattgatagaatctgtgattaacgttgagtgaaaactgaggtgaaggtcaatgtatataggatgaacctacagatgtaaaataagacaaaatgccaccataattctcctttgctataaaatggttagcaggtatcttcagcattccccaggcactattctcaacactctaccatctccattaatttaacctttttgaggttcttatgaggtaggtgctatttttattctcatgtcttataaagaagttaagaaaattgcacaaagggctgggtgtggtggctcatgtctgtgatcctaacactttgggaggctgatgtaggagaatcgcttcagctcaggagtttgagaccagcctgggcaacatagtaagacatcatctctatttttaaaaatgagaaaacttctattttatttaaaaataatgataacaataaaagaaacttgtacaaggtcacaaaaaaagctgtttgtttcaccctgaagtaaaaatgactgattggatctacaaactttcctagtgatatttgtatcctaacaggaaccaaaacacagacaatcaaactcagaacagtacattctaaattgtattgttgtgaaatgaaacagctttacttccctagttcatttattgcccaccatatttcttactccaatgtagagacataaacttcagatggatttaatcacagctgagttttcacaagcgctggattaatggaattgttctaagcttttgagagctccttttattttagcttcataaaaatatatttctacatatagacatcttttttgtttatgagaacacttgcataacttgttatgtttgtactgttgcttgttaattttaaatacaatcaagttacattgagtaaagtcataaattaggacattaaaaaaagagaatttttatgagctacagacagacttatgcaggaaccaatgtaccagaaagctgaggtacttcaagaactaaatgcagagggcaggcgtggtggcttatgcctgtaatcccagcactttgggaggccaaactgggaggattgcttgagcccaggagtttgagaccagcctgggcaacatagtgaaaccctgtctctacaaaaaaaattttaaaaattagccgggcatggtggcacacgcccatagtcccagctactcaggaagctgaggtgggaggatggctttagcccaggagtttgaggctgcagtgagccatgattgtgccactgctctccagcctggaagacagagcaagaccttgtctcaaaaaaaaaaaaaaaaaaaaaaaagaaagaaagaaagaaaagatgctaaataggtatcttaaattgagacataaagattacagaaacatgaaacgtgtgagtgcattttttactccaaaattgtgtgtatacttttgcatattaaaaatttacgttactcttgaaacatgattttgagaaactgttggttctttaacacattcttgcttatttaatagcttttcctccagccccattgctgcttcctaaaaatccacacttaagtcaaagtcccctctgatgctggcaaacttttctgattccccagcccaccacatgggtattattaagttgaattggaaatttcttgcttttttttgtagatcaaaaccaatcaagtatcagcaatttcatatagttcagcctaacactgtttctctttgattttccatggccctttatctggccctgtcttgtccaccttggactgtgagcccccttgagggtagggactgcagcttatttctctgagtcctgcccagaggagagagtaggcactgaataaatgcttgctggctggaatggagtgagaaagggcatcactgttgacttaccttcctgtgtcttccctttcagcggcccatatgtgcagcaccctggagcataactgtgcccacttctgcatcaacatccctggctcatacgtctgcaggtgcaaacaaggctacattctcaactcggatcagacgacttgcagaagtaagattgctttgctgatgtatttgtggtttcttcctattccctcatcctctcccttcttttatctgggctcattttattcatctgtgatgcctcacccaccccagttatcatcccttggggacagaaataaagtttggtattttctgttgaccccatcacagtgcctagtccagagctgggcacatagtaggccatcaggaagagttggagagataggtagaagcaccatctcagaaatagcctctttggatgtgtgaactggtctcctttacttccaagcttgttctttagcagggactactgaagagccttttcatccactgtctttattaactgtaccctaaggaactgtttccatattttattatcttctataaagtgtggatttaggaagagttgttaacctcggctgggagtgattattcaagttctgttttagaggggtgcagggacccagttgctttggtgtgggacactttataggtgtcctagattttaaaaagggggtaaacagatgtaagatattagaactcgcattctcttttttggctaagtgccaaagactagacagtatactgatatttgagccagcacgaggtagtctaccccttaaaggacagaattactcatacactgagtaccgtgtccttactttttaaagttatggataaagccactgagttaacctacagatgaccaggctaccaaaaacaagtcatgaggaagaccagcccacatggaagcaaataaaactcagctaatctgacacttagttcgtgcagtgcataactgttgccatgtgtaattgttgcagtgtgtcattgttgcaatgtataattgttgttatacctcatggcaagcaattaagcattaatggaaagcagtttgcacaaatggctgtaattagtgtcacatttatagaggccaaccacctttttcatgtttcttctcactgtttttcagttttggggttgagtggttggctggagttctccctgcccctcaagattaggtaacatctacttgaccctccgcttctgtgtggcctgtggaaacccaaagccctctggactctgaatcgcaggggtggggtgggcggtatgtgttcttagcctcctctaagaccccaggatcccaagttgagtgcagcctgaatcatcctcatcttccagttgaagatctgacgcttcctcaaaatccataacaaaaactcactcccaccgaatactcatgggtttcatagagtttcctaaagaactgggggagcctgggaaaggtcatctcacacactgctcagcaaacaacctagagatctctttagacacccccctctagacacctccacctcttcaggtgttctacctccccacaaccatcctctggaggcacccttcctcctcttcaggcatcctcccctctgccccggatgcttctctgtcccatctcagcttcccaccatcttgcccactcccttcctgccctttctccttctccttctctgtctccttctccttctccttctccttctccttctcctcctcctccacctcctcctcctcctccttcttcttcttttcctttgtttttttaagacagggtcttgctctgtcgtccaggctgtagtgcagtggcacaattatggctcactgtaccctcaaccttccgggttcaagcagtcctcccacctcagcctcctgagtatcagggaccacagctgcatgccaccatgcctggctaatttttgtagagatgaggttgctcaggctgctctcgaactcctgagctcaagtgctccatctgcctcaacccccaaagtgctgagatttacaggattgagccgctgtgcctggtgcccttctcttcttaggagcacaaggaattcctctccttgtctcatgtcccactgagtgactgggatctgggaatctgctgatatttattttccgtgggctggcctagccaagccagaggaattctgacaccagcaaataaaaaataaagtgttctttccctaattttatgagcaaggccttcccccacacagcagagtttgccagacccctgcctggtcctgccacaggccctgatgtcccccagatctcaagtactgctctggccttggattcctcctgcctagggatgtgccacaggagaatatgaagcagaccctgcctggacttcagacagactgaccagggggaggggcagggaggtccaggcggaggagggctaggagctcagggcaggctttctcaaacttcagtgactaagaatgagccaggaaactgacttctgggctcacccgcagagatgcagagtcaacaggtctggattttcaatgaaccgacgaatgactgccacactttgagattcactggcctcaggcagtgaggggtcccagggaagggcttagcagagctctgctgtcccgtctgacccagctctccagtcaccctgaagcagttaaaccatcttaaccttcagccagacttagcttaataaatgtgcagtgataaagaacagctctctctctttcagaaggggataatactaataactcttttgctttcccaaaattggtgtaccaggggccttggtggaagaacaaggccttcactgtctgcagatctgggcttgaacccgaccttatcacttaccaactatggctgtctcactctgagctggttatttaaacttcttgactctcagtttcctcgcccataagatgggacgggtggtaacaaatcaatacctgtctcactgattatgtccttgttaggccctgtttttggtctaggggacagttaaaagctgtgccaagtgaaggctgtgccatctactgacccctgctgatgagcagggacctgtgcctgccaacactgagagaaactcacagtgggcctggagaggaggcatgtactccacttctggaagctgtttccacttaatttccatgtcctgggcgtagctggataatctcccagatgaaaagccatgtgggtgacacctcctccccaaagcacctcttactctctaagaagtgcttgccattcattcttccatacaatcattgattggttcatttattttttcatttaacaattgtttttgagcataaaaatgtgccaggcagcatgcaaagtactggaaataaaatagtgaataacacagcaatattctttcttttttggagctcacatttttgcatgggagtgaatcaaataaacaaccagggtaattgcaaccaaaagtgactgcaatccacgtccacctcagtgtgcaacacatgaggtcaagcctaactatagccacttgttaggtgtttaccatgtgccaggagctttcctgagtgttttatatctgctgtctcatttaattctcacaatgagctcttaaagtgggttttatcactctcattttacagataagcaaaataaggaacaaaaagtttagacgatttacccaagctcacatggctagcaatgtgatcaaaccagaatccaaatcctgttatgtcctcactcttggccatcatttgagactgtcccatgaccctagaggaccccgacatggcagcaggacaacccttcaatcagaaaaccttctccaagccgggaagacagataggttcctcagcccactaatccaggggagacttagaactaattcaggactaacattcaacagattgttacttccccaagtccactgctaattgctgtggtactgtcatcacacaaaataatagtgggagggcctcttcagcaactgccttcaaatacacacacacatacacactatagaaaaaaaaaaaaatatatatatatatatataatctccccaccattgtatatttgtaatttgtgtggagagggaaagcagacacagttgatccacacattctttgaatggtgatggaccttggctattagacttctggcttcctctcttatggaacttcagaattctgtcccctcccagtgtcccagaggggtgatggttcttacagaatcaggttattacaaaacacctgaatcccatattcagacagcttggatcagcggttgagctgaaatcctacttgtctataatttccacttttatcctatttctgctatctgaagccatataccaaaaagttatttccttatccaaataaatagagaaagcccttcaattattatacagtgttattcccacacactgaccccattcctatcaattttctcttcttcaggggagaaacacatcttttgatgacctagttttgggtctcttcactgtccaggtaaccctcttctgggtggatattagttgtctaaaaagggcctttccattcgaagactagatcaaatgcattaaagaattttagcttccatcacttcttggccttttggctaagatcaaggtgtagaattttatcttccaagttgtgtctatatgggcaattttgaacatactggacctcaacattgtggattccttctgcctttcaaaaagtcttccctgtcaaataccattatatgagatatatgcaagagcatcagcataatactagaacaatggaattttatgttccttccttttcccatttaaaaaaaatggggggaaagaaaacctcatgaagtgtgcccgtcttcacatgctatttccccttatccttccccttcccagaattcctgtcctactaagaaagaactttatcttgtttctttttcttgatatattttcaaaataaggaattttccctttcttctggaacatttaatctatctggaagctgatgataatgcagcatttagaaaactccatttggcagaaaatgtagactttcttatccagcttaaattttttttcttctctcaagaacgataccaaatgcattttactgctttcattctttggaaatgttcccaacattatttttcccaagctacataagtgatttaatagatttatgttagagtttaaacaaggagcatgacccagaaaaaccactgaattattagagagagataactataaccaacattctttgtgaatttagatgtgaaaattcttaaaaatttagcaaatagaattcaacaatatatagaaagaacaatacatcaagaccaaatggagtttattccaagaatgcaagtttggtttaacattcaaaaatcaatcaatataattaatcatagtggcgaggtgtggtggctcatgcctgcaatcctagcactttgggagactgagttgggcgtatcacctgaggtcaggagtttgagaccaacctagctaacatggcaaaaccctgtctctactaaaaatacaaaaattaccctggtgtggtggtgcatgcctgtaatcccaattactcaggaggctgaggcaggagaatcacttgaacctgggaggtgtaggttgtgagccaagattgcaccactgcactccagcaacagagcgagactccgtctcaaaacaacaacaacaacaaaaagccactaaaactaataaatgagtttagcaatgttgcaagataaaaagtcaatatacttaaaaaattacttcattgtatttctgtacactggcaacaaaagtcagaaattgagattttaaaataccaggtataatggcatcaaaaatatgtaaattagggataaattttaaagatgtgtatgatttacacattgaaaaatataaaagatttctgagattaatttaaaaaaaacctaaataaatggagagatataccctatcatggattggaagacttaatatggccaagatgtcaattctttccaaattgatccatagattcaaagcaatccccttcaaaatcctagcagacctatttttttagaaatcgacaactgattttaaaatatacatgaacatgcaaaaaaactagaatagtcaaacccagtcagttctcattattcccagtagttatcatccataaaatatccataaacactaaattgcaaattctgaatcattgctcctagatgaaatacagagttgggttcctgagagcttccaatcacaacattcatcaatcaatacataaacttgtttgatgttctgtttaaacacacgtttttgagtatatactgttaattcattaacattgaaagctatcgttcatattttgaatgaagtacttaggaacaatagacagcagatcagcattactcttgggggccattttcaacagcaaaatctccaacaagaagtacaaaaaggcaaaaaatgtggcactgcatagaccacagaaaggatgcttgttcatgggatgagagctgaaataagaagacagaacgttgccttgtttgaccttacctgggaatatgtgtcctgggtgactcaaattttttgccactctgtgtatgtccatgaatggctgagaaagtgtcatgggtattgacttggggttacaagcaaattttagcaagtaggcagattcacaaatatggaatctgtgaatcatgcacattaaacaaagctttgaaaaagataaagttcatctttaaattttgtttaaactacctgatttcaagactaagtataaaacaacagtaatcaagacagtgtggcattggtataaagatgaacatatagagcaatggaacagaacagaatcgagaaataacccatatgtatgtggtgaaatgattttttgacggagtgggaaggcaatccaatgaggaaacaataatgtcttcaacaaatggtgttgcagcaattgaactgccatgtgcaaaaaagcaagcaaacaaacaaaaggaacatagatcttgtctttacctcataacatgtataaaaattaattgaaaatgtattctaagcctaaatgcaagagcagacactattaaataccatgatgaaatggtagaagaaaaatcttgatgacctcaggttggcaaagatttcttaaatagtacacaaaaagctacaaaacataaaagaaaaaaatcaatatatttaatcacaatgaaaacatttgctcttcagtactctgctactaaaatgaaagggcaagccacagattggaataaaacatttgcaaaacatatgtccaacaaaggactttagaatataaggaattcttagctcagtaccaagtaccaagtattcagtaccaagaagacaaacaccaccataaaaatgggcaaaatatttgaacagacactaaaccatggaagacatatgggtagtgaagaagcacatgaagagatgctcaatgttatcagacaggagatatcactatacctccactagaatggattttttttttttttttgagacagagtcttgctctgtcgcccaggctggagtgcagtggcgtgatctcagctcactgcaacctctgcctcctgggccaagcaattcccctgcctcaacctccaagtagctggatctacaggcacgcaccaccaagcctggctaattttttttttgtatttactagtagagatggggtttcaccatgttggccaggctggtcttgaacttctgaactcagatcatctgtccacctcagcctcccaaagtgctgggattacagtcttgagccactgtgcctgaccagagtggataaattttaaaagattgactataccatgtgttcgcaaaattgggaactggaatgctcatacatcaccagtggtcatgtaaaatggttcagccactctggaaaacagcttagcggtttcttacaaagttagatatttacctatcatgtgacccagccattccacttttaagtatttactcaaaagaaataaaagtttatgtctaaaaaaagatttgaacacaaatgttcacatcagctttacttgtaatagccccaaactgaaaacaactcacatgttgattaacagatgaatgggtgatacactgcaatacacgcatcctgtataatactcctctgcagtgaaaagaatgcactattgaaacatgcagtagcctggatgcatctccaaatcactatgctgaatgaaagaaaccagacccaaaaaaaccagaacataccatgtggttccatttgtataaaatttttggaaatggtgcctactcagtaatgacagagagcagattagtgggtgcttggggccaaggagtggggagcagcagggagagggattacaaagcagcatcaggaaacttgggggggtgatgactatgctcattatcttgattgtggtgatgatatattgataagcccgatttatcaaactgtacacttgaagtatgtacagtttattgtatgccagttgtcactcaataaagctgacattcattaatcagaacaaggtttcggaagtaagtagtggcgctggaccagactgcctttctggaatagtttgtttgtggcatcagtggaggatgagagaaggaatgtaagcagggataaagtatggagcaatttgattctcaagctaagttccaacagtgtcctttgttgagtaggggaattgaacacagggtgtcaagggcaaaaccaggtcattttagtaaattggggctggcaataatgtatgtgctgtattagaggtagagagtggggcagggatgccttcactcatccgctcattcattcaatacctgtggattcccctctatgggcctgatactcttatggggtatttttcttacatattagggacccaagaaacattcagatcttggcttcccttttaccccccacacagagagcagaatataaaagatggaatcagagaacaattctaatcagtccagtcaattcagtgtatgtttcttacgcccgcagaattaagtaggagaccacggcaaccatcccagccccagggaggagtttatgacatcagataggtgatggctggtgggttcagagtaattaagactgatggataactgcagagaggaaatctagttttcagggcaaacagatgcgtccaagagagagcccacacacgtggttggatgcagctggagatggagaattccagttcaaggaaaaggcctgggcagtatgtgtttggtggtggtcgttgaccctgaaaatagatggaatcttggagggagaaagcgagtgtggaaagtgaaggtcaggttgtgagctctggggcagcccacagtcagagggtgggtcaaagctagaagggcgagcaggccgcacgcacacacacgcaaagcagctgccttcactgacaatcaatggcagccacctgagctgtggctgagctgctgtgagccgaagcagtgggcttgctaaatgccgtcatccagcttccccttgaccctggctgtcaggcctgggtctgggagcttagggatcattttgtgcagtctgctcaccctctggctgtgccagggcacaggattttctacaaaagaaggaatctggggtgagtagagccccatgggagaactgagctgactaaatgtgagtggagaaatgccaattatgaaaaaaatgtacatatcaggggaacatgagcttgaaccttgcacagcttttcctccgcttggctgtttttatgaggacccaggcaagtggttctcaaagtgtggtccccccggaaaacaatatcagctttgcccggaacttactagaaatgcaggttcccaggcttaccctagacccactgaatcaggacctctggaactggggcccaggaatgtgggttttcccaagccctccaggggatgtcgatgtacgctgcagtttaaggactactgacttagatgttttaaataagatctctccctggcagcatccactcaaaagggggtttatattaagaacataatgtgacaacggtttggaaattgaaaagcactctacaggagtaggacattatttttgtttgtttatttattatttttgtcaacctcattcactcagatttcactgtattttagaacttgtttcagagattccccccttcctccttttcccttccccgaggaaaaccaaaatcttgttagtgaacaggagaattgattgaaaaaaaattcaactgctgcgggaaaggaggagactaggcacagctggagtttgcctgaaaggataattttctcagtgacattgggtttgttttgtttctttcagtgtagaagcacgaggctgatgactcatttaccattggaagacttcaaatccaaactgcagttgtcaaaataagattagtgctttcagacatgatgaaagagagggcatggtctcgaaaaggcaagcttgggttttgcctgcatttgtggagccctaactcatagcaagctttcctgtgggagtgggcagagaccccatcgtttacccagttgagtgaaatggcagccctaataacccacttctccttctctcttgctgtgataaacaatttctgatttctacatctcagattaaataacagcaagagctataaaaagtagagggtgtctcctaaaggtgttcatttgctttaactccaaagatgagattaaactgtcattggtgtcaacagcgtgcagtgcagcttgtctaaaattctgaaacgttggtgaaaccctttgatttagccctggatgatggccatagcctttgccccatgctccgtgctcccccctcagttctgcctccttccggtgtaagcagatgaaagtttccaagttctctggactgagatgcaggcgccagggtttctaaaggaaggcacttacatctagggtgcatgggagtctctggggaaactggttgggtttgagcacagctttggggctcttggcagcaaatcttcactaattagtttcacctgggaagactgagttatccctcttaaaattctccaggcactgaaacaagcgagcagattttgctgactgtcagatacatgctaatggtagctccctggcaaggtgtatctcaaatttggccaggtctttttgttatgaaattccaaattacctactttgctgtatcacttcaatttagcatagaactcaaaaaccaaacttggccagagataaattttagaacgttaggatctaatattcatgtttgtagggattttttttttttttttttttttttgagacaggatctcgctctgtctcccaggctggagtgcagtggcgcaatcatagcttactgcgacctggaactccctggctgaaatgatcttcctacctcagcctccctagtagctgggactacaggtgtgtgccactgtgcctggctaattttttaattttctgtagagacaagatgtcgttctgttgcccaggctggtcttgatcctcctgcgttggcctcccaaagtgctgggattataggtgtgacccatcgtgccggcccatgtttgcagcttttataggtacccaataaagtgaaactattagaattgggatgtgagcaaaatttggttgaagttcaactctctgccatgcttaaataggtatgtgccactgacacttttcttttcccccttgatttaggaaaggagaaggatgctaacatttgttgaatacttactgtcagccctgcacttcgggaggccagggcgggtagatcgcttgagctcatgagttcaagaccagcctgtccaacacggtgaaaccctgtctctacaaataatacaaaagttagctggtattttgctgagcgtggtggctcacgcctgtaatcccagcactttgggaggccaaggcgggcagatcacctgaggtcaggagttcgagatcagcctgggcaacacggtgaaaccctgtctctacttaaaatacaaaattaggcgggcatggtggcacatgcctgtaatcccagctactcagcatgagtactgaggcatgagaatcgcttgaacctaggaggcggagaatgcggtgagccaagatagcgccattgcactccagcctgggcaacaagagtaaatctccatctcaccaaaaaaaaaaaaaaaaaagttagctgggtatggtggtgcgtacctttagtcccagctactcgggaggctgaggtggaaggattgcttgagctcgggaagcagaggttgcagtgagcctagattgtgccattgcactctagcctgggtgacagagccagaccttgtctcaaaaaaattaaaaataaaaaaataaaataaaaatatcttctgtgagacagatgctttgcccatctagattatctcactcaaccctacaaataagatatttaacctttttatgaaaactgaatctctcaaaagtcccttacttgaagtcgttacccagctggggccaagtctggctccaaagtcgatattcttttcacctgcctgcctcacccctaccctttctgaggagacgtaactgacatcctgccctcccccagtggtggctctcttcatcatttttcatgtcacctctttcaggtccaaataaaaatttggagaaggtcaaaatcatcttttcagttcacactgttaaaaatggaagcctgctctctcaccacgctcaactcccctttcctgcttataacgtatcacagatttttacctatttgctttgtttactatcaatcttctatcaggtatgtgctgctaaatgtttaacaatcaggtctccaggagacaaaagctctgatttgtagatttgccaatttccatggtgtaaatactcccaccgtggacatttcaagctaccaacgtggcctctttgaatgcagctgtgggaagagatgcacatcattgtgtgagtcagtacgagctgcctctagcacatgactggcccctcactggaccatcagctctataagggtaggaatttttctgttgttgtccactgattcactgttgttttcccagcactccgaaccgttccatcgttgaatagatttattaattcagtcatccacaaatcagccacatggcagatgctagatatttgaactagcatgctgagcaagacaagcactgtggctgccctatgtggcaggtgaaatagacatgaaataattagttgcaaattaagcattaaattataattgtgttgaggattacaaatggaaactctgagggaggacttcacccctagtggcaggtcagagcttcctgagaaagcagactttcaggtgagtactaaaggaggtatgagagttaggtaggggaaaaggaggtcaggaagaggcttgagcattctaggcagaaggaatgacctttgcaaaggtcccaagacatgaagaagcttgatttgaaaatggagagggccatgtaaatggagcagagaaaataagaggaggcttgagataagactggagaggtgaaggggtgggtcttgtagcccccttgaccatcacattagagtttttggactccatcctaaagcagtgataagccattaagggttttaagcagaagagaggcaggagcagattactctggctacaggaggatgctaggctgggatgaatacaggaaaaccagttaagaggttgccacggctgttcagccaacagatgatagtggctccatggtggcaggggagatgaagagaagtaaatccaggattgactgggtctgaggggtacaggagagggaggaatcccatgactttcaagtttctgttcccatcttcgaccccagggtaaaagttagctattctaaaaattcatctttgctaaagagaaattaaagaatacttcagaatcatccccagctgtcccatttctgcccagtgacatttattaattgagacagagctctaggctgcccagcaagggaggctgtcaagtcaacaatagatggctactaagcaccaactgtgtgaagtgcatggcattatacaggcaccgtaaggaacaccaagacttagagacatggctctgtccttcacagagcttacaagagtaggtaagagagatgagttaggaacacctgacaaccctgtgcttgtgtcacatgagcatgagttcattcatccattcaacaagtacttgttgagcaaggacaaagtgccaggcactgtgctagataccgggatgcagtggatagcagggcacacaggttccctaactgtcatgacagcttttctggtgtccatagctgggggctggctctgagatgtcattgtgttcttgatgcaggacaagtgagccccaaagtggggcttagcccatgagggttcttggctttatccaggagagaattcaagggcaagcagaggtagatgtaaacagctttattgaagagacggtgttacagccctggcagtgttacgcctccgtgactgctcctgcagagcagggctatccttataggcagagagtaggtagtagctcagggcagttttacagtcatatttatacccacttttttttttttgagatggagtttcccaggctggagtgcagtggcgcgatctcagctcactgcaacatctgcctcctaggttcaagtgattctcctgcctcagcctcccaagtaactgggattacaggcacctgccaccacatctggctaattttgtatttttaatagagatggggtttcaccatgttggccaggctgctcttgaactcttgacctcacatgatccacctgcctcggtctccgaaaatgctgggattatgggtgtgatcccagtggcctatacccacttttaactgcatgcagattaagaggcagtttatgcaggaatttctagggaagggatagtagctcttggtttgtcaggtcattgacacggaggaggtggttactcccaggtgttgccatggcaatggtaaactgacatgtcacactggtgggtgtgtcttatggaaagctgcttctgccccagccctcaatttgatcctgtgtccaagccctgcctctggagttaagctctgcctctggagttgagtcctgcctcctacctcactctgagccctcttctggtgtgtgaatacctcttgctgaggatgaggagaggcagagagacttggagagaattttgttcccatctcagtcatcttctgaggaccccacatctaatggaggagggtattcttaggactttagggccattcctcctgggaggcagggcatctgggcctttttcattgttcattcagcaaatgaactcttatggagaccaaatacatgtgctaggacactgtgctagactctggagagtcaaaactgaccctcttataatggggcagatagccgtgatcaagtccttccaataccatgggatcagtgccgaaatgctagagcggagccatgtctatagtgctgtgggggcccaggggaagaagccttaactccagccaacttgaaggaggcttcccacaggaggtgacatttgactggggttgtgagccattcatgggggtcaccaggtggagaaggtggaaggctgtgccggggcagggggagctctggacacagtgcttcttatccttcagtgaaatcctcctggcctcagagagaaagaagggctgtttttcaaaagcataaggaatcatccaaaaaacatctgtatttgtttcaaaaggaaatggccactgccagaaaaacagcaaagttgttttgtcagaacccagtctgtatttattcctttgtctttgtttaattagattaatccctgaatggtttcccttgggtcggtacaaatcgctcgtggccataaatccccaacaattctaaaaacagtaagaaaggacaatccgcatgaagccaactggcaagcttgctgtttgtgggacagttctgggatgcgagcagtaatcttgcacccgcacataggtgtttggggttcttttagcctcttggagaggggagcaaggacaacaatcactcagatttgtttagaagaggaaagctgaaccgtagggtctcatcattaaagggggagactgactcctggatctgggcaccttccccagggaggattgtggggactttttatctgttaggttcaatgacattcagcctggctgcacactggggctacctgggagctttgacaaacaccactgcccaaatcccaccccctgccagtctgatttaattgtggtggggagtaccttggcatcaagattttcaaaggtcgctgctgcttctgtagatgggagcttgcagttactcacagactcttctgcggatatcccagtctgtcctgaaaggaacaagcatatccttgcctttctctacctaccctgtgcagggaagccttttagaaaaaaagattgttccttcaaggtcctggttccttgcttttgaaatggtactttcaaaagggttcttttgtaacaggttgatttttttgtcttcctccattattataaaagttcctgttagaaaatttgaaatcagacaattataaataaaagaatgaaaaatcacctgtattcacaccactacttggtaaccatggtaggtagggttcctgccagacccctgatggggcaaggcagcatctgcagtagagattgggaggacccatgtggagaagctgctgccacccttccagagctggttccagcatgctggagcgtcacctcccagccatcaggacttcatgcagggacactgcccacccacttagggagcttagagtctagtaagagagacacagtacatccatcgctctataaacacatacgtagttaacattatgattcatgccaggagggaaaagtgcaggggtgggctgacagccgatgggtgaggccaaaagtgtaaagaatgtttaaaggtcctcatagcaagaggttaattttctcatcaccattcaggcaacccaaagctacttcagcccggaactcagaaacctactgctgttcccaagaaagcaatgcttttcattgaactttgctagaggtgcttaaattttcccaggcctgagaggatctgtggtgctgccagacttatccttccgaagcacaacttgggtgaaattgctggtctccctttttaaagtttttcccttgagtggtccccattgcccgctgattggagttcagcctatgcagcctgtgtgcagagatccctctgcctctggtgtcaatggtctttcccatcctctcttctgctacttcccctggaatttccagagcagaattcagctgccacgcctctcctgcttccctcttctgtttactcacgcgtcccaagcctggagtgctgtttctctttctccatacctgccagcctttcccagtccttgctagacttgcagtaatctgtcccaattctgaactcccatagttttcttggcacttctcttagggattcttatcatgtcctacctcgcatgttagttatttaggtggcatctaacaaccactctggcctttctgttcctcaaataggatcagtttgttcttcaggacctttgcattcactgttcttttggccgaaaatactcttcctaaaggttcatgttattaactcctagtaggatacaagctgcgtgacagcagaaaccccttgtctgttttgttcaccatgatatccccaatgcttgggacatagtatgcgctcaaaccgtatttattgactaaatgaatgaatatcgtatgattcagacatttcttatatctggcctagctcatttaggttttgtatttctttgattactcactacgatttttgtattagctgaagttttcttccggttatgggtgttttccttacatctgaatccactgaaaatctacattggactttctggttggagttctcaattggaaatgtgagatataaacttactggtgagaggtaaaagaatctgtgtctataaggcttttttttccatctactttattgatttgggagtgaaacttcttttaggagtttaaaaccagaattcttatttgtagactcttagacctaagcgtttttaaaatgtgatgatgtaagttttaatgtttaaaattgtttaatgcatttaatagagatgttgaatcaaatcagcttttatctttttaaaaatcaatttggatattttatatttatgtaaaagcataataaactatgaaactcaaagatctagaagatgatatgaaaatgtagccattggattcaggaattaatcaagctttctaggtaattaagtttttttaaatcatacctgttgtagtgatagcttttttttgtttgagacagtcttgttctgtcgcccaggctggagtgcaatggtgtgatctcggctcactgcaacctccacctcccgggttcaagccattctcctgcctcagcctcccatcttctgagtagctgggattacaggcgcgtgccaccacgccaagctaatttttgtatttttagtagagacggggtttcaccatgttggtcaggctgatctcgaacttctgacctcagatgatcctcccgccttggcctcccaaagtgttgggattacaggtgtgagctaccacgcccggccagtgatagcttttaaccagagaaaattctctttaatatattcaacccctttaatgctctctgattatctccagttttaatggcaaaatcaatggtacagctagctgtttcatggtatccaagctgttctccttgctgggaaatagtgttagagactgagtcagtgatggatggaagatgcctttaatcttttcatccaccaacatattcttagttctgttgcagtagatgcatactgcaattccattcctacgttgcatgtgaataaacaggcagagcttagcacttagtggacatgtaataaatatttgaccaaaataagaccacgaatagacatgtatctatttctccctggcaatgtttgttacctctacctaacctcttttggcttctccattttcctcgtttgttattagaatgaatacatagagcacaaagagggttttcaaagagctttgtctcattccttcttataccagcaacagagtgagattctgtctcaaaaaaattatttaatgtatttcaaagtaattccaactttgaaaaatgtgttttttttatgttatttatttattttgagacagagactcgctctgtcgtccaggctggagtgcaatggcacgatcttggctcactgcaacctccgcctcctgagttcaagcgattctcctgcctcggcctcctgagtagctgggattacaagcacacaccaccacactcagctaatttttatatttttagtagagatgaggtttcaccatgttggccaggctggtctccaactcctgacctcaagtgatccgcccacctcggcctcccatagtgctggaattacaggcgtgagccaccgcatggctgaaaaatgtgtttttatatacatgcagaaactcacctggaaagaaaactcaccaaaatgttaacagtggttgcctctgggtagtaggattacagatggggggattacaggtgaattttcttttatctatttttttatgttttccaaattttctactatgatcacgtatcaaaccttacaatgtttttaaaagttactttggtgagggctctggagttccctgttgcctcaccctgggctgggagcattctcaggtgtgcctgacgttgtgttctaacatcgtgactttgcctcagtccaggatctgtgtgccatggaggaccacaactgtgagcagctctgtgtgaatgtgccgggctccttcgtctgccagtgctacagtggctacgccctggctgaggatgggaagaggtgtgtgggtgagtatccctccagctgggcttggtagggaaggacaagttaagcatggtgaggaggaggggagactcacgtgtacctcccacatatttgtttcctcacctttgggtttccacaaagtgctcagttgtttggtgtagttgttaggcagaatttgaactttaaaggcttcatttatggctgaggtcagcgttttcttattctgggtctccagtaaaaggaacacttatgataatccatgcaaatataactgtgtgttactgcatctcttgaaaaggatcgggtggattttcttcaactttggaggatatgtttggaatggcctgacttatatatagctcaggtgttatacatgaaatttacttgggtgggttgctgagtgacacctcaaagacaacgggcagccttcctccctaatgtcacctatagctcagtgacaggccaaagtgactgccaggtgaaagagcccagccatatgggctcagcgtaattagacggcgtggtcagaggaaactagcagtagcctcaaaccctcaaacacaagcccaggtaatgaggctcaagggcagtgcttgatgctgcagacatcccccctgtttatctacaaagcctttgcaacttaacatggtctcattcctccttataccaacaaacagtgcctggtggatagtaggtgtttcataaactgaactgaatacttatgaggcagaaaatctagaaggaaaagaacttgactgacatcaaaactggaatgtaaattttctgctaaatcctgcattttgtcttccgtgttctattgttttcaggaccctattttattttgcttcgcacaaacagggtatgcttatatttttgcacatagaatttgcattttccagcacaccttaattcttagctagggatgtggaaggcaaaacaaaacaacaacaaaacaaaagttaggtggtagcctgcaattggcaggtgagtgatgagagtatcgtgggtttgtttttacacactgataggaatgaaagcaacctctgcctctgactctcatcaaagggccacaaatgcagctggtctcctgggccttagggttgtttttcttcttaatctgctggtggtggccatgatagagtggcagggttccacacccactaccactagcaaaaaagaagccaacatatatacccatggttatttttgcttcattaatttttattatgcaagtaatacccgttcatagagaaacttaaacagatgagaaaaatcactattaataggttattgtattttctaccagactttctccatataaatatctactttaaaacattttgttggacaggtgcgatggctcacgtctgtaatcccagcactatgggaggctgaggcgggcagatcacttgaggtcaggagtttgagaccaacctggccaatatggcgaaacccggtctctactaaaaatacaaaaattagctgggtctggtagtgtgcccctgtattttcagctagttgggagggtgaggaagaagaatcacttgaccctgggaggcggattttgcagtgagctgagattgtgccactgcactccagcctgggtgacagagcgagactcatctcaaacaaacaaacaaataaacaaaaaacattttgtaaagatttaacaaaatgaggtcacactgtctattttgttttacaacctgctttttcccctctactatttgttaaatgggtagaaactctgagtgctgtttggtcaggaggaaatcaagccattgtgagttaggctggtggaggagcttcaggaaacaggatgagggtaatgggttgattaggacaaggggagggacagtagaacacagggcttgcattggtcacagggagtagatggggcaggaagcccaccttggcccatgggaaactggaggccactgaaaaacccatttctctgagtgtttccaaataattacctgcttgtccgtgtgtagtagagaacctttgtatctctgaggattttgctgtaacttttgggatttgacatttattgaagagctacaagcgtgggagggtagatgctgtcattgccagagagctttggcgtgctgtttatcggagatgggcgtttctctgcggctgcttgactgcatataagaatgtctgcattttctcagtggggatccaatccaaagagtgggaaaatgggagagactgcatcccattgcaacccaggtctcctccgtcagatgatcctagcatcaccagccttaccaccttttccccaatgccctttacagcggttcactaagcactcgatctgttagaggctgggagtgagatgattaagcaggcagtacttttgttgccagtagcctttcttagggactccagacaaaatcctacaaggttagttgctgctcaatagggctatggtgagtacaacgcaaatgatagagaaaatattggccacggaaggtcagagagagacatcctaatggctaggctggaagatctgagtgtggaaggaagggtggcaattggacaaatgtccaaggcagggggagagatgaagggcagtgactgtggaggtggcaatgctcttcaagcattagggctaagtctggcctaggagtggcagggccagctcctgggagctggtaggtcagagagagactgttacagtgaaaaggccaaactgaaagttaaccaggtggcctaacctgagggccagaaggcgcttatcaaagatggagactccaggtaccagacttagagcaggaaatttagaggagaggctggtgagaactctggacatactccattagtagctgatctggggtgccctgtgtgtagatggccagggaacattaagaacagagtgattatgcctcccagttaatacaggacaatcccagtttatgccctgttggcccaattcttttttttttttttcttttttttgagattgagtcttgctctgttgcccaggccatgatcacagctttgcagcctcgacctcctgggctcaagcgatactcccacctcagcctcctgagtagctgggaccacgtgtgtgcaccactgtgcccagctaatttattttttgtagagacagggtctccatacattgtctaggctggtctcaatctcctgggctcaagtgatcctcctgccttggcctcccaaagtgttgggattacaggtgtgagccacctcgcctgatgccatttctttttatttttagacagggtctcactctgtcacccagactggagtacagtggcgcgacctcggctcactgcaacctctgtcccccaggctcacatgatcctcccacctcagactcccaagttgctgggaccacaggtgcataccacacgtctggctaattttttgtatttttggtagagatggggtcttgctatgttgcccaggcaggtattgaactcctgagctcaagtagtctacctgcctcggcctcctaaagtgcagggattatagacatgagccactgcgcccgactgaccccatttcttacccagctggcctcatttcttgatggcacatcttttcactttgaaaggggttccagtttggatgataaattacataatcaccctagttaaggctgtccaatttgacttaaactgttaagttcagcagagaattcctgtatacatgaagtaggagatgaagttgaagacagcagaaggaactggattgttcagggctttgaaaatcagacgtaaagcctagattttatctctgaaaaagagccaccgaagggtttatatttgggtgacaaatgcaaagcttcatttttaggaaactcaacctcatggggaactgcagggtgtattccaggagaaggatggcaagaagtgggaagaccagataggagattgtagcagttatcgggtgagagaggataggaaccagccaggatttgaggtgcaactgtaggaaaggagagggagacagtaaggaatgaaagaaggtgctgtacataaagggaacaaggagaagtcaaaagtgactctaggccaggtaccgtggcacatgtctataatcctagtactttgggaggccaaagtaggaggattgcttgagcccaggtgttcaagactaacctgggcaacatagtgagacccccatctctaccaaaaaataaaaaaattagttggacatggctggatgtggtggctcatgcctgtaatcccagcactttgggaggctgaggcaggcagatcacctgaggtcaggagtttgtgaccagcctggccaacatgatgaaactccatctctactaaaaaaaaatacaaaattagtcaggcgtggtggcagtcacctgtagtcccagctactccagaggctgaggcaggagaatcgcttgaacctgggaggcagaggttgcagtgagccgagatcgcaccattgcactccagcctgggcaacaagagcaaaactctgtctcaaaaacaaaacaaaaatattagccaagcatgttggtgcacatgctggtggtcacagctacttgggaggctgaggtaggaggattgcttgagcccaggagatcattcaaggctgcagaaagtcatgttcacaccactgtactccagcctgggcgacacagcaagaccttgtctcaaaaaaaaaataaatgaataaaattgaaaaagactccatgatcttgagcttccatggctgtgagagtgatggcaacagtgatggaagagtgatggaatcgattttcaaaaagataaggccaagcgtggtggctcatgcctgtaaacctaggactttgtgaggccaaggtgggaggattgcttgagaccaggagttctagacaggcctgggcaacaaagcaagaccctatatctacaaaaaaattaagaaattagctgggtatggtggtgcacacctgaagtcccagctactccagaggctgaggtgggaggggtgggaggattgcttgagcccaggatgttgagactatagtgagccatgatagtgccgctgcactctagcctgggcaacagagtaagaccttgtctcaaaaaaaaaaaaaaatgttggggtgataattagtagtcattgacaaggtgaattttgaattcaggttagacaccacaaggacacgtcaagaggaagcagaaaactcggcattaacatgacagagagagtagaatcaatgctgtagtcaggaagcagcatagtttatttcttaacttccagttattttctattttaaatatttatgtgtcagttggtttgttttgagggcatctagacctttaaaacagtgctacctgagctgaaatcccaactctgctacttgctaggtgtgttaggccatttgcgttgctataaaggaatacctgagattagctaaaagaaaaggtttaattggctcatgattctgcaggctgtataggaagcatgacaccagcatctgcttctggtgagggcctcaggaaacttccaatcatggtagaaggtgaaggcggagcaggcatgtcacatggtgagagcaggagcaagaggtagggggaggtgacacactcttttcagaccaaccaaatctcacatgaactaactgagcgagaaatcacttatcaccaagatgataacactaagccattaatgagagatccacagctatgatccaatacctcccactaagccccacctccaacattgggaatcacgtttcaacatcagatttggaggcaataagcatccaaaccatattattccactcctggccccccatatttcatgtccttctcacatttcaaaatacaatcgtgcctttgcaatagttccccaaagtcttaacttgttccaggcttaactcaaaagtctcaaactccaaagtctgaagtgtcatctggagatgagttccttccacctatgagcctgtgagatttaaaaaaaaaaaaagaaaaagtttttacttccaaggtacaaggtgttataggcactgggtaaatattctcatttcaaaagggagaaattggccaaaacaaagggcaataggaccatacaactttgaaacccagaagggcagccattacattttaaaactccaaaacaatctcctttgactccatgtcctgcatccaaggcacacaggtgcaaggggtgggcccccaaggccttggttggctccgcccctgtggttgcagggtatagcccccaaggctgccctcacaggttgttgggtgcccatggctcttgcatgctaaggttgcaaactgccagtggctctaccattctcaggtctggagggtggtggcccccttctcacagctccactaggcagtgccccagtagggactctgtatgagagttccaaccctacatttccctttggcactgacctagtagagtctctctatgaggcttcacccctgcagcaggcttctgcctggacatccaggctttccaagacatactctgaagtctagggagaagctgccaagcctctttcatgcctgcattctgtgtgcctgcagacttaacaccacatcgtagccactaaggtttatggtggcttgtactctctggagcagcagcccaagctgtacctgtggccctgtgagccatggctggagctggagcagcctggatgtgaggagcagtgtgctgaggctacacagggcagtagtgccctggacctggccccccaaatcatttttttcccctaggcctctgggcctttgatggggagtgggtgctgcctagaagatctctgaaatgcctttgaggcctttttcccatgtcttggatatttgcacttggctcccttttagttacactaatctctctagcaagtggttgctccacagcctgcttgtattcctgtcctgaaaatgccttttctttctctgccacatggctaggctgcaaattttccaaactcgtacattctgcttcccttttacatataagttccaactttatttctttgctccagtatctgatcataggcttgaatgctttgctgtttagaaattttttccatcagatagctaccttaggtcatccctcttaaattcaaacttccacagatccctagggcatgaacacaacccagctaagatctttgctaaggcatagaattggtgacctttactccagttcccaataaattcttcatttctatctgagatctcatcagcctggcctttactgtccatatctattagcattttggtcacaaccacttaacaagtctctaaggggttccaaactttccctcatcttcctgtcttcttctaagccctccaaactcatctgacctctgcccattgcccagttccaaagctgcttccatactttcaagtgtgttaatagcaacaccccactctcagtaccggttttctgtgttaggctgcttgcattgctctaaaggagtacctgagactgggtaatttatttgaaaaagaaagagtttaattggctcacagttctgcaggctgtacaagaagcatggcattggcctctgcttctggtgagggcctcagaaagtttacaatcaaggcaaaagccaaagggggagcaagtatgtcacatgacaaggacaagagtgagagttgggaggtggggaggtgccacacttttaaacaaccaggtctcatgtgaactaactgagcaagaactcactcatcacctaggggtggtgctaagccatttatgggggatctgtccctgtgatccaatacttcccaccagggtccacctgtaacacgggggatcacatttcagtgtgagatttggagggcacaaacatccagaccgtatcactaagcacatatctttaagtctaatttctgagcttattttcctcacccataatgtagaatagtaatatatacattgtaaggttttatgggattaaataagatagtgagtgacattcccaatatactctaagaacttagcattattattacaacacctactattatcgtaatttcctgtatatagtgaagtatggagtgagaagagagtgaaggactgagccttggattgcagtcacatgtagggagcaggaagtaggggcaggaaaaatattcatgaagaagtagcttaaggctgggggagagaaagaagaatcatggaacatgataggaagataatttcttggccaggtcaatattaatgtcatgcttcagcatggccaaaggtaacaggacttagagaaaaagccatcaacttgagtcacagattcaccgctgcaaacatttcagaactctgccagggactttgctaggcttgaggagcacaaaggtgaccaggaggccattgagaatggcaaagggggcatgggtaaagggcagatttcaagaggcagggagtgggtgacaagaaagtgtgggcagcaggttcaaactatttatttaaagaaatttggtagaagttaagcatgtccagctgatgcagggcaggcaagtcccaaagtggagcttagcctacctgggttcttggctttgcccagggaagaattcaagggcaagccagaggtagaagaaaacagctttattgaagaggcagtgttatagctccatgactgctcttgcagagcagggctaccctgtaggcagagaatagcagcttaggcagttttgcagtcatatttatacccactttcaattgcaggcacgttaaggggaggtttatgcagaaatttctagggaaggggtagtaatcgttgggtcattgcccaatgatagtaagggatggtaactcccaggtgttgccatagcaacagtaaattgacatggtatactgattgaagtctgattgaaggctgctttcaccccagccctgttttagctagttctcaatcaggtccgatgtctcagccccacctctggagtcaagtcctgcctcctacctcacagctactagtgaatttatgcagtagattttcagtttcaacactttcatagctactgctatgaaaagcacttcttttgttaccaaaacattaggggttcagtctaggtcctgttgcttgttgcacagaaagccaatcactgagacaacaagtattaccaggaaagaaggcttcagtcaggtgccatagccaagaagatgggagatcagtctcaaatccatctccctgactgactaaaattagggatttaggctggatgtggtggcttatgcatgtaatcccagcactttgagaggccaaggtgggaggatcacttgagaccaggagtttgagaccagcctagacaacatagtaagactcctgtctctacaaagaataaaaaaaaatcagctgggtgtggtggccaacacctgtagtcccagctactcaggagggaagattgcttgagtctgggaggttgaggctgcagtgagccatgattgcactactgcattccagcctgggtgacagagtgagaccctgcctcagaataaaataaaataaataaaataaaaattaggggtttatatagcagggaataaatgtaaacatatgggggaaaacaggaattagggaggagtatggaagaggagttggtcaacacgcagcaggtggttggttaggcagtcataaatggggaggggtctggcatgtcattgtgcagatgcagtgatctggtaagtttcagccccttgatactgtcagagagtcctgacggtttggttcttgagaagggttctcagataaaacaaatgtaactttctcaagtttcaagactggaaaggtaaatttctatgtttattcaaaataaaccataaacatcagttctgtgggacaattgggccggtttcactttgattcatccctgaattattactgtgacctgcatgaaagttcagttcttagtcatggactcagcatttttttatagatttccacacatttgagtaagtggaacgttcaattccagcaccagagttccaactccctgacagctcatttcaccattgagagtcctgaatttattccgtattcaatggtggattgctgactaagaacctcctctgctttagtggagtccctgaatttataattcatcagctgccactaaagtcatgttcattgccatccaaaactatttttcaaagaccatttatctagatttctgaacatgaattttctgctgtacttactcacctggtgtttacaaactgtcttttattttggggtaactttggtcctgtttgcatcttatctacccaggcagattgtaaacccttgagggcaaaaccacttgtacttttcatctttcacagagtggacttgaaatacattttcttgaagcactgactgaggttgattgcaatctcatgcattcatgttttgtaaaaaatatttcccccattgactggtttttaaattataaagtcatttttgcttattaaaaaaaaaaaagtcaggccaggcatggtggctcaagcctgtaatcccagcacttcgggaggccaaggcgggcagatctcttgagctcaggagttcgagaccagcctggtcaacatggtgaaaacctgtcactacaaaaataacaaaaattagctgggggtggtagcacacacctgtagtcccagctattcaggaggctgaggtgggagaattgattgagcccaaggagatatgtgccaccacccccagctaatggaccaacaccgtctctaccaaaaatatataaagaaattagccaggcatggtggcacgtgcatgtagtcccagctacttgggaggctgaggtgggaggatggcttgagtctgggagggctgaggttgcagtgagccgtgatcatgccactgcattagagcctgggcgacagaatgagaccctgtctcaaaaaaaaaaaaaaaaagaaaagaaaagaaaagaaattttctctgggttttaaatcctgcatttggaattccagttatgccttggagaagagaggttttgtgagtctgactctgtgtgtgtgtgtctaatgtatgctcagcaagtaaattggttctaccatttctctaaatgacaaatttggtttttcttactttgttatcagcaaactttaaactccaaatgctcctctttaaaatatactatttctgctaatgccattcccttgcagacggagtcctgctgagaaaacgttagaattggaccaggttataaaacagaaatcattgattttagggttttattacctgcagcaaggtatcatttattcttagagacagtggagtgatttctcacatgttgggcagagaatgaatgtggcaagactgacttctgactctgggatcttagcacttgtgatctggagggctaaagagctacagctggagaattactctttccatttgtaaacaagaatgtagacattttaggcataaatgactgagaacagattttgttgaagtagatgagaacttggaacaatagagccatcattgagttatacaagaggtcacctccatacatctgcctccctaatcttgacctctctttttatgagtacaattttgcaaccaagaaagttatgcaaacaacccaaaccacttggcaaataacattagagctgaatgccctagaactctcttggccttaaaaaactgttagattcacatgcctggcagtgggttcttccatgtttaaccactgcactgatggcctcatctgccgtctccagaagcctagcagtgtgtcagtgggtggatttcaaattgagatgggatttgacaccttggagttttacagactggagacttgggacccaggaatgcgtgaatcctgccttgccaatcacatcctcccccttagttccccagagagctgtgtacacaaagaacaaaaacattatgagagtcaagatccagagaagctctcttatctcatgaattgggcctgtggttagctgataaatggaaaacatcattcagagaggggaatcctaaaaaactatatatgcaaacccaccttagtcattttatttttatttaaaacacataaatgtatacttagtaaaaatcacttttatgcttttaaaaaatgctaattttaagttgaagaaaaaagtatgatatttacaaatcttttttttttttttttttgagatggtataattctgttgcccagattggagtgcagtggcatgatcttggttccccgcagcctcaatctcccaaactcaagcaatcctcccacctcagcctcctgagtagcttggaccacaggtgcatgccaccatgcccagctaatttttgtattttttgtagagatggggtctcgctatgtatcccaggctggtctcgaacccctgggctcaagcagtctgcctgcctcggcctcccaaagtgctgggattatataaaaatcttttttgcataaaccatacccataatgtgttgtctatgattttttagttttggtttctttaaattggaacaaggatttcaagacatctgtaaagcagtctaacagcagaactcttgtaaattttaatgggaaatttcccaatgttttacatttgtttcatccatgcctggttctatagcaattttggttagcaaattgctttaattttttccaaagctttcaacaaaatttttatttttaaaaactcagtttcttttagtgcttatattttattggtttttattttatttatttatttattttgagacagaatttcgcttgttgcccaggctggagtgcagtggcacaatctcagctcactgcaacctccacctcctgggctcaagcaatcctcccacctcagcctccagagtaaatgcgacaacaggtgcccaccatcatacctggctaatttttgtatttttagtagagatggggtttcaccatgttggccaggctggtcttgagctcttagactcaagtgatccacccaccttggcctcccaaagcgctgggattacagatgtgagcctttttgttttgttttgtttttttgttttgttttgtttttgagatgtagtctcacactgtcgcccaggctggaatgcagtggcacgatcttggctcactgcaacctccacctcccagattcaaatgattctgctgcttcagtctcctgagtaactgggattacaggcgcctgccaccacgcccagctactttttatatttttagtacagatggggtttcaccatgttggccaggctggtcttgaactcctgaccttgtgatccacctgccttggcctcccaaagtgctgggattacaggcttgagccaccgcgtccagccccagcccagtttttataatatttaaattacttacaataacatgtacaaatgacacatacaggtttggaaacaaaagcaaccttgactctaacaatggctcttaagttttagcgtgcctcagaatcacctggagggcttgctcaaacacatattcctgggtcccactcccagaacttctgatcagtaggtctgggatggagcctgagaatgggcattactgacaagttctcaagcgatggttgatgcagttggttcacagaccacactttgagaaccaatgtttataagaatacatctcagtcaatggaaaaagtacacaggtgtcctagagcccatgtgttccaccaaggctgctttatcagcatacaacccagccaatgtgaggcgtgtacaggtgttttaaaacacaggtgttctaactgccttgagtgtgtagcatgccctgggttatcaggattcatatggtcagagggaatgaaagcgttgcttgatcaggagttgcttaaggagtgatcagttaaaagagcatcttagtacaacttttttcttgaaacacccgagccaatttggatactctattctataacattctggaaaaggggaaagtttggagtatgtggcttagattcaaagcctaagccaagccttcaacacctctctaaattattacattagtctaaattacggggccagcataattatgggatatccctctgagagacagaaatggccgggctcagattataccccatggtgtaagagaggacattcaagagaaaaggtagagtgtgagtttctgacttttaggtatagagacctgaccactcattgttgcagcaccatcaatgtcctacaatttggaagtcagatcagcagctcctctctttgtaggggatactaagaagtgggtggccatagataggactggctgactgatggcaggcacccatatccaggattgggagattttcatcatggtgaatcaagcccagcatgaggaagttgaagctggggattgttgactgctaacacgggcccaagcaggctctggcatggccaactcctgtgacaaacagactggaccgtgtgccagggtttagccttcctcgatctcagtgttcccagtgtcaccattgattcttttgatgatcccttggttcttgagaaatgagaaatgaactattagaaggatgtggtgctagctcagtctttatgttatgactcaactctagcaaccagctgatatccaatgacgttgagatcctgagatgacatgaatgccctatccccaacataatggcttgtgaattaaacctgcaaatactaggttctactagaactctttagggagctgaagttacaaaaacaatatttagactgaaacttttttttttttttgagacagagtcttgctctgttgcctgggctggaatgtagtggtgcaatctcggctcccgggttcaagcagttctccctgcctcagccttccgagtagctgggattacaggcacctgccaccatgcccagctattttttgtatttttagtagagacagggtttcgccatattggcaaggctggtctcaaactcctgacctccggtgatccaccctcctcagcctcccaaagtgctgggattacaggcgtgagccaccatgcctggcctagactgaaacttaatgaaactttgaagcaaaagaataaacgtaacacaggttattaccctttacaaatcttcagtgtccctttgcatctttttattgctatgctaaatatgtcattatcttctccatgcatggttttgctttttaaaattttacatatgtattacttttgtagattctatttccttgttattatttacacacttttgatattaatataatcctaaaacattgtagggagtacttttttttgaaaagggactggtcttaagctcctgagctcaaatgattgccctgcctcagtctcccaagtagctgggatttccaaaaacttttttttttttgagacagggtcttgctctgtcaaccccagagttgaccctaggtgcactctctttttctcatttcacctctaatccaacaggaatcctgttagccccaccttcagtatttaccaggtgtattagtttgctagagctatgctgtggtttggatatggtttgtttggcttcaccaagtctcgtgttgaaatttgacctctgtggccaggcacggtggctcatgcctgtaatcccagcactttgggaggaggctgaggccagtggatctcttgagctcagaaggttgaggccagcctggcccacatggtgaaaccccgttcctactaaaaatataaaaattagccagatgtggtggcgcacacctgtagtcccagctacttggatggctgaggcaggaggatcacttgaacccaggaggttgaggctgcagtgagcagaggtggtgccactgcactccagcctgggagacaaagtgagaccctgtctcaaaaaaaaaaaaaaaaaaaaaaaaaaaaaagacaagaaatttgattcccaatgttggaggtgggacctgctggaaagtgtttgggtcgtagggacagatctcttcttataagaacaccagtcatattgaattagagcacgccaccctaataagcacattttaacttggttacttctgcaaagaccctatttccaaataaggccacattcgtaggtaccagggtttaggactccaacatgtctttttaggggacataattcaacccataacttccagaacaccactccccctcatcccctgcaacatcctggtttaagcctccacccttcctccctgggattactggagtcactttcttactggttttctactctcagatttgccctgtcagtctattcttgactcatgggtccagaaccctgcagtgactcccaactcattcagactaaaagctgaggtccttgcatggcccatgggtccctcctgactgcccccttctcatctcccacctctctccctcctccagccaccctggcctctttgctgatcctccagcccaccaggcagagtcccacctcctggccttcgcacttgctgtttgttttgcccaagataccctctcccagatatcctcacggctcgtattttagtcaacactcttcctaaccacccaccttctcagagaggcctctcctgaccacctctattacatcccacctgctacccactcccccactgaccctactcctattcattgttttgcttttctccagaattttctttatctcctaatagactatgctatttacttattttacttcttatctgctccccactcccagcatcattatccaaatatacgctccttgggggctggaattttggattattttcttacttgttctatccctagcacctaaaacaggacctggcccgtagtaggtactcaggaactaatgaatacatttttgttcattacacatatttgtgtaatgaacacatatttgtggaactaatgaaacaaatgaaatatttgtggaacacaggaacacatttgtggaactaatgaaaaatcagccagtgtattttctcatacattgttaaatcatttacccttattcaatgttcatcttattttctaggattttttgttgttgttgtaaacaatgctattaatagtttattgtatataatttcacccttttcctggctatttctttgggtttcacgtccagggtgaacattgtcaaattgccttccaaaaggatctttctcaatttataatgcccctaccattaataacgctgctgcctttctaccactgggttttatctcatcttatttttgccagtttactaggtgtaagtgcaccttgtgatgattttgatttgcaattctttaacttttaaatacaattgttcacatgttctttagtttacttcctatatcttcctatatgaattgcctgatatagactcctgattttttttgaggggggcagagaccttgggttcataactgtttatcctactcttttggggggcaataatattaatcctaattaatatctgttatcattttgccctcatcctaccattcccttttcctctgtttgcatttctaattctgaatgtgttttattctctccagctgtggactactgtgcctcagaaaaccacggatgtgaacatgagtgtgtaaatgctgatggctcctacctttgccagtgccatgaaggatttgctcttaacccagataaaaaaacgtgcacaagtaagttacacacacatgcacacacagagaaatatttgctgttactgctgtggtgactgtgaccatggaactctctcaagtatagattagcaatataattatgtcatgggggtctaataccttttgccccattcctcctctgtcaggactttcatgacttggcttaagaccatagaccactgtatctcaacatcactattcaaggaatatgatgaaggcaccatgtgtaggactgttccttcagcatctgctgagcatgctgacaatccgagcaacttacttcctgctaactcagcctgactgtgcccatcagcactaacagggcttgagatgttttcattgaagctttgtggcttgtgggctttagctctgactccacgcaagaaaatcgctgagccaaaaagaatcataagtgatttcttctggtggaccgcagtttgcaaagaactgctcatgttttgtttgagctatttagttcaattggattttaactgtatacataaaaatcagaattaatttcagctcccaaaatttgaacataaaattcgataaactaaagatgatcattagttttgcaaaaaagataataactagttacaaaaagattccaaaagtgttctattaaatataaaggtacatcaggagacttaagggattgtgtatggattattatccttctatagggaggatcacttgagaaaagcttgcttgttaagtattagggccaagcatttataaaaagtggactttaataacaatctagaatagggtaaggcacctcagagacatgcatcagtgagaaaacaggattttaattcataaaaagttcatgtacctacaacctttctaaaatgtattcactatgtaaaacaggatacatctgcacaaaacctttttcaacataaacttacttcctactcttcaatacctaaatatcagcagcttacaaacaccagagctggaggtttgggtgatgtatggaactataagggacacattaggtcaaaagcatacatttctggagccccaaccatgtgccaatagaaatgagtacggcaaggtccttaagggagaagataactgtggctgagtcttggaggtggagctgtcattcactaggcagaaaagggtgaggtgggggttccaggagaaggaaagaagttgaagatgtgaaccaagcagagaactgtagtctccatgccccgtgcatgactggcatatacagtggtttatttgttttgtttattgaaagagtaagtaaatgaatgagtgggctgctgtgtttgtggtctcccttcccttctgaatattctgaactgtaaaatagcagcctgtgctgtcgtcgtggttggggagttgtggttgttgggctgatgagtcagtgttcctcatcaaagaggaggccgtgggctgccagcagcgggccttggttctaatcccagcttctctgctttttctcttggtgatcttgggcaagttacttatgcctcagtttcctcagttacagtacaggatgataatgctgcctactgcatagcattattctttccttttttttttttttttttttttttgacactgggtcttactctgtcacccaggctggagagcagtgatgtgatctcggctcactgcaacctccacctcctgggttcaagcgattcccccacctcagcctcccaagtggctgagactacaggctcgcaccaacacacccagctaatttttttggtattttttgatagcagtggtgtttcaccatattagccaggctggtgtcgaatccctgacctcaagtgatccacccacctcagcctcccaaagtgctgggaatacaggcatgagccacagcacccggccatagcataatcttgaatactaaatgaggctgggcacagtggctcacgcctgtaatcccagcactttgggaagagaagcaggaggattacttgagcccaggagtttgagaccagccctggtaatatggagggaccctatttctacaaaaactgttttttttttaattagccaggtatggtgacaagtgtctgtactcccagctacttgggaggctcaggtgggaagatcactagttgggcctgggaggttggggctgtagtgagccatgatggcaccactgcactccagcctggaggacacagtaagaccttgtcttaaaaaaaaaaaaaggctaaaaagggatgatgtgggtttcaaagactttatttattatcattatgtttttttagaaataggatcttactctgtcacccatgctggaatgcagtggtgcaatcctagctcattgcagcttccaactcctgggctcaagcaatcctcccacctcagcctcccaaagtgctggaattatggtcatcatgagccaccacacctggcctccaaaactctaaaaaaatgagtatttaactgtgcatataccacgtgcctgggctacatttaaaggtgcaaaaaacattcaagatttccactgcaagctggtgagggaccttagccatagccacactgagtagctgagtcatggtgccaggagttatgtgaccaagggcctacagtgtgatgcagccaggaccacagcaggagttagaggaaggagaccagttagaccagaacaggtgagatgctgccttgcagggatgaggactggagaaaaacacatatcctagccagtctcctacctgcctctccagactgcacacactggctggggtcacctgatttccaccccagcaccagccctagttcccagagtggcaccatcttccccaccctgtggctcagcatgcctcctgtcccagatccccagcccagggtggtgcaggcaaggagggtgttggagccctggaatcagaccctggaagtagataccgcagcatagtgggactgggagaggaggtttggctaggagccacgggaggggctgatccagctgtgaggtctcaccagctaggcagcgagcccagcagtgcagttgtcagaatcaagatccagaagtgggccgccccaatgcgtgtgcagggaagagtgctgggagactggagggttcgtgcaggcagcctcagggcagtacatcccttagaagagccctcttcccaccatgcttggggtgggcaggagccagacccaggaggagggagacaagaggaagaaaggagacagagtacttggaaagctaagagtagaaaataaggcaaaagcccagtcgtaagaatgaaacactcaggagtgctccagatctgtggcagggacaagaactgagaaatagagactagttaaaattacagaaacaggatagaggcagaagctcagaaccgaagcagccaccctgttttagtgagtaccaaggcctcccaccagcttccagccaagtcggcctggttactgctgtgatgttgaaagatttttttttaaaattctacttcttatacacttgcaaaaaatgaaagaaactcagtttctcaaatttcagcctatatttttaaccaaaagtatatttgaaagcgaatacaattagtaagtgtgcaactattatctcaaaaaggtagactagtcaatgtaataaaccaagcatggttaatttatgattaagcaaaaatgtacataatagggctttatgttcatgaaccagtactataatttgaaatatgtaagtggtgttcaaaaaagcaccacctttatatcaatttcttaccctagagcagcccatccaaatctagacgggagaaaggtggaaacacacaggtaccatcagtttgcaaaaagttagcaagacttttctttttctggtattgttataaaacatacataatagaaaatttaccactgtactcattcagtggcattaaatacactcacattgtgaaaaacgcatatcctagcctgtctccttcctgcctctccagaccacaccccctggctggggtcacctgatttccacccagctgtaactatcctcaccatccatctccagaacttttcatcaccccaaactgaaacgctgtacccattgaacaataactccccattgcctgccctgtcaaccaccattctactttctgtctgtgaatttcaccactctcggcacttcatgtaagtgggattatatggtatttgtcctttgccgtctaacatatttcacttagcataatgtcctcaaggtttatctgtgttgtagtatatatcagaatttccttcctttttaagactgcataatattcaattatatgtatatatcccattttgtttatccatctgttgatggacgtttgggctccttccaccttttgcctattgtgaataaagctactataaagatgagtgttcaagtccttgctttcagttcttctgggtttttatacccagaagtggaattgctggtcctatggtagcaagactttttgagatctagattgaaacccttattcttgagccaagcatgagaaagaacactctcagatatccagggtcttttcaccagaaagatctatagaggacttcagtctgctggacagggattcatgtctttggtagcaaggagactgtgggctttgagtctaatgcttaatcatctaatgcctgtaaggatgaataaaggcaattgcggacaccatcttttgcatgttgccatttattattttcgtgcttggaggtcattatactcattgtttttcagtctccagtaataacttggttgacatttccatccttatttttcaaataagaatgctttgcacagagtaaggcactgaatgaatatttttgtgtttgcactagaaacaaaacacagaaggaagtaaactttttaaagtagagatggggtctgctatgttgctcaggttggactagacctcctgacctcaagtgattctcccagcttggcctcccaaagtgctgagattacaggatgagccaccattccggaaataattttatactgaatcagcaatagaagaactacaaagtatcggttgtcaggtttcttggccagagcatagttaacatactgagtgccactaccttcctacagcctgtaatatgccacttttgtgactccctatgtggataaatcaaacactttcagctggaagaggctttaaagttcaacctagttcttgcccaactatccatcctacaatattctcactgtgccatcatccaacctgcatttgaatacccccactgacaggatattcactataccccatggtagttcattccactttgtatagctctgactcttagaaagtgattccctagactgagctgatatctatttccttgctcttagaaatgaacaaaacaaatttggctacttgcgttctttgtggccactaagagtgagtcatatcagagtaactttatttcacttagtagactagccaggcatggaaaatgtagtagtgaccatctaaattttaataggcatttgaccaatttgtgtgtggaggaatttgtgctcaatgaatgattggttggtttgtaactggccgaatgtctgtaaccacaggatgctaattgttgaactgagatcctcctagaaggaggtttttaaacagcttgctgggaagaagccttatggagggatgagagctatcttccattcatagggtcccccgtgtttcttcatggtgtgcaatgtgtatgtatctaaactctcaaaaacacactccagtaagagtaataccaataaccttttattcattccacaaatatttgttgagtatctactatgtgtcagatatgattgtagacactgggcatgcagtaataaattaaacagaccaaaaagaaaccccaccaatatctgtccttatggagcctacattctattggagcaggataagagaatactacaggtctcaacagcaaagtaatactagtctttgattaaagatttgaaggcagtgagagaaggaggaaacctttgaggcagaggtagaaatgaaattctatgaaataaaatgatctgtgatactatcacacagcaccagtacaaaatggatatgttttagtccatttgtgttgctataaaggaacacctgagactgggtaatttataaagaaaataaggtttatttggctcatgattctgctggcgggaagactgggcatctagtgaaagcctaaggctgcttccactcacagcgggaggtgatgtggagccgacctgtgcagagatcacatggtgagagaggaagcaagagagaaaggatgaggcggtgctctttttaacaaccagctctcatgagaactaacagagcaaacgtactcattactgtgaggacagcaccaagctattcattagggattccccaccatgacccaaaaacctcccattaagccccgcctccaacactgtggattaaattttaacatgaagtttatgggatcaaacatccaaactgtagcagatatgcacacctgaagctatatatatttattgtttttagcaatgttccctgattatgttcttctccaaatcacaggacacttcccacattgttcttttttgtatattatttgggccgttttccatggcaactagtttcacaaagtacaaatgtacaaatgtgtacatttatttttagtactttttctgattacaaaagtaatacaggttcattgagggaaactggttcctatagaagtgaaattctatgaaataaaatgatctgtgatactaccgcccagaaaaaaccactgtttttgtgtttgttttgctttttgagatgggtttctcaccatgttgcccaggctggtcttgatctcctgagctcaagcagtccttctgccttggtctcccaagttttgagattataggcgcacactactgcacctagctgataaccattgtttatgccaatttggaacatttctctccagtctttttttaatgtatgtgtatggatttatttttatagagttgagatcatgcagtataataataaatcataagcattttgacatgtcacttaaacgttatcaaaaacattttaatgtctgtgtaaaattctattatatgtatatgtcagaatgtgttcaggtttttttggctgctcaaataatattgtgataaacattcttatgcttgaatctttttttctgatcattttcttaggaacacaacaaaaaaggaaatttattgagtcaaaggcaattaacattttaagtcttttgatacatattcaaaattattttctaaaaacgttttaccgatttatactctaccatcagtgtttaagggggcaatttttatttttaaattaaattaaattatttatgatttcaataggtttttggggagcaggtggtgtttggttatatggacaagttctttagtggtgattctgagatttttggtgcaaccatcacctgagcaggatacatagtacccaatgtgtagtcttttatccctcaccatcctcccaccccaagtccattgtatcattcttatgcctttgcatcctcatagcttagctcccatttaaaagtgagaagtgggatatttggttttccattcctgagttacttcacttagaataatggtctccatctccatctaggttgctgcaaatgccattcttttgttcctttttatggctgagtagtattccatggtgtatatagacactgtattttctttatccacttgttgattgataggcattgggactggttccatatttttgcaattgcaaattgtattgctataaacatgcgtgtgcaagtatctttttcatataatgacttaatttcctctgggtagatactcagtagtgggattgctggatcaaatagtagatctacttttagttatttttttttgagacggagtctcgctctgtggcccaggctggagtgcagtggcgcgatctcggctcactgcaagctccacctccagggttcacgccattctcctgcctcagcctcccgagtggctgggactacaggtgcccgccaccacgcccagctaatttttttttttttttgtatttttagtagagacagggtttcatcgtgttagccagggtggtctcgaactcctgaacttgtgatccgcctgccttggcctctcaaagtgctgggattacaggcgtgagccaccacacctggcctacttttagttctttaaggaatctctacattgctttccatagttgttgtactagtttacattcccaccagcagtgtaaacggaatttgtccatttcatcttaacacatggacacgtgatagggagcaacacacaccggggcctgtagcaaggagtggggagagggaaagcatccagaagaacagctaatggatgctgggcttaatacctgggtgatgcgctgatctgtgcagcaaaccaacatggcacacatttacctaacaaacctgcacatcctgcacatacaccctagaacttaaaataaaagttgaaggaaaaaaaagtgtttcttaagggagcaatttttaaaaatgttgctgattttctaggagaaaatttcttcttcttgcttttttatcatgtctttaatacctgttcttcataaaattatccaattatatatatctaatttataaatgtatgtttattggtgttattatttgattaatgaatattttccagtataagtgattgtaagggactcttacaaatttcatgaagcaagggactgtgcctctttgttcaacactgatcctagtgcctgtcccatggtaaatgctcagagaatatttactgaatgaatgaatgaacagggaagttaacatgtcttcatatattagacattcaagagagagggaataataaagatctgagctaaaataaaaggaatagaagacataaatcaatagagataattggtaaaaaccaaaatgtgttttttttagaagattaataaaattgataaatgtctaaccagactagtcaaggaagaaaaaagagagaagacacaaattactaatatcaggaatgagaaagtggacatcaatacatatcctacaaactttgaagcataatacaggccaagcatggtggatcatgcctgtaatctgaacactgtgggaggccaaagcaggaggatcacttgaggcaaggagttaaagaccagcctgggcaacatagagcccatctccaccaaaaaaaaaaaaaaaaaaaatatatatatatatatatacacacacacacatatgtatacacacatacatatatatatatatatacagaaaaatcataaacaagtttatgccaataactatgacaacttagatgaaatggacaaattccttgaaagacacaaactactaaagtttacccaagaataaatagaggctgggcatggtggctcatacctgtaatcccagaactttgggaggcttaggtgggaggattgcttgagtccaggagttctagatcagcctgagtaacatagcaagaccccatctctacaaaaaataaataaattaactgggcatggtggcaagtgcctgtagtcccagctactcgaaaggctgaggcaggagggttgcttgagcccaggaggttgaggcttcagtaagccacgatcacaccactgcactccagcctgggcaacagagtgagactctctccccagaccgaccaaaaacaaaagaatatagtctgaatagatctctatctattaaaagaaatggaatttgcactttaaaaccttcccacagagaagacttcaaacctagttggcttaactggtgaattctaccaaaaatttgaagaaaaactcatactaattctacacaaattattccaaaaaattgaagaagaaagaacaattttcaactcatcctatgaggctatcagtaccctgatacccaaaccagaaaagaaagacataaaaaaagaaaactatacacaaatatttctcatgaaatacctgcaaaagttatttaaacagtttctagcaatcaaatttaacaatatattaaaaagtacaatacatcacaaccaagtgggatttattccaggaattcaaagttggcttaacattcaaaactcaatcaatgtaattcataatattaacatattaaaaagtcaaaaccatatgagccatctcaatagatgcagaaaaggcattggataagatctgacattcattttttctttaaataaactttcagcaaattaggaatgaaggtggccaggcgtggtggctcacgcctgtaatcccagtactttgggaggccgaggcgggcggatcatgaggtcaggagattgagaccatcctggctaacacggtgaaaccccgtctctcctaaaaatagaagaaattagctgggcatggtggcaggcacctgtagtcccagctactcgggaggctgaggcaggagaatggcgtgaacctgggaggcagagcttgcagtgagccgagatcgtgccactgcactccagcctgggcaacagagcaagactccatctcaaaaaaaaaaaaaaacggaatgaaggtaactgcctcaatctgataaagtgcatcagtgaaaaaactatcagctaacatcatacttaatagtgaaagacaatgctttctttatcagatcaggaataaaacagaatgtccactcacaccactgctatttaatattgtactggaagttctagccagtgcaataagacagagaaagatcaataaatggtacctagattgttaaaaaaaaacaccatctttattaacagataacctgatcacctgtgtagaaaatccaatggaatctattaaaaagctactagaactattaatagcaagtgaatttatcaaggttgcaggacacaagatcaatatacaaaaataagttagttttatgtacttacaatggaccatcaaaatatgaaatttaaaaaaataccttttcaggctgggcacggtggctcatgcttgtaatcccagcacaatgggagaccaaagcaggtggatcacttgaggtcaggagtttgagacaagcctggccaacatggtgaaagcttgtctctactaaaaatatgaacattagccaggcatggtggcaggtgcctgtaatcctagctacttgggaagctgaggcaggggaattgcttgaacccaggaggcagaggtttcagtgagctgagattgcaccactgcattccagcctgggtgacagagcaagactctgtcaaaaaaaaaaaaaaaaaaaaaaagacaagccactcaataaaaatgggaaaaatatttgaatagaaacttcaccaaagaatatatagagatggcgaagaagcatatgaaaatatattcaacaacattagtcattaggtaaatacaaagtgaagtcatattgagataatcatacccactagaatgactaaaattaccaagtgatgatggggatacggagcaactggaactctcataaattgctggtgggaatgtttaagcagttaagcatacatgtcccatatgactcattcattatgcaaaaggaatgaaagcatatgtccacacaaaaacttgtgcattagtgttcatagctgctttatttgtgatagccccaaactgggaacaggtaaccagcccttcagcaagtgaatggataaacaaattgtggtataatcacatagtgaaatactactctgcaataaaaaggaacaaactattgacacacatatgaatctggatgaatctcaaaataattatgctgaatgaaagaaaccagacaaaaaagaatacatactatatgattacatttatttaaagttccttggggagataaaaaaagaagataaaaaataaaattctagaaaatgcaaactgatttatctggatagaaggtaaatggttatttgggactggagagagtggggaagaatgaattagcaagagacaggaggaaagttttgagagtaatgcatatgcttattattttgattgtggcgatggtttcatggcaggatacatatgcaaaatgcatcagattgtttttcttgagtatgtgcagtttggtttttgtcaattatacctcaaaaaaactaaaaacaagtagaagagactgtattattccaaaatttctatgtcataaaacacaaagagaggctgtggaaatgttctggcccatcactatcctatgggacactctggttgatggaaattctctgtttgcatcatacaatacagtagtcaggagccacacgtggccactgagcacttgagatacagccagtgcaacccagtaactgaatttttgtttcgttttgttttgtttgttagagacaggctcttgctttgttgcccaggctggactgcagtggtacagtcatagctcatagctcactgcaatcaccaactcctgggctcatgagatctcctggcctcagcctccctagtagctgggactacaggcaggtgccaccatgctcagctaacttaaaaaaattatttttctgctgggcacagtggctcacgcctgtaatcctagcactttgagaggccgaggcgagtggattgcctgagttcaggagttcgagaacagcctgggcaacacggtgaaaccccgtctctactaaattacaaaaaattagctgggtgtggtggtgtgtgcctatagttccagctactcgggaggctgaggcaggagaattgcttgaacccgggaggcggagattgcagtgagctgagatcgtgccactgcactccaccctgggcagcagagcgagactctatctcaaaaaaaaaaaaaaattcttttttcagaaatggggtcttgctatgttgctcaggctggtctcaaatttctgggttcaagcaatcctccagcctcagcttcacaaagcattgggattacaagcatgagccaccacccctggctgaattttaattgttatttcattttaatcaattttaatttaaatagacatattaggcagcatggttctagattaagggagactaagcagatatgaaaacgagatacaatctctgaccctagactagatcctgtactggaaggtgaaaaatgctatgaagaacataattaagtcaactgacaaaattagaatatggatggtagattaaatataagtattgtatcaatgtaaacttatgaaatttataaccatactgcagttatgtaagagaatatccctcctcttaggaaacacggactgtttttaagggaaaggaccagaatgtatgtaatgtaccctcacataggtcagagagatgaccaagtaatcacaggaatggggtaaaatgttaacaaaggtgaatctgggtaaagagtatttaagtgtttcttgttttatttttatgtttgtaactttttgtaagcttgaaattgttttcaaagaaaaagattttttaaatgcctttatatatgactatggtattacaattatattgtttataaagactcccagtgttttaaagctacattatgaagcatttatggacaaaataatacaatgtctgggccaggtgtggtggctcactcctgtaatcccagcactttggaaggctgaggcaggtggatcacgagatcaggagttcaagaccagcctggccaagatggtgaaaccccatctccactaaaaatacaaaaattagctgggcacagtggcaggcgcctgtaatcccaactacttgggaggctgaggcaggaggattgcctgaacctgggcggcagaggttgcagtgagccaagattgcgccactgcactccagcctgggtgttagagtgagactccatctcaaaaaaaaaaaaaaaaaaaaaaaaattactcaggcatggtggcatgcactggtaattccagctactcaggaggctgaagcaggagaattgcttgaacctgggaggtggaggttgcagtgagcctagattgcgacattgcgcttcagcctgggcgatggagcgagactctgtctcaaaacaaacaataataataataataataataataataataacaacaatacaatgtctggggtttgcttcaaagtaatgtgggatcttactatagagagtggggacatagctgaaagccaagcagccatagattgattctcctgaagctgggtgatatgtacatggatttattatactactcagtccatttttgaaattggacattattgtatattttgcttaacatttccataagtttaaattgggaaaaattggcatctcactcaacattttttcctttcaagaatattgtatatctttcccttactcagtttgtttcctctggtatggactgggaactctcatttataccaaattatttgttaggaagattatttatgcagttcaaatgttccttaaaataataaaaaccctcatcaaaacaaagactccttttaagattccatcagtggtcatttatttcaagcaattttaaacaatgtgtccaagttccactatgggaaaatattttgctcagattctgcaataaaagtttctttccatatttaaaaatacttatacaaaaaatacaaaaaaaagaaaaagaacaaaaacaaaaaaataaaaatacacaagtaaaatttcattatgaaaaatttcatgaaatacttttaaaaaaatattttggtttaaattaatgtatccctagagatcacattctctgtgaatcttgaggtaaaaatcctatttatgtgcagctgagcccaatgaggtaaccaggaggtgttttgaactcagagtatttatgcctttcactcctaggccttatttttcccaggatatgattttgtgtcttattgtttggctcattgtttgatgggtttaagtggtttggagtttggctttgggaacgtttaattgttttaattgcttaaattcgataaaacactcagctaaaccattctcagcctgcagtctggcaaataccccatcttcattttagtggctcttacatgaatcaagacaaggaaagcatgttcacaaatttgtttgttgcataaacgttttgtaatatgtcaggaagtttgtctttgcctagcagaagagtccaggtataataataataataatagaagaagaagaaggaaaggaagagagaaagaaagaaagaaagaaaaagaaagaaagaaagaagaaaggaagaaaggaaaggaaggaaggaaggaagggagagagaggaaggaaggaaagaaagaaagaaaagaaaagagggaaagaagaggaggagggaggggggaagagggaagagggggaagggaaagaggaaggagaagggggaggaagggaaagagggaggaggagggaagaaggagaagaaggaaagaaggagaagaagtttctcttaggagaggccatatctctaaacatggaagtagctttattgggagaccccttcatggtgtgactctttgaggtgtgggattttacctgtttgggaaaatgaagactggaaatccctggttttcctatgctagctttattgattggtttgccattcttgtgatttttccttcttgccagagatagactactgtgcctcatctaatcacggatgtcagcacgagtgtgttaacacagatgattcctattcctgccactgcctgaaaggctttaccctgaatccagataagaaaacctgcagaagtaagttacagtgggagttggagaagggcttgttctgctaaatgctcctctagttagttttcctttccgtgcaaatcttaagcaagatgtgcttgtattcagcattgtgtctattaacattattctcccctttattttactttttggctcactagatcctattatgtggatgatttttaaatattgaataggtctggccattagattcaattagccaagtggacccaagctgaagctcccacctatgtgaaatgcaggtgcagtctccctcccccttattcccatagcattggggtcttggaaaaagaaaagaatgggcccagagatgagaggtagaaggagttggtttcttctactcctacaagataagacacttgacggatgctaagagggaggacattgcagctttattccctttgataggaaagaagaagaaaaatgagactctaggacatcccagcaatattcaaggggtacagggtgtcagcgggttgatattgtggatgtactgagtgcctcaaatgcctgtcatctagcacatcaaagggcatgattggggatctgagcacaggccccagagggcacctgcttaagacaaaccattcctgagagactgctagaatggacggcccacaaggacagagacgattatctttttctcgctgctgaattctcaaaagctcaaagagtgcttggcactcatagatgtgcacaatgtttgctgaatgggaatgagtaagtgaatctttctatgatgtatcatcctggagaaattgaagctattttttttttaattcttcaatcttgttagaaagatagccttttttaggcgtgcaagttgtgaattttttttcagaaagtctttccctagttagtccacacttatgcacactgaattgtttggggtctgctgacaatgtcattcgtagaactctctggagcttccattgagggatgtaattttctgtatgttccttcacccatttcttcctgatggtgtgtacagcagtgttctgcctggcaagactgcgttttgaaaggtttcacatatatcttttttgaaaagcaccatgagctatttaactgaatccagatgagtcacattctgctcatagcacagattaactttcatactcattctagcaagtgctaaactgtgtatagtggcagatggttgcaaatcctggattttgaaacggagcctgtcttataaaactattctcactgccttgtgagggtacaaaccctgcacacattcaagcattaaatgaaaattttaatggagagcattcagaatgtgaaaacaattagataagctatttttcataagaccacacatgcctgcaataggtcagagggccaacttttctggtctggccactcctctgtgctatttacaccttttgctaggagtgggtgtgtgagggactggctgcacccaggggaaatcactcccaggtggactcaaatttgcagacccaaagctcttcagtgggcggtgattagatctggttcagctcagatgctcattgcaagcttcctcatgtgttactaatggaggggaaaaaggaaacaagttaggcttggggccatgggcggaggacattttcttgacgttctgcatgtcttaccaaccatctgagtcccttaatttctgctactccctccacacccttcctggagaggcacttggaataagagaagatccaatgcaatgcaggcatcattatcatgggaaggagaagactgagaaaggaagagcgagtagagagggagtgaccgttttggagtggtctgagcgctacagattggtccccaggtgggcctgtttgcaagcaagctgtggccccgaccagagtccctaatgctcatccatgtatattcagtgggtatagcccctctttagccagggttcttactttttcatccaagaaaaatgaaatttgttcctaaaggccagtgtcctcatcagccctcgcccaacgtcccgcctcatcgttacattttccattgtctttgctgtgaacccaaccctgactcctgaggtcagcctgcaggagcggcccctgacttcatgcttgcactcagtccattagggcagacagctgtaaacggaagcgagtgctcactgtctctctggagcattatgtggatgaaggaagccaagaaattgggtttaaaaatctggagtccgttattagaagcctgaggtctcttgagtgatctgagcattacaaatcttcagcccaggatacagccatttacgtttaataggaggttgatggatgtgggtaattttcaaatctaatatgaaatctatttttaaaggaatttgatgtcatcgaaattaaactgggggaaaaaagatcaaggcagaatcctactgaagaaaagattcttggccaggatttgttcttgctcctcatctgggcacaatttctcctcatggagagtgctatcatcagtttaaggcatgaattattaaggcagtagtgcaaagcacagaaactgcgactgccttgcctgcccaggtagagccctagggccaaatcagatgtgggttcatcccctgtgctgggctccaggatccctgattctggtaccatgatgagtgctctcaaaaattggtgtgaagcccacgggttcgactgagccaagagacgtgacgtccaggcttggcaatgtcactcatattggttatgtgaccctgagcagctactttctacttctcaggacctggatttcctaaactgtaggaacaggacttcctgccttaacaccctgttgcctctccagtttttttgaaacttactatctgtgcactcagctggaatcaaaatgtactacctggggtcactgatctttcatggtttcagtcttacctgctcagggctccaactctttcacaagttagcactcagaaagatcgtttgatttgttttctgacagtcctgtcatctgacctcacagagctttagtggacactctgggccttaccagattaagttgtgtccatcctgtgggtgccatgtcagagcacctatcatggtaccagatataggatgcacagtaggtcctcaataaatatttagtgaatgaataagtgagtgagtgaatatctgagaagcacacacatgaggaaatatgacaaaagggtggtgagaaggcaaagagccactgttaaacgtctgctaaaaagaaccatttggagaaggtttttttttttttttttttccagacagaatctcattctattgcccaggctggagtgcagtggagcaatcttggctcactacaacctctgtctcccaggctcaggtgattgtctcacttcggcctccctagtagctgggactacaggcgtgcaccatcatgcctgactagtttttgtatttttagtagagacggggtttcaccatgttgtccaggctggtctcaaactcctggactcaagtgattctccctcctcagtctcccaaagtgctgggattacaggcatgagccaccacgcccagccgaaaagggtggtatttgaatagctgcctgccagattgctgggtgataacctctttaagaatctaaatggttttcagttgaattatctcatgtgtaaatcattctttaaaaaaaaaatcttgctgggcgcggtggctcacgcctgtaatcccagcactttgggaggccgaggcgggcggatcacaaggtcaggagatcgagaccatcctggctaacacggtgaaaccccgtctctactaaaaaatattaaaaaattagccgggcttggtggcgggcgcctgtagtcccaactgctcaggaggctgaggcaggagaatggcgtgaacctgggaggcggagcttgcagtgagccgagatcgtgccactgcactccagcctgggcgacagtgagactctgtctcaaaaaaaaaaaaaaaaaaaaaatcttgcttgaaacattatttactaatttattttaattttttaaaaatgtttttctttttatatttttattgtatgtgctgctgaagcgagagcttcagcatatttttttatatttttaaaattttaaaaatttttttttatatttttaaaattgttacaacatagttgtacctctttttggtatttatttattttttaaaattgacataaaaattgtatacttgtatacaatatgttgttttgcaatacgtaaatataaatttttcttaaagacaacattggcttttttagtgtggcaaaatatatataacataaaatgtaccattttaaccatttttaagtatctagtccagtggtattaagcacattcacattgttgtgcaaccatcaccaccttcaatctccagaacttcttcaccccaaactgagactctatacccattaaacaataattccccagctcctcctcctccatctcctggcagccaccaatctactttttgtctatgaatttgactattctaggtgcctcatataagtggaatcatagaatatttgtccttttgtaaccagcttatattgcttggcataatgtcttcaaggttcgttcagttgtaggacgtgtcagaatttccttcctttttaaggctgaataatattccattgtatctatacatcatcctttgtactcatcctttgatagatccctgggttgcttccaccttttgacttttatttattaatgcagctatgaacttgggtgtgtatacccagaaatggaattgctggatcatatggttaattctatatttaattttttgaggaaccgccatgctgttttccacagtggctgaatgctgggttttaaaaagagagttgactaaagatcatttcacctttccctgatggtgtaatggagtgattcctacaggcagtagactgcgggcccttcctgttctgtgtttgtctgtctgtctgtgactggtgttttattgccaggcctattttcctccatcaaagctcttggcttgtttcctggcactcagttatggcctgcacaggtgaggctgctgatgagtttcaggtagatgaatagaaactgcacacagctaacaatatcctgcctctcctcacatgggagtgagctccagagagagtgccaagggtcagtgacacagcaaggtgatgtcttttcttctacaccagccctgcatgttgtgaccttctctccatgcactctgtctgcagccattctgctcatactctgggcatgaagcaagctccagccaccagtcacctgggagggcacgtcacggattctttttttttttttttttttaattttttaatttttttaaagacggaatctcactctgtcacccaggctggaatacagtggcgcgatcttggctcactgcaacctccatctcctgggttctagcgatcctctcacctcagcttcccaagtagctgggactacagatatgtaccaccatgcctggctgatttttgtattgttagtagaggtgggctttcaccatgttggccaggctggtcttgaactcctgacctcaagtgatccatccgcctcagccttccaaagtgctgggatacaggcatgagccactgtgtccagccagatcctttaagagaccctttgaggggtccttcaggtctgggtcccattcacatttccatttttactagcagtggatcttgatcaagttattaacctcgctaaacctcaattcctcagctttgaaatatggataacaggccaggtgcggtggctcacgcctataatcccagcactttgggaggctgaggcgggtggatcacaaggtcaggagatcgagaccagcctggccaatatggtgaaaccccgtctctactaaatatataaaaattagccgggtgtggtagcgggcacctgtagtcccagctactcaggaggctgaggcaggagaattgcttgaacccaggaggcagaagttgcagtgagccgagatcacgccactgcactccagcctggatgacagagcgagactccgtctcaaaaaaaaaaaaaagaaatatggttaacaatcacacatatcttgcagggtcaaatgaagttatgtttgtaaagtggttggcacagcatctggcattcagcaggtatttaagaaatggcagcagctatgatgctatgattatcatcactaatgtaactatcagactgccactaatagtgagaaaaataaagatggcatggtccctgctcgtggaactcagtctagtgaaagaaacagactttgaagcatcacagatacaaaacatactacataaccattgtgatgaatgctacgaaagagaggtcctgtagaaagaactgacttcatctacgaggtcacaaaagatgacaaaatgatgttgagctgatcgtgaaggaagatagaggttagccagtgcagcaaggagccactgagacaagagggtgatgtgtcatatctttaagtgatttgtggatgtgagcttcgtcaaataacttttgggcagatacatggtaaaaataaaatctagtcattactttatgatttcagatcatttcccctgtatcagttatggtgctttttgttcacacaaaaccggaaatccaattaatggtgttttaagtcagaaggacttttattttttacctgacaagtccaaaggtggttggtcctatggatggctcagtgactcagtgatattatcaagaacccagactctttctgtctttctattctggcaaagtatgttgcatttacattttcatccttgtcacctcttggttacaagatggttgctgcagctaccagcatcatatccttacactacaagactcaaaggcagaaaggacagagagcagagaaaagcatttctctttatacacttttgtcttttttttttttttttttttgagacagagtctcactctgttgcccaggctggagtgcagtggcacaatctcagctcactgcaacctctgcctcctgggttcaagcgattctcatgcctcaggctcccaagtagctgggattgcagacgcatgccaccatgcccagctaattttgtttttttgtttgtttgtttttagtagaggtggggtttcaccatgttagccaggctggtcttgaactcctggcctcaagtgatctgcccaccttggccttccaaagtgctgggattacaggcatgagccactgtgcctggccacctttgtcttttcaggaagaaaaatctttcttgagggcccccagtaagcttcttatgtttcattggtcagaactagggcatattcccaccccttgaccaatgactgacaaagaagaacatggttgccacgctggcttagaccagccatgactcatgcttgggggtcatggggtaatggttattggcaagacaaccaacagtgtctgccacatccccagaaaaagaacaatgctgtgcagttaaactgatccagcccagccaatgaggtcggtggtgaccttttcccgcaacaccagtctcataaagcctctccacaagctcattttgtgtccttttccagttctctatcttccctggagcctgctatgtgtggggtcttatggctttagcattttctaccaggaaaggaattgcttattggctcctggttatgacacagtttccatctgctggcagaaacacagcatggatagagtgaccttaccataggacagaattgcagtagcctggggcagcatcagagatacgcctcctccagtcccacgatactatgccagcgtggtctcaacagagcaaggcgaagcatttagatccttcttcatgaaactgccaacccctgcgtccctaaatagctggatattttgcaagatcaccttttgtttattttgccttgtgccgtccaatgtcactgtcagatgtcactgtagacagaagctctctacatgctttgagcccaagtgatcaggttaacctgagagagatactggattttcttagcttttccatctttcttggaaggaggtaggctggggagcgtggctctcaccccagctctcagctctttggccactgactcagttcagctcagctcaactgagccttggcttgctctttggccatcaaagagggaaaatgctggagaatccacaggtatacttcaggtgccaggccctcttttaaacaagctcctggagagcaggagctattttctctgtgtcctgtagctcacctggtttcctgaagatttagtgaagtttgcctgcctttccacctctactgcaaagtcttcttcaagacataaccctggccttgtcacctccaccaacattctcacctctagtcacctgtttagagccttcactgatccatcctggggcttgcaaagcccgcacgtccagtcatgctcaggtgggccagctccctctgcctcccagcctcatctctctcctcacactccagccatactcagctcctcacagctccccaggcatgcccctcgccctcatccccaggcatttgtgttcactgtcccctcatccctgggcgtttgtgttcactgtcccctcatccccgggcatttgtgttcaccgtcccctcatccccgggcatttgtgttcactgttccctcatccccaagcacttgtgttttttgtctcctcaccctcaggtgtttgcgtttgctgtcctcgagtcctcatgttcttcttcctgttgagctcccttacctatggaactcctcctcctccctggggcctcctgttggccttatctcttcttggaagaccctctcaccccaggactcagtgaggcccctgctctgtgctctgcattgtcttttagttgctgtccttgtctgactcctcaccagagcctgaacccattgaggcagggcctccatctcagtcgtcattaaatctctgaatctagctcaaggcctggcacttggctggcagacaaacgaatgaatgatccgtcccggcttgcctcagcaggcagcacccaccagccctctccatgggggctcatgggagccccgaggggctgccatcagccctgggagaggtccagagtctgaaggaaggtctgcccttcttcccctcagggatcaactactgtgcactgaacaaaccgggctgtgagcatgagtgcgtcaacatggaggagagctactactgccgctgccaccgtggctacactctggaccccaatggcaaaacctgcagccgtgagtgtaccctaggggtggggtgctgatggaaggtggggtccactcatgggggcgggcgggttcactagcaaccagttatttctggagcccaccgggtttcctgatggtctgtcaggtgtatccttccttatcctcagtttcatcacccatagaatgtgactattaatgctatcggcctagccaacttgggttgcaaggattaaaagaattaataggaataggctgggcgcggtggctcacgcctgtaatcccagcacagggaggccaaggcgggcagatcacctgaggtcaggagttcaagaccagcctggccaacatggtgaaaccctatctctactaaaaatacaaaaaattagctgggtgtggtggtgggtgcctataatcccagctactcgggaggctgaagcaggagaattactcgaacctaggaggcagaggtgcagtgagctgagattgcgccattgcactccaacctgggcgacaaagcaaaacttcatctcaaaaaaaaaaaaaaaagaataggagtaaaatacttagaacagcactgctaggcataagcactcaataaatgttaactaatattagtatttgctgttaagtgtatttactaggtcagacaggtctaatttcaaatccaacctctcccacctactagatgtgtgtgaacttgggcaagttatttaacttctccatgctttgatttcccatttatgacaaaaagcaaaactaatagtcgtattattcccacagggtttttatagggagaaataggagccattttgatatgttagcctggtgcctggcacagggtaaacttccaatcaaggggaactgttcctatcatggagcctgtgagaggggccagtgcctggcgccagactgggacaagaggccggaggggacagaccttggaaagcaatgggctgcagaggctgatctgagagcagaatcaagaaacatgggattttctgagaaggcttgtcttaattttcttgtgtcagagccacaacaaagctccactgggtgatgtaaatgtatgggaacttgcaagctctgccagctgggcggctccatggttttttatgaggcaccatctccacgggtcctggccagcaggataggagcgcctgagtgtggtgatggaccctatgcccttggcatgcgggagagggggcccatctccatgacatggcctatgcagaaggggccctttatgtgcctttccactcagcaagccccacatctgctccctttggagaaagagatagattgtgagtgaggacagtgcagctgttgagccctgggctccacgctgccagcagggaagtttcccagatgaaataagaggtccagggcagtcctcaggaaagcgtggctcctccagtgtccagagagaacaaagtgcccggtaaaggctttctaaggactgatctcagaggccaaagggcttttgaactggaaagtggtgccaaagtcagtgcctgctgtacgttgcctctgcatgtctctgagtccttttgagaggccagcggggagcgggtctcccattcaacaggagatgccctggtgaccatggatctgtgtgtatcctgcctgtttcccggagtgtcaggtctgccagctgatggccctggcaattttcccagggcaggtggtcctgacctggctgagcccacgcagatcaccagggacatggcttgactgcccctcccagcatgcttccgggggccagaagagctctaagaacggaccacaagagatcgggaccctcccttctctctgggatctagtcaactctaagaaagtacaaaccaagctgtttctgtctcgcagtccttagagaaagccacaggcttctgctttctcagaggaatcagggagcccaggccataaagacagcaagcaattctgaggcgctcactctgtgcaggcaatgccctgagcacttcccatgcataaactccctgcatcctcacagccgccctactgggcacccacattcttgtcgctatttaaacaagggcaaactgtgacacaaagggattaagtcactgtcctggggtcctgtgattaacaaatggcaacactaggatgtgaacacaggcatgtagctcccaagatccagcaagtgttcgcaggagatgcatccaccagtggaatgttctggaaggcactggtcccagactctgcgggagtcaagaggcccacttggcagacctgcaccaggcctccagtgtctgtccagtctctggaggtgcattttctccataagggaaacctgggaagcagcctgcagggctgttagtgggagctgttcaccacagctgtgtgttcattagccttcggcacttgctgcccggaggaccagctgtgcagcattcggatgccaggataggccacacatgcagtcccaggctttggtttgttttttaatctggatgtcctgataatgggggtaaaaaaaatagaaattgatttcatggagaatgacaactctttttcattttcaattagaaatgaaactatatgactaattcttactcagcactacttgataataatagtgtgttcattaagtggttgctgtatgctagctactgttctgagcgctttacataatcaacccctcttattctcaccctattcctataagaaagcaaccatcaacatccacattcacaaatcaggaaacgatggcaaagaggccgtgggactgcccagcatccatagctaggaagtggcagaggtgtgatttgaacccaggtagtttgatgccagaacctgcattctaagcactactctattagctgtgtggctttgatcttgaccttcctgagcctcactttcctctctgtgaaatgggaattgcacctgctctcagaggtgccctgagactgtggattctgtgcgccatggccctggcagagtgctgctgtcgtcaacaccagggacagcattccccagccattggagttgtatgctttacccttcaaagaaagaaatgggaaagaaggctgggcatggtgtcaggcacctgtaaccccagctagctactctggaggctggggcaggagaatcgcttgaatccaggaggtggaggttgcagtgagccgagatctcgccactgcactccagcctgggtgaaaagggaaagaaaaccaacaagccaggctgattttctagagggatcagtgatgtggggtagaatgacaccttccctgtggcttgttatgcctccggttttgtttttgaatcttggttgctggtggggtattgccccctcggctcctctatgctttcgcgtgtgtgaaaatgcaggagtggaccactgtgcacagcaggaccatggctgtgagcagctgtgtctgaacacggaggattccttcgtctgccagtgctcagaaggcttcctcatcaacgaggacctcaagacctgctcccgtgagtccctccgcgctcctctcataggggaaggtttgcaccaggagtgaaacctatgtgactgcagagggcacaggttgtacttgggcacccctcccctgccccttgctctgctccaggagatagtgaggatgtccactgggactgcatgccttcgagggagggcggggtgagcatgacggtcacttgatccaatcactgtcgcccagaggtctcactgataaagggctgcctggcttttggttttgcaggggtggattactgcctgctgagtgaccatggttgtgaatactcctgtgtcaacatggacagatcctttgcctgtcagtgtcctgagggacacgtgctccgcagcgatgggaagacgtgtgcaagtaagtgtctgaaggacaagcaggacctgcacaggtgttccgtgggtgccggtgtgggtgcgctgccgacgtgtatatgtgcctgtgtgtcctgtctccaggctttgctgggcctgcatgaatgtgtgtgacagcatctcttagccattaagccttggtggctgcttcaccaactcccctcaatcttccttcccccgtgccctgaagtggctttttgctgtttccacctccctgtcattctgaagctggacagagcccttgtcctcagctctctctgctctacccccagccagctagtatggcacatgaataataataatgtggacccctcactgactgctagctgcatgctgggcactgtgctaagcacacatgctgttgcattcaggggacagatgaggaaaaactgtagctcagattaagtaaagagcctaaggtcaccagctagtgagtggtgggttcaaactctgctggctgtgattccaaagtcagtcctgggagaagaggatgctcctgagaaacgctttgccctgctttctgaccccggtgatctcacagcacatggtgaggctggcagtgatgtgtcctgggtacatatttccttgcagctggtcccaaatcttgtctcaattaaaaaaaaaaaaattgctcccagacctccttctctcctttactgaagaatgctggtgtgtttgttgccctgaaatcctgtttcgaagtggaccaagataaagaatcgaaatatggtcattttgagagaaggaatcagaaatgaaagaaaaggaccaccatttatcttccccagcctgctggtctttctggttatagggccaagttccctgaccactggtataattgtaggcacaacctaatttatccactttttatatcatctattcatctaggcagatgagctggctgcacagctgggcgtgcctctctatgctgcctgtgagaaaatatttccagtttgggacagatccttggatcttagcaaatgggttatccatgttatagctttcggtggctccctgcccagctgcctcccagactgctgctgcagccagctcagggagggatcgggcacagggggtgcagaaagagggtgggtgtgttgaactgcatcgacattgacagcatgccaaagccagatgtaaggggtttgttggtttgtttaattctccatcattttagattattctgagaataagaggagtcattcttctgtccacctcgttcctgtaataatcaagaactgactacaagatggttgtaggaccctacgaaattctcatgagcccttctaaacaaatgcagctccatctcctttgaatcaggtgccccttcctctcccctgcccaggtccacatctggattttgacctgaccacttttaagtgttgcccattttctcatttaaagtgggtttctaaccaatggcacagtggaaccatctacatgagtaaatgtccaacaatgcaatgaatagtgaattttgttatttatatgtggttgtatctagatgagaacttgtgagatagtcagataagtgagaattgtcctcaggaaccgtataggagagatgcatttcacccaccagctgatacatatgcattgagctattcccctaattgaagactttctgcctgtcccagaatgattcattctgactgtcctgtcctgtaataatgggctaggttttcagcgtggccacagctaactgggggttgggatgtgtgttccccagctctactctcaatgacaaagggccagacgacatgactgcacctatttggtaaagccttttggggggcagtcaggcctggctcagcagataagagtgtccttggctctttatagaggcagcctccacttagagctttgatagcaagtggtcttaagaatgtgtcactcaccttctggaaagttctctgaagtgtggaggggttccaggggccctgggatgagatgggcactgctgtgcccctacctcttcaggcaccttgggttctctggcctctggagcgatgtcccctcccttcctccagccccctgaccgcaagctctgctttcccagattttccccagaggcctttttgcctcgggcagttagatgcacagactcagggtgtggggggtcggggaggggatggggcgatctcttttaccagctgcagctgcgcagactccttccctctctagacgtttccctgagattgaccttgtgcaagggcatcccagcaccaagaaagactctataggcctgatgtgcatggaccacactgcccactggcctgcaagctcctggaggttggaggtcagaggccaacatgaaatgactgggagcgtgaatggacagaggccacctgtctttttgccccacggcccctggcacagggtccgctccccgcttgataaccttcagtggctctccactgtctcccagaataaatttccattgcactccttgatttggcagagtgcagaaccccctcttccacttctttagcctcaccccaggccctccctgaagccgcctcctgttctttagccaaagtggcaagtcccccattctctgaacaggcctggtgccttccagcccatcccaatgtcacccccatgggtaacctcctctcccacctgataggctctcctctcctcctcccaccccaggctctgctggggcctctctgcagagctctcctgcccagcctcaccctggggctctctgtgcacatgtctgagaaacagtgtggcagagcagaaagagtactgaactggaagcccaaagactgggtttaaatcgtgtcgcttctaccctaggcaagggaattggccctcttggggtctgactgctcatctctaaactgagaatggtcgttgctgcctttcaaggccactgtgtggttcagggagactgctgttgcagtgctatgtgaacttgtggactgccgtgacccctaaggaattcctcttcctctctcccctcccagcatcagaaccccctgcactgaggagactcagaaggtattgctgcctggaaacccatctgccagggccaggcctgctctccttggaggggccccagagacacacaactctggaagtgggctggactcaggagtccaagggctgtcctatgagggaccctcccttctgcaagcggaggacaccaacggggatcagagccgtcagcctagggcactgggggatctctgctggtgatactcccagtccaactaccacaggcagatctgcgagggcctgttaggctgcctgaggccctgagcttggccttccagggctgaggcaggcctaggcgaggctaggggagtgtcttagtctactcgggctcccatcacaaaataccatagactgaatgttgtttcttaaccacagaaatttctttctcacagttctggaggctggaagtccaggatccaggtgctggcatggctgggttctggtgagggccctcttcttggtttgcagacagccagcacccagctgtgtcctcatattgcatgggttgtagggggtgagagagcaaaagagtgcaggcaagttctctggtgtctcttcttataagaacactaatcctatcaggtcaggatcctgccctcacaaccccatctaaacctaattacctcccaaagactccacctctgaataccctcacatcagggttagggattcagatgtaaattttgggggaaacagtctgtagcagggagtagggggaggggaccaccctcactctcatgtattcacattacaggcttgatgcaacagaaggaaactagagattttcccttattttgtgggaaacggacacatggaggaaagtgatgcctccaagctggccctggtcggggagtcagtggcagagccaggaccagagccgagtcccctgattttaggatcttttgcccagtgtgagatgccctggaaaagcacatctcagttcagctgcttcttggtttgtctgagaaaaagcctatattaagttagcaaaggattggctgctgctagttttattacgagaaaagccaggaagcagtgtaattctatctgtcggcttctggttactgtcttggcagatggccactgtggctttctctctctggggttggggttggttttaacaacgtcttatgtggagccccagacgcaggattgctgtctgtcatcacggcagaggtgcaagtccacagaacacgttgccccactgttgctgcgccacagacttacgtgactcacctgtgtcagcgtgcagggctgctagacagggaccctaaagacccgtgctacatcctaaaacttctaatcatcctgagcacacgctgcagaatccattcacgatgagggtttaattaaacacataggcctgggtccttatgtgtaaaaggaggagaatccttctttgagaggaaaaatgttttctttctccctcttgagatttcttacatcctcccacctatttcacttaagtgatggctcctaatggagtctgtctttactctcctctctgggtttgaatctaggtacttccttaagcgcttggttcctttaccctcgttctctacaaatatttactgtgtacctgcattgtgcggggtgctggggatctctggggttgatgcagattcggtttgtgccctgacagtgtttaaagcttctcggggaagaaggatagcagagacagcgtccattccttatggtgagagtggtgatgtgagaaggatggagccgtgggagcaccccctagtctagagaaagagaagtttaatccaacacccagaggagggggctgtgggagcctcccctagtctagagaaagatgtttaatccgacacccagagagtgagtacagtgagccagccagagatggaggggaaatgcttcactaggggccagagagcgaactgcaggaagttctgtgctctgagtacggggtactgaatgcgagagggaggcggtgggtgagaaacgagcctggggacgccggcgggacacatcacccacctacagccttcagagacttcctggctggcctctcttgagaaaatgatttttgtctagtttgtcttctgagaatctgccaggctgcctcagcacactcccttaagctaggatgatctgtggatgtgcagctggaccagggacacggaggtctatttgaatatagtcccatctctgcccccaggacagctaagaccagtcacctctgaaggttcagggacattgggaaagtcacttcccctctgaccatcagttttctcatctttaatgaaggggttggactagttcatatccaatgagttgaacttccagcacccaaacaaggatattgcctggctcagataagtgctccgtaaacacttgctgaatgaatggacttactgtggtgcccaccatagtctcccaggctgaagacacccagtggtactgagtcaggggtggtggctctgtttgcctgttaggggaccactgaagcattttcctataggggagtatctttgccctgggtagaaactgactccaagttggtttccagacttggtggatagaaagctagcgcctatggtcaggaggttaactatcatccacctttggcattctctaatttcccatccacggttctttgaatttataagtggcccagaacatccctgaagggcagaaactggacattttgctgaacaaatgtgagtcgtgcattttgcaaggtgggtgtgtgggagagagtgggaagcctagctggccacaaacatccacacatcccatggggttcttatttaaaacatctgcacaaaacccctgtgaggtggatctaattaccctcaattttcagaatagcaaactgaggaaatgtttccttttgttcaacaggtctttcctagggatctgttaggtgccaggcattatggccactgccaacatctcacctctgatgattcgttgaaatcatctatggggctaggaaaaagtctaaaggcccaggcagcatcccagaaaccctgaatcagaaacagaaacagagactgtcttacattgttggtgagagtagagattgaaataatctctttggaggatgacttggaaatatttatctgcctttaagtattcataccctttacctaggcaattctgcttctggatgtgtaactttcaggtatgccttcacattgtacataaaactacatgcacaagaatatccattgcagataaggtgtggtggctcatgcctgtaatcccagcactttgggaggctgaagcgggaggatcacttgaggccagaaatttaagaccagcctgggcaacatagtgggaccccatctcaacaaaaaatatgaaaattagctaagcatggtggcatgcacctgtagtcccagctactcaggaggctaaggtgggaggatcacatgagcccaagagccaaggctgcagtgaactgcgatgacaccactgcactccagcctgggcgacagagcaagcctgtgtctcaaaaaaaagaaaaaaaagagccttagctgaagctaggaggacaggactgggcacaagggaagctccaggaaggaagggcttaggggtctgtctggattatggcttgacaaggttgacgtgaaagagctatagctattttattaccatggaaaatggagtagtagtagtattataaattcacggtagggggaaaaaaaaacacctcacctccatggccatccagttgtctatatcatggatcactcaactctactttccactcttacaccatgtgaggaactatcccaaaccatcaggaaatgttctgcattaatagtgagtctagaatttgctgagaaaagcaagtcatgctcagggcaaacaggagggtccaactcggctttgagcctcctctgcagctgtaattgcagttatcaaacttttcccattcttcaaagattttggcagtgcttctccccaaagaaattcccttcacatttgaaagcttgctgtagaatatagcaatgtagtatagtcagaaaatacggggatttatttataagattacaatttttgtctggttctttctcttgttaacaattggtcttgacaagccatcagccttcccaacccttagtttccctagctggtgagtgagaataacaacagctgccttaactaacccaaaggtggttctgaggagtcctctccagagagatactgcaaagatgctttaccaaaaaaagtgtgtggtttgtgcctgattataaaggtcattatgtgctttggggcctttatttaataattccgattcatgtccattttagaaattctactcaatctgaaaggattgagttaactttcagaaatatgtagggttcttataaaaagtcaccactcacctatcctcagtattaagcttttaaagtaacagcctggttttcacaggttcacaaaccttctagtcccccagaagccacccagccctgtaagatggcaatgccatccttcagttgctcagtccagcaacctgggagtcttccttgactcttctgtcctatccatatgggctctttgtattaatccatgaacaaattttatagattctaccttaaaatacagccagtctgaccacttctcaccagcctggtctgggccaccaagatctttgcacagggctgctcccaggtgtccaagctccattctgtgcagagcgatcctttaaaaacaaacccatatcatgccactccactgctcaaaacactgcagtgactgcccttctctttcagatctgacccccactgtgaaccccacatggtctgccccagccaaccttgctggcctcatcccctgccaggctcccggatgctccagtcacagtggtctccttgcctttcctgaaacacaccaaccaagcagctcccgttgctgcagtttgcaaatgctgttctttcttgctgataatgctctttcccagacaccaccactcacttcctgtctttctgcagggctctgctcagtgtcaccatatctgacacaccatataatataacaagccctccctactctccagcccagtagccactctccatccttctatcctgctcttcctccatagcactttttcccacatgacatatcacatatttgtctgttttccacgcatccctcttctcctgacacctgctgccaaatgtaagcttcacaaaagcagaaactttgtttcgttcattgctatatccccagagtctaaaacagtgcctggctcattgcagggactcacaaaatatttgtgaactgactgaatacatgaatgaattggttacctaagtgtaatatatacatacatacataagtagatatgtaaataagttgatattatagttacataatagccagttaggttaatcttattttctaatatttacaagtaatttatctctcattctgtaacttgtattctcatgttttttgttcatttttcttgtggagatgatttatattgtttgatttttatgtgccatgtgtatattaagaatttttgctcactttgggagtccgaggtgggtggattgcttgagcccaggaattcgagaccagcctgggcaacatggtgaaatcccgtctccacaaaaaattagcctggtgtggtggtgcacgcttgtagtcccagctatctgggaggctgagatgggaggatcacttgagcccgggaggcagaggctgcagtgagttgagatcacgccaccacactccagcctggatgacagagtgagaccctttctcaaaaaagaatttttgctcatagacatgctttatattctgaaatgtgtactgtaggataaggcactgttttaattcaaagtgtctgaaatgtcttttatgattgaataagccactaatatatgagtcattttcttcttctgtttctctaattcccatttgattctcagaattggactcttgtgctctgggggaccacggttgtgaacattcgtgtgtaagcagtgaagattcgtttgtgtgccagtgctttgaaggttatatactccgtgaagatggaaaaacctgcagaagtaagtttgtactggagctggctcctactactatgccagaccactgtgtgaaatcgctatccttatctctgtatatatcagttcctctcagaagtcaatgccacacagcaaaatgtaatgtagtgtcctggataggaccctgaaagagaaaatggacattagggaaaaaataagtaaatgtcaataaaatatagactttagttaataatcatgtatcagtatgggtttatcaataataacaaatggaccatactcatgtgagttgttaataatagggaaaactaggtgtggggtatattgcaattctttgcgctatcttctcaatttttgcgtaaatctaaaactgtcctaaataataaagtctattaaaaaaatggacaaacaaaaaaagtcaatgccagagctactactgaagttcttcacttatatgctctgtggcaagaaacagtggtttggcagtatactctagtggaaagatggacagtcagaaatccaagattcagtcaacctctgtctctgccatttattagctgggaaagttgcctaacttctctaagcctctctgcttatttatctttaataatgttgttgttgttatttctggtagcacaaatccctcccaaagggcaccttgtgatgaagccagttttgcctttcagaaggcaaagcctcttagatggggctgcagccagccagcccaggacaagcagccttagagtgaattgctggtgtaaatctcaagacacatctctgaataatcaaaggggagtgtgtgaccctggtttccatccatatcagttatctttttctcaacgtctcaaagcactttataaagagcaactcatgttgacacttttggaagaaaagatgggtaactggaataattactctctcattttttggacagcacagctaagactccaagaagttaagtgattctcctaagtcatacactatgttaggcacaaagccaaagttagatttcagtgctgctaatctaaattgaggtttaacctcctaaggaatcatatcaagtgtttccattctgatatcagaaactatgtctacagaaagttgatgatggactgcattttaacactaaagtagtgctggtgaacgatgatggtgaagacagtgaaacagtttgaagggttagcccgaattagagccgctaaactttgttctcaattgtaacttcctgccccatggaccactgagctcaggtggcagatagaatccagtagctgactccagtggatgggtcctccaaggtgaagtccatgtgaaatgtatgttgttgaaattgttgtaacttgctctcctgtcttcagggaaagatgtctgccaagctatagaccatggctgtgaacacatttgtgtgaacagtgatgactcatacacgtgcgagtgcttggagggattccggctcgctgaggatgggaaacgctgccgaagtaagtagcctcgaggtggagaagaacttttccctctgtggactcagacagttagagaagttcatttaatccttaaagtcctcctttattaccactgtcacaagtgtcagttcctgccttgggtgctctgaaagtgtttagctagagatcagttcagtagccccttgctttttcgggaatttctcagtcaaggcctgagttttgggttctttgcttctcttcattttctgccagccatcagccctttccacagtagctgtgtgggtgcccggaaactcgcacagtgctagtcactggactgaattagaacctctgccagcaatcactacaaggactgaaggttaattacagagctttctcctcttggcagaccgtaaaagtaagggcaaagggtgaaagggtgtattcgtccattttcacactgccgataaagacatacccgagactgggcaatttacaaaagaaagaggtttgatggactcacagttccacttggctggagaggcctcaaaatcatggcagaaggtgacgggcacatctcacatggtggcagacaagagaagagaacttgtgcagggaaaccccctttataaaaccatcagatcttgtggagacttattcacaatcagaatagcacaggaaagccccgtccccatgattcaattacctcccaccaggtgcctcccacaacacgtgggaattgtgggaactacaattcaagatgacatttgggtgggacacagccaaaccatatcagagggatttcctgtgggttttttctattatttttatcatttgcttctataggtcacccagaacaggctctgagagtttcgttagaaggtgtattccccagagttctccagagaaacagaccttctctatgtatatcttcatcttctattatatataaatataatagaagacatatatataatatatatatgtcttctatggtctgttctatcttctatttatatatatcatagaagatatatatatatacacacacatatatatgtgtgtgatgtatatatgtatactatggtctgtttctatcttctattaatatatcatctccacaggaaaaatggacatacacacacacacacacaaacacacatatattgtgagggaggaaaagattggttgattttaagggattggctcacacaattgtcaggggctggcaagttctaaatctgtagggcagcctggagacccaggcaagagctgatgctgcagcccaagtctgaaggcagtctggatgcagaattcccttttcctctgaggacctcagtctttttctctttaggccttcaagtgattggatgaggcccatctacattatagagggtgatctgatctgcttcactcaaagtctactgattaaatgttaattgcatctaaaaattagctcacagcatcatttagactggtgtttgaccaaacaactgggcactatagcctagccaaagtgacacatcaaattaaccttcacagtacccaaaggaacagagggatgtcatacgagctcagtgaggtgggcattaggagagtacagagcagggatttttccccaccatgagattctgagctggtaattccctattttggggggaggggtggttgacaaagtctacttgcttttgtgacactttgccccagtgggcaaaataaccctttttcaattaagtcaaaataagttcagttgctttgaggttgatttttgggaatttcctcacagactcctttgagataactggggatattccacaagccaacaaggctgggttggagggatctcaatacctcgcttcttcctccaggaagagggactcctacctttagcaagaagttctgtgtgaatgactgacacctaggatgcctgtggtaccctggcctaactctgcagggattcccctcacaactgcaggtccagcttcacactgcagtggccctcttgtggagattttgtctataattctgcccattgtgcctgtctgcactgcttgttcatgcttttctttttgtttgtttttgttttgagacagggtctcactctgtcacccaggctggagtgcagtggcactatcttagctcactgtaatctccacctcctgggctcaagcgatcttcccacctcagcctcctgagtagctgggactacaagcgtgcaccaccacacccggttaatttttgtattttttgtagagacatggtttcaccatgttgcccaggctggtcttgaacacctgagctcaagaaatctgcctgcctcggcctcccaaagtgttgggattacaggtgtgaaccaccatgcccagccctcatgcttttctttctgcaaacatctgcacactcacacacacactgtttattcattcaacacatttattgctcagtaaattgaacacaaggtacaacttctacctctggaatttgatcctaaatcagatttcaccattcctgcttcctagagggatgtgttctcactgattccaattttgtgtgaagcctctccttttaaggggtaatgacaggaaagagccataggctctcatgctatggaggagcactcgggagacagctgtgtcatcaacctgccagatgaccgtgggcagcagtgaagctctctgaggatctaattcttcattgataccttgagaataattatccctgtcttccttgtctcacagggtgttgtgagggttaaagggctgtaagtacttcgaagagtttaaattacctcacacatgagaaatgttcattagacaatctgaactggagtgtttgggatgtctgtggcaaaagaaattagaagctaaagcacatctaataataggatagtaagtcaaggacacctaatcacccatcgtaccattcagactcatgggagctagagctttctgagaggagctttttccccatcctgagtatgagactgcaaaagacattatgaaggaggtttgaagagaggtgtattttctttaaaagagattacttccacaatctctactcacatgactattcaattcacctcatttctacactgatgggattgttcaactccctacattttcctcagggaaggatgtctgcaaatcaacccaccatggctgcgaacacatttgtgttaataatgggaattcctacatctgcaaatgctcagagggatttgttctagctgaggacggaagacggtgcaagagtaagtgatctgaacttggctctctgctttaattttgttttggagcaactgctttttggagtattttcaggcaacaaatccctcacctctgcttctcccataaatataaatgcatatgcacaaatacagaatggggaagagagggcttaactgcagcacctgtgaaaacactttcggttttaattgacagtaaattcattatcagccaagaggctagggtgatcgtaggctgaacagcaatgtctgcatgagggaggtggagagagctgtgctctgctctgtgctggagaattacattcagttctgggcatggtactttaggaaaaaagagatggatcaacagtttaaacataaaaaaaaaaaaaacacaaaagagcaaaaggagtcttgagagaattattttttaatctgagagtagagaagatctttctaaacatgacatgaaatttaaaagccataaaagaaaaacaaaggaaaatatctagtaagagagtaaagctgtgatacctttttttaacctattagttaacctattagttaccagagatcaaaaagtttgattccttatgttggcaaaggtatattgtagtagggaattataaatggatcagtgagtgtctgaattggtataacctttcagagggcaatttggcaatgttatcaatccagttctagaagtttatcttacagatacgtgcatgtttacaaagccatgtatacaaggatattttatacagcactatttgtagcagcaaaaaactggaaacaagctaaatgatcacccatgagcctggctgaataaattaaggcacatctatgtaataaaacatgatgcagctgttaaaacaacaagcagctctggatgtatccccaagatattttaagagaaaaaagcatggtgctgaatgttttttatagtatgttaccatcgatatattttgtaaaacactctaacatacagtctctctttctctatatatgtgtgtgtgtgtgtaccattatatacatatctaatgtgtatacccttatgcacacacacacacacacacacatacacacaccctttttctaatatttaagttttgttccaaatgcatgtattattttttagaaaaaaataagataaacacgatttagaaagaattaagcagcatgatcttgtgaggaagttcagtattatgttaagcagaaaaaaattaggaaactggggatctttgtagaaaaaaattttgaggtaccaaataccaatgtgactgtcatctcactcatgatttgtatgatacccccaccccaccccaccctaccctggaaagaaaggacacttggagaagctacagcttagcacgaggacaaagaagctttctaccagggaagctgcatgcctaattagttcagagcataagcttcagctcagacagatctggatttgaaccctgattcatactacccgtgtgaccttggtcaaattatttaatctcggccgggcgctatggctaacgcctgtaatcccagcactttgggaggccaagacgggcagatcacctgagatcaggagttcgagaccagcctggccaacatgacaaaactctgtctctactaaaaatataaaaattagccaggcgtggtggcacgcatctataatcccagctactcaagaggctgaggcaggagaattgcttgaacctgggaggcggaggttgcagtgagctgagattgctccactgctctctagcctgggcaacagaggaagactccgtctcaaaataaataaataaataaaataaataaaatacaaaaattagccgggtgtggtggcatgcacctataatcccagctacttgagaggctgaggccaggagatggaagttgcagtgggccgagatcgtgccactgcactccagccagggtgacagagcaaggctctgtctcaaaaaaacaaataaacaaacaaaaattatataaactctttgagtcccagtttccccatctataaaataaggataataactcacaaagccatcacaaggaatacattagatcgtgtatccaaaggtgctgaacagccgggtgttgtggctcacacctgtaatcccagcaccttgggaagctgtggtgggaggattgcttgagctcaggagttcaagaccagcctgggcaacatggtgaaaccctgtctctacaaaaattagaaaaattagctggttgtggtggtacgtggctgtggtcccagctactagggaggctgaggtgggaggatcacctgagtgcaggaggttgaggctacagtgagttgtgattgtgccacttcactctagcctgggtgacacagcaagaccttgtctcaaaaaaaatttttttaataaaaaataaataaaggtgttgagcccagtgctcacacacactaagtgctcaaaaaatgatcactattacgattcacaatagtaaagacatggaatcaacccaaaatgcccatcaatgatagactggataaagaaaatgtgatacatatacaccatggaatactatgcggccataaaaagaaatgaggtcatgtcctttgcagggacatggatggaactggaagccattatcctcagcaaactaacacagaaacagaaaaccaaacactgcatgttctcagttataagtgggagctgaacaatgagaacacatggacacagggaggggaacaacacacaccggggcctgttgggggtagtcgggagtgagaacatcaagataaaaagctaatgcatgtggggcttaatacctaagtgatgggctgataggtgcggcaaaccaccatggcacacatttgcctatgtaacaaacctgcacgtcctgcagatgtatcctagagcttaaaataaaattaaatttaaaaaacaacagacaggccaggtgtggtggctcatgcctttaatcccggcaccttgagaggccgaagcgggcggatcacctgaggtcaggagttcaagaccagcctggccaacatggagaaaccctgtctctactaaaaatacaaaaagtgtccaggtatggtagcgtgtgcctgtggctctagctacttgggaggctgagacaggagaatcacttgaacccaggaggtggaggcagcagtgagccaagatcgcaccactgcactccagcctgggcgagagagcgagatgccatctcaaacaacaacaacaacaacaacaaacaaacaaaatgatcactattgtaatcatcaacagcagaggtgtccaaagatggggctttcgtggtaaggtgacaaattcctcatcaggagaggcattgaggcccaggccgaatggtcactgggtgaggatgctgtaaagaggatgtaagcaacagcagggctggagtagatgatctttaaagggcttatccatgcctgaagttctagaactttctgaaaattacgttctgaaagcaagtcacagctccattccagtcttatcaacttaactaccaaaaagaaaatgcccaagaaaagtgggaattaacctctggcaaaaaaatagtctaataagtggggctgtccttcctgtgtctgaaagcaaatacctgggccctgctctccctgatgcttttccactctactttgttttgtgtttcctggagaagccttctggatgccattctatgtgtgggggttgcaagtgctagttttgttctgtaagaaaaatgtgtacagaaaggaggagaaaacagactcactgctggaaaattatttcagtatttttgaaatctgctgaagagccacatgcatgctgcctgagtctttttttggttcactcaggaacagactatgaatgtaaatgaagctttgagttggccttttcctctttcactaataaaagatcgataggttgagtgatgaggaaaagcacttaatggagaaacagaagaacccaatcccccaacatgtgcgcactcacgcacacacacacacacacaccacacacactatgacgttaagcattttatactggccaggcatagaaatggttttgcatgtgtgtgtctctacatgcttatattgttgtgcctcacttttaaagattagacagctgcttgatatataaaacagaatgtttatcacagattgtggattgtttgaaatgagatcatctggcccagcacggtggctcacgcctgtaatcccaacattttggaggccgaggtgggtggatcacaaggtcaggagttcgaaatcagcttggccaagatggtgaaaccccgtctctactaaaaatacaaaaattagccaggcatggtggcatgtgcctgtaatcccagctacttgggaggctgaggcaggagaatcgcttgaacctgggaggcagaagttgcagtaagccaagatcgcgccattgtactccagcctgggcgacacagcaagactctgtctcaaaaaagaagaagaaatgagataatccattttggatctgtccatttttcttttgcagtcctaaataacaaaaagcctctccacacccaaattgcttaacataaagcttttatttctgcttactatcgaccatctattaatagttgcctgagaccaggtacagtggctcatgcctgtaatcccagcactttggaaggccaaggcaggtgaatcgcctgaggtcaggagttcaagaccagcctagccaacatggcaaaaccccgtctctactaaaaatacaaaaaactagccaggcatggtagcgtgtgcctgtaatcccggctacttgggaggttgaggcaggagaatcacttgaacccaggaagtggaggttgcagtgagccaagatcacaccattgcacttcagcctgggtaacagagcaagactcaatctcaaaaaaaaaaaaaaaaaaaaaatgcctgaaaagcttccatgtaaagaatttatggtgataactttttttttaattttgttttttttttttttacggagagatgcagggtcttgctctgtcacccagactgaagtgcagcggcacaatcatagcttactgcaacctgtaattcttgggctccggtaatctttctgcctcagcctcccaagtagctagggctacaggcatgcactaccatgcccagctaatttttctttttttaagaaagacagtcactctgttacccagggtgttcttgaactcctgtgctcaagccatcctcctgcctcagcctcccaatgcactggggattataggcgtgagccactgcactaaggctaattattttgtaagctttaataggtcagtagggtacttacaggtgtgctacccaatgaacatcacctcattcacttagtctgtcaccacacatttactgaacactttttttgtgccaagtattggggggtggggcacaaaaatgaatgaaacacagtccctgctgaggaggaactcacagactggaggaggaaacacatcattaaataattattgtacaatgtggaacactatatagagtacattagattgtatgcagcttggtgttagggattgtgtcttggtcactattgcaatcctgctatgcccatggccttgtacaaagcaggtcctcaataaatttttggttgaataaattagtagtgtttggggtatatagaaagcaatacaagctgagttactaggaaggctccccagcagaggtgatggctgagctgaagaaatctctttctccattgactgtcagaatgccagcactagggtgatgtcaccctcctaaagttctaggagtcttttgggtattgttagacccttcagtgtactctacacccagctcctcccagacctgtcagtgttccagggtacaatgtagacttggtttcctagacaattgtatatctgccgttttgcttgtgaaaaatactatttttatcaatatgacaagccaaccataaaagtatacgtgaaaattattgttgcttgtggccctcccaacaactcatctatcctgtgtattatctaaagaacaaaactggttccccaaagtggttatgcctccaattgaagcatcattttattctactcttgtgcataaatgattttttattcaactatgtcaactttccttctgttcatatagaatgcactgaaggcccaattgacctggtctttgtgatcgatggatccaagagtcttggagaagagaattttgaggtcgtgaagcagtttgtcactggaattatagattccttgacaatttcccccaaagccgctcgagtggggctgctccagtattccacacaggtccacacagagttcactctgagaaacttcaactcagccaaagacatgaaaaaagccgtggcccacatgaaatacatgggaaagggctctatgactgggctggccctgaaacacatgtttgagagaagttttacccaaggagaaggggccaggcccctttccacaagggtgcccagagcagccattgtgttcaccgacggacgggctcaggatgacgtctccgagtgggccagtaaagccaaggccaatggtaatatggggtggaggtgcggtttacaccactcaaggttcaggtttcttaaactcactcagtggtctcagctggccataagggtaagcttctttgagtgtacagaaaggcctcctggcaactgccattatacatctttactaccctgccacctagaagccttaacaggaccccacaggagttaaataaagtgctcaggaaggagtctggctactagaagggtaggctaagctgaccacaggcgggtatcctctcactgtgatttactagccagtgtgtgatctccagtgtaagaatcgcctagatatacacaatagttccgaaacactggtcggcttgctctagaatcaactgaagactttgttaaattgtttctgatgggaacttttactgtgtatatttattcttgtattttttaaccaatacttcaagcgagcattctgaaaatgcaatagcccctagggtggataatactcttgtgtttccaggaggcaaagttagcttttccgaaaatcaaatgatggaacagattatgactctaagctcttgttgctcagtaaagcccagcctcttctctgaggttttcctgacctgagggttacttcagttgtacagatgtgaagcgtgctcgaggagtatgacccttggctaaaggaaacccaaaaggtaggataattggtagagacagtttatggtgaagtttctagattccttgagggagataagaaaacttgaggttgtgaactagtttgcttgaaaactgctttttttttttgagatggaggcttgctctgtcaccgaggctggagtgcagtggcgcgatgtcagctcactgcaagctccgcctcccaggttcacgctattctcctgcctcggcctcctgagtattgggtactacaggcgcccgccaccacgcccagctaatttttttgtatttttagtggagatggggtttcaccgtgttagccaggatggtctcgatctcctgacctcatgatccacccacctcagcctcccaaagtgctaggattataggcgtgagccactgtgcccagccgaaaactgccttcttaaagtacttgttgaggacacactgctttagcaagtcctgtaagaggaaataaggtatgcacagatcaaggcctcatctaagactttatggacccagtgcctagatcaggcctggcacacagtagatgtgtgacaactacttgctgagtgaatgaagaaagaagtgagagtactggcagtcccattggtgaactccattcctcctcacagaaaggctggttcacatcgacattcactcgctgtctttgtgaaggaggtcattttattgatactgcgtaccttcctctttttctagcccaagagtggtagccacaaagtgtcctgccctgaatcatctggatagattgtaaaactggctgttcacactagcctagattgctagagctcatgtcaaactcataggccccctagtctgcattcttaaaaagaattaattaggggaagcatcttagtctccagagacagtggttagccctttcatctcactgagactaatctaccttaccctttgctccactcaaatgtctctacacatcacacaaagacaggtggtagcagaaactgatgtttacttgattcttgaatcaacaagatttatatgaggtgacatcctcttatgaatttaactagtcttatgtatagcaaacagaatcttaaaatagtagttatcctttttaggaagtcgtgcataaaatcactgggctcccggacaaatatgctgaacttggttagtgaccttacacagactcagaacaaggcatcacaactcttgccccttgtcttgaagagccatttttaagtacatttttaagaatctagtctaataaattagctagaataagttatcagtgctgaaaaatgtttggactccagcagaacatattcttattgtgttttactttcaaatgaagagtatataggggaagggagtctaaggattgagtaagaaaagcttttaaagcaaacgcatatccctgttgaaatttaaggctgatcttgggtttgttctttttcctgactttaggggtttccaatggtctgtagattatccttttcagcttagcacttcctcacaaagttgtgtcatcttagcagaagtgggcaaaaagcagcttcacttggcctcaggtcacttacgtttcctaccctgtagctttgagtagaaactaggttattaggtcataaattgacttgattcttagaattcttccagaagagattcccatttagcaagccataaaatagggctcatttctatgaatccagaaggctaattcagggggaagttgcagatttgttaaatggcccagcccagggctgagcaacaggttagtagtttagttccccagcgtctcccagatgcctcacttctctcttggatccctcccttttgttcataggaccaaaataaaaatggtagaaaaataaaaaggaaggttggcatggactcttcaaatcataccacttaacatctaactggctttgggtgcagtacacacaacttccagcccctgggaacacaactctaactaacttgctcttaatttttcctgcaccctaggtatcactatgtatgctgttggggtaggaaaagccattgaggaggaactacaagagattgcctctgagcccacaaacaagcatctcttctatgccgaagacttcagcacaatggatgagataagtgaaaaactcaagaaaggcatctgtgaaggtactatagcttacgccgaagaccttagcaaacaaggcagcatgaactcctttttttttgttttttgagatggagtctcactctgtcatccaggctggagtgcagtggcacaatctcagctcactacaacctccgcctcctgggttcaagtgattctcatgcttcagcctcccgagaagctgggattacaggcacccaccaccacacccagctaatttttgtatttttagtagagatgaggtttcaccatgttggccaggctggtctcgaactcctgacctcaagtgatccagccaccacagcctcccaaagtgctgggattacaggcgtgagccaccgtgtccggccagcatgaacctttagtgataaattctcaaccaaaaaaaagtgtctccttcatgggcagggccagcaatgcctagaaacagtacaaaaagaagggctgggcaccatggttcccacctgtaacccaaccattttgggaggctgcggtgggaggattgctcgagcccaggagttcaagaccagtttaggcaacaaagtgaaaccctgtctctgaaaaaaaatttaacaattagctaggcatgatggcacacacctgtagtctcagctacttgggagactgagcggggaggatcgtttgagccctggaggtcacggcttcagtgagccatgattgcgccactgcactccaacctgggtgacaaagcaagaccctgtctcaaaaaaagaaaaaaaaaaggtgggggaaacaggggaggtgggaaagaaaaaagtaatagctaccattgtttgcgcccttgctctgtgccaagcagtataataagtgttttgacacaccagcatgcttcatcctcacaaacaccctagagaaatgatcatttaactaaaaatcaatcattatataaatcaggagagctgaagtgcaatttcagaatatacctataattggagtggaaaggggcgtacctagttcttccaagcccactgttaaaattaatgcctttctgcatggactacttgtttacagaatatcagactgccctttagacttcagattttgttatgcatgcttttctccagtttactaactgtgccagatatgcttacagatagcagttctgcctatttttccttgtactcatgtccccggctcaccagttagatcccagtctaagtgctgtgtcttacccctctagggaaagaactcttgagatgaggggtaacagggagggaaggcctttcagatttctgagtagagaatgttttgcctcttgattgtttcatgcaagttaaaatgcctcaagtggagctgctgccactgcaactaaaatccctcaacaacttcaccttttttttctgccctactttctagacatgacatttttgggagcattcttaagatgtacttagggggtccaagcttctcttacgagagagaattgccctagagtggtcataagtatcatggtaaccaactgcttttttgaatctttggtgttaccaaacaaaactaaaaaaccttaggttatggcaggtaggtaaggaggtggtctgggaccagcttcctgaagaacacacacatgcctgtggacaaccatcacttcttttggtcatctttttctgctcagctctagaagactccgatggaagacaggactctccagcaggggaactgccaaaaacggtccaacagccaacaggtacagtttttaaggcagtgtttttagaaattttggtggagggaaccatggtttccctccagataaaagctgtaaagaagtgaatgtaagtatgttcaaattatgataatgaaggccttttttccctcaaaaagatagttaacatttactcttacattaagccatatttggtaactagcatcgtttcaggtgacagtgtttttttgtttttgtttttgttgttgttgtttttttgagacagtttcattctgttgcccaggctggagtgcagtggtacgatttcagctcactgcaacctccacctcctgggctcaagtgattctcctgccccagcctcccgagtagctggaattacaggcacccaccaccatgcccagctaatttttgtatttttagtagagacggggttttaccatgttggccaggctggtcttgaactcctgacctcaagcgatccacccaccttggcctcccaaagtgctgggattacagacatgagccactgtgcccggctgtttttgttttgttttttgttgttgttgttttttgtttttttaataaagatgtttactccactgaagataacagtctttttgcttcagtatgtcccaaagtaaagctctgtaccaagtgctaggaataccaagtaccttactctgctgatggctgttttataaccaaaagcgttaagcaggtttgattgcagttttctttctctttacagaatctgagccagtcaccataaatatccaagacctactttcctgttctaattttgcagtgcaacacagatatctgtttgaagaagacaatcttttacggtctacacaaaagctttcccattcaacaaaaccttcaggtaattccaagtaaaatattactataagataacttgatctcagcctttcggcttgccaacaaccttagctttaaggaggaaaggaaagaaggaagtaggaaatagtatagaggaaaagagaagaaagaatttaagtaaaatgagaactaaaacataaactaaaagaaactcaagtagtgttcctcagtaatccacagtaagggccacttccagtgttggaagcatatacagtgctttcctggtatttactggatctggctgcatggaaaaagtggaacatgtctttcattatggtttcctccatatgctgattcattcctattattatgcgtctgggaagtctggtggattctagaggtgaacactttccatctgctttctcaggaagccctttggaagaaaaacacgatcaatgcaaatgtgaaaaccttataatgttccagaaccttgcaaacgaagaagtaagaaaattaacacagcgctatatccttttcttgcattatgcttctgtatggaatgcaaagaatattatcaaaacttcacacactctatgtaggttttatcaactgaagtaaatcccacgaagtcacaaagaacagtgatctccaggaaaggctttttgctttaaaaagcagcctcacaggtgtttgagaggcaagggcaagccaagcttattagcagcagtcaagcacttagttgccatcggctgttctcgggggcttagcaataaggcctgtcagtcagcatacaaagtaaggaaaaaagagacactggcctaactccgtctctgctaggaaggtgtgtaggacatgatgaggtctgaagtgcatcaaaggtacggtaagtatagacaaagaatgttgtagaatgaagaggtttcaaactcagtactccaaacttttcctttagccccaaggaacaccacagccacatatagattcagtgtgtttagtttctggaggacaggagtggttttttcttttttttcccttggcagcagagatcttctctatcggcactctaaaaaatgaaacactccaccaagggaacagcaggatccaatgattcatttaaacaatattaaataaaaggaatgcttggggataataaagaaaagaggattcggtgcttttacatattgaacaccctgccaagtgctctaaacttaaaattacagtaagcgtactaaagctggctgatatctcaagtgcatcaactagtctatagggaaatggcttaattctgaactatctctgtgccaatgggcttatgtaataaggaacaacagcatagggcaattccatttctgaaagctggaaatacgctcccttaagtaaaatgaaataatctttctgagtggttaattgacgaatatgggctctcattctgccctcaagagggcagatagagggtactgaggagcttacagggaagaccaatacctattctaatgcccttttcttctcgcttgcctgtcccaccccaaagttctactcacaagagactaaagaagacatatttttacataggtcagaattcctcaaaaccgtggccttatgtagcatcatggtgaaaactccgtatcgccctttgcttctgacttcatatcttactttccaaggccgaattctttcattgtcttctcttcaccagattcccaacattatcaattctggctcctagaagtgtgctatggcaaactaatttgcaagcattaagggtggaagtggaatcacaattaaaaaaaaaaaaaaaaagactgcagctgggtgctgtggctcacacctgtaatcctagcactttgggaggccgaggtggccttgcttgagcttaggagttcgagatcagcctgggcaacatactgaggccttgtctcttaaaaaataataaataaaataaggccgggcacggtggctcacgtctgtaatcccagcactttgggaggccgaggcaggcagatcacctgaggtggggagttcgagaccagcctggccaacatggagaaaccccacctctactaaaaatacaaaattagctgggcgtggtggcgcatgcctgtaatcccagctactcgggaggctgaggcaggagaatcgcttgaacccaggaggcggaggttgcagtgagccaagatcgcgccattgcactccaacctgggcaacaagagcgaaactctgtctcaaaaaaagagaaaaaaaacaaaaataaataaaattaaaattaaaaagacaaattcacactgagccatctggctttgctgatgttaaaaaaaaaaaaacccaaaatatttgtcttgacagaatatgttaaatgagttctacaaatttacaagtcagggttttaacatacttgacagaaatgggaaaaaaaaccaaaaccttttagatttcagaagccaaaattttacgtggataaatcaagttatatttaaatgtaaataaaaatagacaattcttcatcttccttaatttgagatttactagaagaaatgacacagagaatggaagccctggaaaatcgcctgagatacagatgaagattagaaatcgcgacacatttgtagtcattgtatcacggattacaatgaacgcagtgcagagccccaaagctcaggctattgttaaatcaataatgttgtgaagtaaaacaatcagtactgagaaacctggtttgccacagaacaaagacaagaagtatacactaacttgtataaatttatctaggaaaaaaatccttcagaattctaagatgaatttaccaggtgagaatgaataagctatgcaaggtattttgtaatatactgtggacacaacttgcttctgcctcatcctgccttagtgtgcaatctcatttgactatacgataaagtttgcacagtcttacttctgtagaacactggccataggaaatgctgtttttttgtactggactttaccttgatatatgtatatggatgtatgcataaaatcataggacatatgtacttgtggaacaagttggattttttatacaatattaaaattcaccacttcagagaatggtattcagtgcaaaaattcttagtttaactttaaatggaagatatgtatgtatgagaaatggccaacatgcctatgaaaaaaatgctgaatctcatcagtaatcaggaaaatgcaggttaaaacaataccatttttcacccatcagcttagcaaaaatgagtatattttttaacaagtgttggtaaggatgtggaaatgtgaggttcttgtagtaagaatgcaaatggcactctttgtagagtaagtctgttgacatctcataaaactgaaaatgcacacaaccctgtaaatctagcaactgcactcagttgatttcagcccatacatacaaagagacctgcataagaatgttactaggctttgtaaaagcaaaaaataaggaacaacttaaacatcatcagaaggggaactgataaactctggtgtaatccataccacagaaatacaacaccgcatgtacaggaatgtgctacatctatacaaataaatggtcaaactc

SEQ ID NO: 420 - DNA, 16504 bp, Homo sapiens
tccagaggaggaagtccagagacagagcaccatgacttctgagaaaggtaaaatggatccgggggcttggcaagtattcttgaacaatgcaagaatggtgtgtgtgtgtgtgtgtgtgtgtgtgtgtgtgtgtgtgtgtgtgtgtgtgtgtcctgctgattcttgcatctgtgggtgttttcaaacttccctattattgattaatatattagtcttaaataagatggtttattattagtaaatatttacatctccaagtgactttaaccaaatcagtgtttgtttcaccatgataaaaaattaagtagccaggcgctgtggctcacacctgtaatcccagcactttgggagtccaaggagggtggatcacttgaggcccagggtttgagaccagcctggccaacatggtgaaaccctatctgtactaaaaatacaaaaattagccaggcatggtggcgcatgcctgtagtcccagctactcgggaggctgaggcaggaggatcacttgaacacaggaggcggaggttgcagtgacctgagatcacgccactgcactccagcctgggcaacagagcaagactctgtctcacaaaaataaaaaaaaagttaagtaaaagtacaactgtttaaataacagtttaaggtaacaacagacgtgatagcatgagaacaatgtgctaattgacaaatgaattgactataactaattgataaatttgtgcacagtcagtgttagaaaaatgcatgggagaggaagaacacttcaggctgaaggaagtaatttcagctgagctaggatttgagctggattctaagagaagtgtagacctaaaaaaatttttatcttattttgtttttagagactagcgggtgggttcactacttcgcccaggctggtctggaactcctgggctcaagcaattctccacccttggtctctcaaagtactaggaatacaggcatgagccaccatgcctaaccaaatttttttttttttttttttaagactcgccctgttgcctaggctggagtacagtggtgtgatcactgctcactgctgtcttgacctcctgggctcaagagatcctcccgcctcaccttcctgggtagctgggacaacaggcatgggccaccagccctgctaatttttttgtagagatgaggtcttgctttattgctcaggctggtcttgaactcctgggctcaagtgatccactagcctcggcctcccaaagtactgggattacaggtgtaagccaccatgccaggccagaagggcagactttggatcgacaaagaagaggagattccaggttgattgaatcctattgatgaacagaatttaaaagcttttatagagacttgtgtctggaatataatgaataaactggttaggctacaaaaaatttatgtaaacaatttgcagtaagaccagaaagcaaatttgaagtgttattatactatagaggacttcgaatgccaggctcaaggaatgaaagtttttctttatggtagagggaatatctttggagaatttatgaatagcacagagatatgactaaaatagtgctttagacacatttacttgacatgtgatgggttttggactggaagcaaggagaccagttagaagactattgcaatagtgtgagtgtgatggggcagaaggtaatatagatatcagtttggagttgaagtaacaatttattttctcctttatgttcttcatctgttagaattcttttttaaggtcaggtgtgatggctcacacctgtaatcccagcactttgggaggtcaaggcaggcggatcacctgaggtagggagtttgagaccagcctgaccaacatggagaaacaacgtctctattaaaaatacaaaattagctgggcacggtagcacatgcctgtaatcccgctacttgggaggccaaggcaggagaatcacttgaaccagggaggcggaggttgcagtgagccgagatcgcgccattgcactccagcctgggcaacaagagcaaaactccatctcgggaaaaaaaaaaaaattcttttttaagtggcatactgggggaaagaccaaacacattatttgattgtagtagctaataccttccctggacttttcttatgaaggtggtgtgttctatacctcaaactgtccccagtcatgtggctggtatccttgtctttgcatcccaggaataatattgatcagtgtagacacagcatatgtctcaccgtccctttctgaacttctcactgctgcttcagctctttcagagaaagtgtcttcccatcatcaaatgcctttttcctatgatgtggcctctgtttatgtaaggctccctcggagtagattactggttcaagggccccaatttgcactaagatctgagaagagctcattccaacgtgccagccacccccttcctccttcctcccaatgctcaaatcccccattcctcctttaaaagtaagagatttgttcttcaggtcacacttggaatagtgtttcctgacttcgtcctatttcctagatatctggctaatttctcattttagttcttctccccagctagaaccactctctgcaaaaaaaccatgccatgcccaagtcctttctacaactcctctaccatccagtgcaaatgcataaaaagtaacacacacaaacaggtacacacacagcctagggtaaagcatgctctgttttaaaggaagtgtcttccagagcctgtgactcttctctgttcaaaaatagcacctgcgagttaaggtttggccaggagcgtgggatgaatttcttgcctgcatctccccaaatcacccttagaggttcaggccttgtcagcgcccattttattgccaggaacatccccaagcctctgagtcctgagaggcgcaggtctctaaaattcagtactctcccttgaatcatccccatactctctaatggcttcttacacttagcatactatccagagctggtaaggccctgtggcttaccccctccattgctcatctccctccattgcaggtcttgatcactccgacccagccaagctgacttgcttgctcttccttgaacaagtcaaggtccacacttcaggtcgtttgcacctggtgttccctgtgcttggaaagctctccccttccccgacgtccacatgtcttgctctctaaatttacattcaggtctcagctttaatgtccctctttatagatgtcttctctgactgccatctctgatatggtcgatatggtgcccccaccaccttttgtctccttccagtacttttcttcttcctttttttttgagatggagtctctctcgctctgtcgcccaggctagagtgcaatggtgtgatcttggcttactgtaacctccacctcccaggttcaagtgattctcctgcctcagcctcccgaatagctgggattacaggcacgtgccaacatgcccggctaatttttgtatttttagtagagacagggttttgccatattggccaggctggtttcaaactcctgaactcaggtgatccacccgccttggcctcccaaaagtgctgggattacaggcatgatccaccgtacccggccgtctttttttaaatttttaaattttttttattttttaaagacaacgtcttgctctgtcgcccaggctggagtgcaatggcgatcatggctcactgtagcctcgaactcctgggctcaagtgatcctcccacttcagccttctgagcagtggggactactggtgcacaccaccatgcccggctaatttaaaaaaggtttggttttgttttgttttgtttttagagacggggtcttgctgtgttgcttacggtagtctcaatttcctagcctcaagcaatcctcccgcctcagcctcctgaagtgttgggattataggcatgagctatggcacccagccagggactcttttgactaagggagagatcaagataatccccactccctgaagccctgtgcattgggaatttagatgactgctcatttccacatcaattgttacttcccatctctcaattctagtgctggacctactattaggttctatacctaagagcagcaattgttgcttttttctctttccccttccaggttagcacgattcaaagggagaatctgtgtccacttgaggtcccttatgtagcaggactgccctgtaaatgtcttcaggaaccacttggctccagttggagcctggtccttttttgctggttcaataggatctttccatatgttctttacaagtatctttttacacttattactcattcagttatcttttctccttcctctcgagttgtggtttaaaatatgtataattacaattataaagagatatctatctatctatctatctatctatctatctatctatcatctgtcatcaaagatatcctggcttctctccacactaccaaatactctttcttattttttaattataatttttatttcagattcatggggtacacgtgcagatttgttacaagggtatatattgtgtgatgctgaggtttgggcttgtattgactctgctaccgagatagtgaacatagtacccaatgggaagtttttcagctctttcccctctccctccctcagtccttttggacttttccagtgtctattgttcccgtcttttttttttttttttttttgagacggagtctcgctctatcacccaggctggagtgcagtggcgcaaatttggctcactgcaagctccgcctcccgggttcacgccattctcctgctgcagcctcccgagtagctggaactataggtgcctgccaccacaccaggctaatttttttttttttttttttgtatttttagtacagacgggatttcaccatgttagccaggatggtctcgatctcctgaccttgtgatccacccgcctccgcctcccaaagtgctgggattagaggtgtgagccaccatgcctggctgttcctgtctttatgtccatgtgtacccaaggtttagctcccacttataagtgagaacatgcaatatttggttttctgtttctgtgttaatttgcttaggataatggtctccagctgcatctatgttgctgcaaaggacatgatttatgatttcattcttttgtatagctgtatagttttccatcaaataccctttttttttttttttttagatggaatctcattctgtcaccaagggtggagtgcagtggcacattcttggctcactgcaagctccgcctcccgggttcaagcgattcttgtgcctcggcctcctgagtagctgggattacaagcatgggccaccatgcctggctaattttttgtatttattagagacggggtttcaccatgttaggctggtctcgaactcctgaccctcaggtgatccacccacctaggcctcccaaagtgctgggattacaggtgtgagccactgtccctggcccaaataccctctctttctttctttctttctttctttctttctttctttccttccttccttccttccttccttccttccttccttccttcccttccttccttccttccttcctttctttttttgagacagagtcttgctctgtcacccaagctggagggcagtggcatgatctctgctcactgcaacctctgcctcccgggttcaagcaattctcctgtctcagcctccagaatagcagggattacaggtgcctgccaccacacctggctaatttttgtatttttagtagagacggggtttcaccatgttgcccaggctagtcttgaacccttgaccttgtgaaccacccgcctcagcctcccaagtgttgggattacaggcgtgagccaccgcacccggcccaaataccctttctttaaattgaaactttattttattttatttatttatttttttgagacgtagtctcgctctgtcgcccaggctggagtgcagtggcttgatctcggctcactgcaagctctgccttccaggttcacgccattctcctgcctcagcctcccgagtagctgggactacaggcgcccgccaccacgcctggccagttttttgtatttttagtagagttgggttttcaccgtgttagccaggatggtctcgatctcctgacctcatgatccgcccacctcggcctcccaaagtgctgggattacaggcatgagccgctgtgcctggccagtagttgcatttttagtttttcttttttaaaataaatttgcaaactgttttccagtatggctgtaccagtttacattcccaccagcaaagtatgacagattcagtttctctgcatccttaccagcatttggtgttttgcatgcgtgtctgtgcacgcacacctatacacacacatatagccattctgataggtgtgtaggaatatctcattgtggttttaatttgtatctccctggtgcaaattaaatggtgagttggtcacaagtactccaggttgccggtagttccttttgtgtgtgtgtgtgtgtgtgtgatttttaaatttcaaatataaacatatatatatatatatatatatatatatttttttttttttttttttttttttttttgagagggagtttcactcttgttgcccaggctggagtgcaatggcgcgatctcggctcactacaacctccacctcctgggttcaagcaattctcctgcctcagcttcctgagtagctgggattacaggcatgcgccaccacacccagctaattttgtatttttagtagagacagggtttctccatgttggtcaggctggtctcgaacacctgacctcaggtgatctgcctgcctcagcctcccaaagtgctgggattacaggcatgagccaccgcgcccggcctataaatatatttttaaattttctttttttggtggaagtgctttttttttttttcttttgacatggagttttgctctcgttgcccaggctggagtgcaacggcatgatctgggctcaccgcaacctctgcctcacagattcaagtgattcttgtgcctcggcctcccaagtagctgggattacaggcatgtgccaccacacccggctaatttttgtatttttagtagagacggggtttcgccatgttggtcaggctggtctcaaactcctgacctaaggtgatccacctgcctcagcctcccaaagtcagccaccgcgcctggcctaaattttcaatcaatatgtgccaagtgattattatttaaaaatattagcttgagaagagttctcagactcaattttattgtcatgagcctcttacagtgaggtctcacagacttcctttttccttcatgccactgactctgagaccatctggcactgtgacacctctgttgggtaatcaagccataaatcaaaatctttagtctccaattcctgtatcgcctttctcaaaacgcagcctgagtctgaaaaataatgtacctgtaaccaaggactccaacacctatttaatcatctatcaaacctgaaataaaaacccaattttggccgggcacggtggctcacgcctgtaatcccagcactttgagatgctgagaggggcagatcacatgaggccaggagtttgagaccagcctggccaagatggtgaaaccccgtctctactaaaaatacaaaagttagccgggtgtggtgacacatgcctgtaatcccagctacttgggaggctcaggcacgagaatcacttgaaccctggaggcaaagtttacagtgagccaagattgcaccactggactccagcctgggtggtggagtgaggttctgtctcaaaacaaaacaaaacaaaacaaaacaaaacaaaacagaacaaatcaatttccaggtgattctatttcggaaattggaagaaattagggacttttgatcagtccatgcatttttgtcatagacttcaattcttttccaggaaatagttttgggtattttttttgttatttatttataattttagtttaattattattatctttttttgagacagggtctgtctctcttgcccctgctggagtgcagtggcatgctcatggctcactgcagcctcaacctcctgggctcaagtgattatcccacctcagctttcctagtagctgggactacaggcatgcaccactacagctggttaaacttctgtatctttttgtagagacggaaatttccccattttacccaggctggccttgatatcttaggcttaagcgaccatcttgccttggcctcccaaagtgctgggattacaggtgtgagtcactgcctacagcctggtttgttttttaattttgttttgttgttattgattgtttttattttaaggaatttagtagctctagatgcaggcttatcttcagttttccacagcccttgctcactttcttttcatgggaatggcctgggcctaccgtagaaagcatacttcacagtatatggctagccctctatatgaaaaataaaacgtcagaaagtgtgcaatccacctctctccagccttaaaggtgcaaaaagcctcagagtcacttcaaaagtgttctgactttggagacatattccaaggactggctcaacttaggttctatgttatgcaactagacattcagctaacaatttggcagtcatggcgaggaaacatacacatgaggctcaattcaagggtagtaacttagtacgaaatgcagttggttcaaatgattctggctgggatgccaaatatgtaattgagatgtttatgttaccagtattattagttccctttttcctctgttaaatagctatttacacacacacacacacacacacacacacacacacacacgtatatacaacacactaggacaccaagtgggtatttttgcaacccaaactaaaaatccataagcatatgcatggcaaaccgaatagtagagataagaaagagaagtattcttacacaggaggctctcacctcctcaaaattcccaagttgacatttaatgtcaatgatgttcatgccattgaaataaacataaaacaggcatctttctaaccctctgaaaggctgccgtaataacagtgcttaacgtttatgaagcatctgctgcgtcaggcaccttgcaaatgttttccattcattgtgttacgtgagtcttccgacaaccttgtggaataggcaatcttagggtctacatttgacaaatggggaaactgaggtctagagaggttaggaaacttgccaaatgtgttagagcaagtaattggctaaactgggattataacccatttttctctgaccctagagccttggctcttgattgcaacactgtgttgcttctttagactagactgagattcatggaccattttaagtttgtaaccacctttgagagtctgaatggaggacgtggttttgcctggttttacttcctcctctagagtgcggggtccatattcctctgatgataagggccaggagagccatctaaacaaagtactgcttagatcactccaaagccggggccactcacactgcaccccaggaaactgaacctctgtcctttccagcccagactttcttccacggagtgacactgattagtttgtaggccaggtgaggcatgatttcataaccatggagtaatctgaccagggtcatgcaggggagcagcaggcctgcggtatataaattctcaaatacacatcttccatttatttccttatttctttctttaaaaaaaaaaaatttggcctaggcatggtgaatcatgcctgtaatcccagcactttgggaggctgaagcaggaggatctcttgagctcaggagtttgagaccaacctgggcaacacagagagaacacgcctccacaaaaaaaataacaaatgaaataaaattttaattttttaagagacagggtctcactgtatcacccaggctatgtacagtgacataatcatagctcacagtaacctggaactcctgggctctagtgatcctccctcctcagccactcaagtagccacaggtgtgtgctaacacaccctgctaattttacattttgtaggaatggggtctcactgtgttgcccaggctggtctcaaatttctggcttcaagagatccttctgccttggcatctcaaaaagctgggattataggtataagccactgcactctctctctatatatataaaatcaaagccccaccaatgccacctccttttctattttccaaactactccaccaccatggtctgcaccactccctgtgaggcccctcaaagctgtccatgcccatgtctacattaggcttctctacccatcgtgtcataacatttcctgtatttccatttctttctttctttttttttttttaaggagtcttgctctgtcactcaggctagagtgcagtggcgtgatctcggctcactgcaacctccacctcctgggttcaagcaattctcctgcctcagcctcccaagtagctgggattacaggcatgcgccaccacgcccagccaatttttttttgtatttttagtagagatgcggtttctccatgttggtcaggctagtctggaactcccgacctcagatgatctgcccgcctcagcctcccaaagtgctgggattacaggcgtgagccaccacaccgggcctatttttaatttttatttttgagacagagttttgctcttttgcccaggctggagtgcaatggtgcgatcttggctcactgcaacctcctctccccaggttcaagtgattctcctgcctcagccacccgagtagctgggattataggtgcccgcaatcacacctggctaatttttgtatttttggtagagacagggtttcaccatgttggccaggctggtctcaaactcctgacctcaggtgaaccacctgcctcggtctcccaaagtgctagaattacaggcgtgagccaccgcacccggcctctaagaggctttaagaagtgactttcccattgtgcttaatcatttttgttgaagccttaaggcagactaccttgtttgggattgggcatctgggaaaagagattttggcagagtccttaaaaatcttgcttttcttgggtacaatgagctggtccaatacaattaatccatgagagaatcttcaaattccattttctgagatgatttggaggtttggaataatagagcactttttcttagcaactcatttgatatttgagtgttgtttgacataatcatatcttggtcaacaggtccttcaaccggtgaccccactctgaggtaagaataacactatcacagtgcccatttaatttgatcaagaatcaatgggtatttaagagctgtgcatggtggcacatgcgcctataatcccagctactcaggaggctgaggcaggagtaggaggatcgcttgagcccaggaggtcaaggctgcagtgagctatgattgcaccactgcactgcagccggggtaacagactgagaccctgtctcaaaaaaaaaaaaaaaaaggaactgtggatatagctttctttattgttccttttctcttttgccattttccattctttctttcatttttgccttttccagtttcattttctatggttattgttttttatatctttgctcttatgtcttttgatctctttaaataaatgattttctagcttgcttatctgttattgtcttacaatttctcttctttttttaaatcgcatgcttttatagccattagtgaaatacctgggaaactcatttgtcactttaacttcatcttcgttttataatgtctgcccatttttcagacataggacagggaagtcatgttaaggaatatattatctcttgataggtggaaggattgatctatgtagtaaatgaatgtgatactttagggatgagtgggaactattaggatgtaataagcttgtgacttaaccatattgcaaagaagagtctgcagttcaattctgagtttcccttgagttacagctttcagacatagagagtgttaaatctaaagacaccactgagagcaagtagaatttctttcttataggagttagtatatagaatcctaatgtggaagaatcttgaggctaaattgctcttttgtctgttcttgacaatacaatcttgttggcaatttgaggcgtcaacacttgagaaaatctggttagagtccattgaggaatagaaaagataaggattggaacatagcacctctaggtgtaaaatagaaaagttagaatatagctaggcatggtggggcacacctgtggtctcagctactcaggaggctgaggcaggagagtagcttgagtccaggaaggggagatcaggctggccagcttagagagaccatgtcttaaaaaaaaaaaaaaaaaaaaagggttagaatataatgaaggaaaatttaaaagagaaacaaagacacgcttacacctgaattcaagactaaaacataatggtattagagagtggtcaccaaataatgtgactgggggaagaaacctgtgcactatgtttgtgagaaaaaaaaatctgataattcaaacagacctcttcagataactttgagacatatactagaaaaagaagtttcctgagatgttatgtctcagatcagcctgatagaagaggggagcagaggctgggcgtggtggctcacgcctgtaatcccagcactttgggaggctgaggtgggcgaatcacaaggtcaggagtttgagaccagcctggccaacatggtgaaaccccgtctctactaaaaatacaaaaaaattagctggacatggtggcgggagcctgtaatcccagctacttgggaagttgaggcagaaaaatcgcttgaacctgggaggtggaggttgtggtgagctgagattgcaccactgcactccagtctgggcaacagtgtgagactccatcttaaaaaaataaaataaaataaaataaaataaaaaaagaagaggggagcaggaaaagatttctaagatctctctaaatgtggcatgacagtgtgggctgctttttgtatttcaggagaagaatcgaaccctgggagtttgacgtcttctatgaccccagagaacttcgtaaagaggcctgtctgctctacgaaatcaagtggggcatgagccggaagatctggcgaagctcaggcaaaaacaccaccaatcacgtggaagttaattttataaaaaaatttacgtcagaaagagattttcacccatccatgagctgctccatcacctggttcttgtcctggagtccctgctgggaatgctcccaggctattagagagtttctgagtcggcaccctggtgtgactctagtgatctacgtagctcggcttttttggcacatggatcaacaaaatcggcaaggtctcagggaccttgttaacagtggagtaactattcagattatgagagcatcaggtaaaaacagtaaacaaagaaacttcattgtttacaacagactgtggtgatagtagctgtttttaggccagaagattggttagcccaggctggaagtctcagaagtaaaagtccaaaataatgtcataaaggactaggtctgaaattcatgacaaggaaagttacaaaaatacaactcctggctacgcatggtggctcatgcctataatcccagaactttgggaggccaaggcaggaggatcacttgaagccaggggttcaagatcagcctgggcaacatagtgagaccccatctctaaaaaaaatttaaaaatccggccaggtgcggtggctcacgcctgtaatcccagcactttgggaggccgaggtgggcggatcatgagatcaggagatggagaccatcctggctaacacggtgaaaccccgtctctactaaaaaatacaaaaaaattagccaggcgtggtggcgggcgcctgtagtcccagctactcgggaggctgaggcaggagaatggcgtgaacccgggaggcggagcttgcagtgagccgagatcgcgccactgcactccagcctgggcgacagagcgagactccgtctcaagataaaataaaataaaataaaataaaaaataaaataaaaaaatcagacaggcatggcagcatacacctttaaaggctgaggtaggaagatctcctgagcccagaagttcaaggctgcagtgagctatgattggaccactgcacactggcctaggtgacagagcgaaaccctgtatcaaaaaacaaaaacaaaaacaaacaacaactcttttttttttttttttttgagacggagtcttgctctttcgcccaggctggagtgcagtggtgcaatctcgactcactgcaagctccacctggggttcacgccattctcctgcctcagcctccccagtagctgggactacaggcgcccaccaccacgcccggctaattttttgtatttttagtagagacggggtttcactgtgttaggcaggatggtctcgatctcctgacctgtgatccacccccctcggcctcccaaagtgctgggattacaggcgtgagccaccgcacccagccaacaactcttttctctagtcttgcctctcagccatctttaaatgaactgctttattctttttagggggtctaatgtccagcagcaactagactagagactacaggctttctatacgggaagctaggttggggatcttcttaagtaatttaccattgtgcttgttgaatgagccaagatttgtgtttccttagagtattatcactgctggaggaattttgtcaactacccacctggggatgaagctcactggccacaatacccacctctgtggatgatgttgtacgcactggagctgcactgcataattctagtaagtcactttagggacacaaatgttgatgcaaaaagaagcatccttcttcaaaggtctttcctgagaaaatttgactcatatcttctttttgacatttatattgagatttagttatttaactagctagctcctcttaagaaaatctcagagccaggtatggtggtgcacacttgtagtcccagctacgcaggaagcttgagtctaggcgttgcaagctgcagtgagctatgatcacgccaatatgctccagcctgcgtggtataacaagatcctgtttctaaaacacagctgggtacagtggctcatgcctgtaatccaagcactttggaaggccaagatgggaggattgcttgagaccaggagtctgagaccagcctggccaacataatgagaccccctctctataaaaaagaaaattatgtatcaaacaaagtaaacaaacaagcaaacaaacaacatctaagcctaagaacaagaagtgtgtttgtgggaggtaagtggagaagggaatttgggtaaaccgatctaagatatgggtggtccccatattaattacattttatcatttttattcttattttattatcattatcttttaagccacagggtctcgctgtgttgcctaggctggggtgtagcggctattcacaggcaccatcacagcaacccacagcctcaaactccgaattcctagcctcaagcaatcctctgacctcagccttctgggtagctagaactacaggcgtgtgtcatcatgtctggctttatcattattattgttcttgttactacaacacatattggctctactgtatttcagatattctcctttctcttattagtgtgtgtaatcttattgaagagaatgtacgtgttccattggattctcttgaaagtggttcaggctgggtgcagtggctcatgcttgtaatcctagcactttgggaggcagaggggagtggatggcttgagcccagaagttggagaccagcctgggcaacatggcgaaaccacatctcaacaaaaacacaaaaaaattagctgggtgtggtggtgcgtgcctgtagtcccagctacttgggaggctgaggtgggagaattgtttgagcctaggaggttgaggctgcagtgagctgtgattgcaccactgcgctccagcctgggtgaatgcagtgagtccagaaccagaccctgtctgggaaaaaaaaaaaagaagaaatagttaaatcgtcttccaactgacatttttaaatgtttgtggtgataatattattaattaaaatattcatcctaaggattaaatataatccttttttattccagagtcttccaccctgtttaaagatttcaagaagatggcaaaatcatcttacatttttcagacttcatcttcaaaactgccattaccaaacgattccgccacacatccttttagctacagggctgatacatccttctgtggcttggagatgaataggatgattccgtgtgtgtactgattcaagaacaagcaatgatgacccactaaagagtgaatgccatttagaatctagaaatgttcacaaggtaccccaaaactctgtagcttaaaccaacaataaatatgtattacctctggca

SEQ ID NO: 421 - DNA, 84613 bp, Homo sapiens
aatataggtgtgttgtagagtcaggcagaacccagaacgtctggagatgaatgtagggaagaaggaaggaccagcaagttcttccaggtaagcctcaggaatctggtgctgtatggatgggatggaaggagatttagaaggatgggtactacaagttgaagatttaaggagatgagataaagactaaaaggatggtgggcaagtaaagtggtctgaagaatgaaatctggtgaaaagaaaaagaaggcctgaggatgaagggctgacaataacaaagactctaagtccaagcagtagattttaacgacagcggaatttagaggcctgggaagctcagagtgccttgaggttgatggctaaggggggcagagacagagaagagcagtgggctgaatctagggaagactgggaacaatgagtttggccaatgtgtttggtgtagatggatcctagggcagatgagaacagataatgacttggccaataaattgggcattatagagattacacagtaaagtattagggaatgccagttgcagaaagtggggaaagtgaaatggacagaaatgagcaaaggcgtggacagaggtgagaagaacattttaaagcaggaaatgactaagggttatataccccaaggaagaaggagacattgatggggatggcaagaagaaaatgtaagaagacaggactgggaatctacacaagcaggtgatggcttggggttagaaacagcaggatagagggtcctgattctaaggaggataagggagagtgagctagaaagttagcaccaggaatcatcttatttcttgggtttgggtgaagcagaaagttttcccccaaacttcccagaaagatctgatgggacatgacaacctactgccctcccatttgttgaacactactagtttcctcatccttcttgaccaaagagatacttcatgtccttagagacacactctctagaattctttttttttttttttgaggggacagtgtctcactctgtcaccaggctggagtgcagtggcgtgatcttgcttcactgcaacctctacttcccaggttcaagtgattctcctgcctcagcctcccgagtagctgggactacaggcacgcaccaccatgcccagctactttttatatttttagtagagatggggtttcaccatattggccaggatggccttgatctcttgacctcgtgatctgcctgtcttggcctcccaaagtgctgggattacaggcataagccaccatgcctggcctctagaactctttaaatggcttcctggagaatctgtcagaggtgggtgggaggtaataaggaaagggagattctacctccagatttctcagcatttctcagactcccttagggagttgacctctgtatggactttcttgtgaccttgactagccctggaggtccagcccattgttaagatagattggttctgggtctacttttggaaaggcttgagaggcctcaatagctcagtttgactgggctagacttggaatggtttctgaaagttggatgggatgatgaaaggataatttgctccgtatttgtctttccttggcttgattctcatgctgaattgttacctggattatctcatttcttccctcttcaagtatgagaaaggggactgaggagaaaggaacaatctgcagtcaggctgacaggctaggagggaggaaagatagacttgggaacataaatgctttattatgatgggtcagaaaatgcataataggcatggagaaatgaatatggggcaagacctcctgaagatgaagtgtctggaaaaggactgaagggcttttgcattgtgggtatgtatgtccattttacccttccttaaggggtaggagttatgacctgaacatctgcacagtaggtctcactctataggcctgacattgcaaagcaccttttccagccttcctgggaggtactcacaggaggaaagacctgggctagctccttaggggtgagatagtaagagggagctgatagcaggtaggaacatgagaagatggtatatggtaacacttctagaagttgtgctcacaatagatgtggattaataaggtttacggcatcatagggcctgggagatgaaagtatagtatgtaagggctgtgctatctgaatgacaaattcactgtcttactccatgcgatagcccttagaatttaaaatacggactagttggtataggaacctttagagaagctgtaagtaagaccacagtaggatgtaggatttaattggaccaaagggaaaatttgaagggcatttatcatatgtatcccagcaacaccttgtgaatgaaatagtgtatgagcatcactagtttgtctgtagggtcacaaagtggtattcaattagaggtatgagtaatgtttgagtcacagatctttggagaattaaatcaatacagattttttttttggaaggtgaatgtacttttcttccagagagtttacgtaaacatgaatgacatacagccagtttaaaagaagaaaaagatgtactggcttcaatcattttgagtgacttgacttcacccttcctgccctttaaaactgtagatttatttgattgtttctcttcttattttaaattaaaacctagtttaaagacattatcgacactatcaagaggctttgtctgttttatggatgataaagcaaaatgagatgtcagagagacatctcttatttgaaaaaagtcctcagacaaagtccagagtacttttgttgatatacattataagtataaggagacacttgttggtggggggcatttttgctggaatgaagagatgtctgtggagtggtgagaggaagatgaaggaagggtattcaaagggaaagaagcaatccagtcaatagagttgagaattaactcatggaatagaggaagaaaggggacaaacactctgcctcatgaaatctcagctgatctttatcagtagcatatgttagtgcccctagtttataataaagaaatggaagatcagagttaagcaattttctcagagtctcaaaccaagtaagttatacaacttcctatgaagatggatctttctgctcccagggttatagcctttgtgtggacttgcaaattgttattttatttggtgagtaaaaagattgattccttcttttctcccatacatgtttcagggtcattcctacgttggaatttgcctatgggattctcgagagtagaaccatgccatgatatatctctccatcattgtattcccagcagcaagtgggaacattacagataatgaatgaagctcctggagggagttggagagctgggactctttattcaggttgtagacaacacatgatcttataagaagcagtgatactttggacgtcactcagggggctgatagatttcttggatataggacaatatatttatgaagagcagtgtgtgtgtgtgtgtgtgtgtgtgtgtgtgtgtgtgtgtgtgtgtgtgtacacactgagcctggcagtaagtatcttgagagtctagcttttcctttcccttacactggaatggttccttgctagcctgtgctgttaacctgccctttacaaccatatagtccccttgactaactcgttcatcagcaccttgttactagccactcagagtaatacagtctctggatagaaaggtctattctgtgccttcttgtttcaagtctataatagacacaatcagtctcatttttctgagctcccatctctaggtcgtagatggaaggcaagcctggttggagtagctgctttcccccttgtgttagaaagagccttttgcttatattcctgatctgactgaattgccttggttatgttctctgccatgtctcattcctagggctatatgaatgggtagggaagtgggagatgttgtaattgtattcttagagtcggaaagcccttaagggttttctaatctaattgtttcatttagtcatattgtttctttacttggccatcacctggcctcacaggttagaaataactatcttgtatgattggagttggctggcagtgtccagagctgggggctgtggagacacacagtgagggagaaggagggatatctgagttggctccctgcttttattgtaaccttttgatgaggagtggggtggtgaacacaatcagtctttaaatcaatgcattgtcatcgggagcatagaatccaattattcccatgtgtctgggaaccaaataggagaaaatgagctgaaagtgaggtaagaaggatttggattagacattcagaaaaatgggctcagtggaaattataaacaacggtgattatggaattgtcttctatgagaggcttctaaaaatagaaatcattttcttggatctgagctgggtatagaggtctttatatatggttatggagggttggtcactttgattgtactaggatagttgtaaaaagcacagacagctgagaaatccttgttcttcaaagtaggtagccctggggaaaaaggctgtcagggattccgggctgagcaaggtgggggaaagagatacaggagggctgtgtgaggacatctacttcatcagagatctgccactctcaccctccaaccctatgtgtacacacccactcttcctccctctatctctcatacacacactctctcacacatatacgttcacacatacttacacactgaacacacacactgaacactgttttttcttcactcccatgcttaattctagtgaagatgctgaaggaacatcacatcagactccctgtacctcttgcctgggcttgacagatacagttcttattgctgagaaccagaccagtctcttagaactcagctgccattctctgctgccgttgttcacagtgttcctttacggaagcagctcctttgtctctgggatcgagggttttcctgaatccccaagcgttgcccagcccctgtctgagaatagctggactgggatgaaaccacagtgagggagtgggggtggaggtagagatggcttctgcgttttctgcagggttgggtgcactctgcttaattagcatgagaatcgagagattttcgtatcatccctaagggatggagaggaaaggagagcaaaggctctagttctgtcctgttccatcagggattctgagtctgggaaattgactgctgtcacattcccccaatcctctggggaccatcggacccagagtattgagaaaagctttgatgaagccggctggtggatctccactccagattttccagctgtccctgtccccccccaccgctcagagagcaggatgctgagatggctcggtgatgcagaaggtatgtgctttttcagttctggtgctgatgctgtgtgtgtggtgaggtctctgtggcgcaatggacgagcgcgctggacttctaatccagaggttccgggttcgagtcccggcagagatggtcacctggcaggtgcctcttttattttgactactgtcatgctaggttgataattatatttactcctccctggaggctataggggagagaaaggaaacccttttccttgagaatcctggaccttctctctttttgtgtcccctccctcttcattctttctgtattcctctcttacagattttcattgtctagtagaggctcagatgtctgctgcttctctctgttcagcccgactgacatagcatttgaatcctttacttcacagttagataattggcacatagtgaccaagacggaaagtcacaggttttggaaccactctgattccctcctttgacctctgagaccacaaaaaggcagattgtcccatatgccaatgagaaaatgtccaactgtcctctgaggtaacaccttccttgaccagggttatcatttggtggatgtcaggatgtctctgcctgacacggtcatgcagagggtagtttcttgcactgtctgtcagctacactttttcattcctgaggctttttgcgctcaagctcatcactcactttctgatctgtcaggtgaaatgtaatcattgctctttgtctcagtggaataaaccacagagcaacacactaattaccagcagcaagctggatgagcttgtccccagaaactcgaaggttttatacttaaatgctatttactgtgaaaagtttgtacccctttctgtttgtaggacagacttcaagtgttgtatctgaatgttatttccataattcctgattttcaaaaagccatgttctcaccacctctctcctcccgcgttcatttttgctgtctccttgtcttgtctaatgggccacatttagccagattgggagcttggtcagattgtgtgatgtagcttggatttctattttgggctggtctggctctctcccttgcatattgctacctctagcttattagctagagggagctgcccctgccaggaaccgacctccacctcaggtgaacccaggaaacctgagaagatacgtgtcccaggactgctggggagactcagcatctctcccatgcgggactctggacgggcgaccagaggacacagctgtgcacttgcactctaaggaagctgaggtgggggaggcgggaaagtccacagaggagtttaaagcagccatgccaaaaggtaaggggaattgacagtgtagataggaggaccctggagggagattgatgtttgctgcttccatgtgtgcatgtttatagcaaatggaaacttttgaaattctcttgaagtagtatggtactttaaagacttaaaattcttctagtaagagctaacatagctttacatttctgggttaccttggtggaaggccaattcagatgttatctctctcccactggtcccatagatatgccctttggaggacatggtgtggaccagaagttcctgggcattctttcctggagccttttgtttattgttaactcagcctatcctagatatttttgctttaagccctcgcctgaaaggaaacattagtgtgtggtagtggtgggggaaggggaaggggaagggagttcaggaaaggggtatgtcacatttttccaccatagtctagaatactgcatacatcttcctgattctccctccatcatagcatggtaatggaggtgcttaaccatgagaattccgagaaggtaaggatattatttctatatcactgttaaaattcggggcaagggcccactcgatggtttgctcatttctagagtctttctggaaataatgatcagacttcatggaattgtgagggctggggatgaggtggaaacagggcgggtatgtgtgcccaaatagacagtgtgttgggatttgtttaaatgtttgatcagaatttgatagagccagctctttatgtgaagctctatacctgtgagaattaaaatccacagataattccccaagcctgattttgtcttgtcatttctattccctatcttggaatcagaagacctcggtataagaagcagctttgccaagttgccgaacatctgcactttaatttgcttatgtattaaaaaaaagagtatattgtctttcctacaagtgtaaaaaatggatgaaaagtttgttgtacagcactgtgcaaatatagaggctatgttagttttcaagttgcttttgtctttctcctaagcatacggggagggtacctggacacaaaatagggaaaggaaagggtctgaatgctcagcccctgcctggaacatccagggtggctgtgtgtcatcagcaggggcagatgccaccctgtgctaccctaagaggtctgattggagttttctagctggcaggatccttcagagagcatgtggtccctctgtgccttagataggagactttatctcagccaagtaggtagagggtcctcctggctaccccactcaagggaactagaagcttctgcttatttaactattgcctagccttcaactctcttcatcctgaggggtggtgttttggagacttgaaggatatcaccaggactggggaaaagattttccacatgagtaaaaattcttctgtgtgtgataacaattttcttctgaatacataagggatatctcctaatttatgaatatcataattactgtattttaaagatactcagaatgtaaaatagaaatgggtgtgttttttatgaagtcacttcactgtaggactcaaatacttcagagatgctggagctgatcattaattgaaaagtatgcgggcaggatatgtgttatttattattgtattctcagtgcctgaaatatggtaggcatttgatggatatatttgaaagaattaatgctgacttcaattgactataaattatatagataggaaagagaaagagattactcctagcttccagggagcaggagcacagacagtatcttcaggcattaattcacttatttaacaaatattcatcaagcacccacttcatgccacttcccattattccaggcaccaaaatagtagattccaccttcttcatggaatacatattcccatgatgaagacaaatgacagacaggtaaataaatattataatagctaatagcattttaggtagtgatatgtactatggaggaatttaaaggatgcttggggatggagagtgatgtgatgaatgatggttgtggaagacctctcagaggaggtggcttttgagtgaagacctgagtgaagtgagggcaatgagatttaggggatgggcatttcaaacagagaaacagcaagagcagagactctgatgtgggcaccagcctgattggaaagctgacaggtcagtgtggtggagtgggagggagtgatgggaagagttgggattagagtttgatacagggcacaccatctaggacaatgttctcaaccctatgacatccaactctgccttgttaggtccattatttcttcaattcttctctactaacctgcaatgaaattcatagataacataactttcccatgcccataatgaaaactaatcaatataataccctaattgtaatgtaagagaggaataaaaagaaataaacttataataaatagtatacattttagtacataaatgccataccagcacccttgcacctatatgaagacccaccctgaacgcaacagctacatatgcagaccagtgcaggcatgctgcactgctgacttaaatctcatgagggatgtcgttcaccagcagcgtcctggttttccagactggtgaacacttttggatacatttttgatcaaagcaaagtaagtcttcttgcaaaatgcgcagtactttgcattcctggaaaatttaggaagttttaaatcatgcagaaaactctctaacatataaaaacaagttagactctaagctcagataccaacacataggttttatttttgttcgtttgtttgagatggagtctcgctctgtcacccaggctggagtgcagtggcatgatctcagctcactgcaacctccacctcctgggttcaagccattctcctgcctcagcctcctgagtagctgggagtacagacgcgcaccaacatgcccggctaatttttgtatttttagtagagatggggtttcaccatgttggccaggctggtcttgaactccttagatcaagtgatccacccgcctcagcctcccaaagtgctgggattacaggtgtgagccaccacgcccagccccagcacgtaggttttaataggtcattcaggagtatacatcatgggtcaattcctctttgtgagagatgcccttacacattctgggactcttaagtccagcatgctcttcctctctacagctaaccgtggcccccaatcattataacaacaaaaactattccatcaaattttcaaaccacttctgaggggcaattctagtgccactggcaatcactgacataaggcttggaggtgaggcttttctaaatgttagtgagcaccactgatgagtttgagtggaggttctggtttctatgttaaaaggcaaattttatctgttggtagagaacagacagagatagaatagacaggtagagaatagagtcagatatgtaggcaggtttagaggtctcctgggcccaaagcctttagaagcagcaagctgtggcacggtgattcccaagccgtagtgctgtaccaccagaggtggagggttttgtaacagtccacctacaaaagtgatttatcatctctggagagcttacctggccgagatcacttatttttaaactagttatttttatttattgtcattacaatagttattacctaatggtaaaaatgttcattttgcttatatgtaaagctgtagcaaatagaccttatcccagaaaacatgattgcagtgtttatgtccttagtacttgctataaattataatggaatagaatatctttgaactatgtgctccttggaagttagttggatctctttgcttccatggtggtaatattgttcagtgatgattcttttgagagaatgaatggtgagaaatggcgtattatgataagggaagttgataaccatgagcatagtagaagcagcaacttcatggtaatgacacagatctgagtctgaatctgaggtctcgctatttacttgtatgaatgtagacatgcactaagtctaagtcccttgattttctcatctagtaaatgatctaactaatacctagaattaaatagggtaagctgtaaaattgtcgaggtagatacataggaggtgcaaacacaaatgctaacctccttgtttgtagttattctttctaaaccttcagattgtatggatcaagctagtttcttggaggctgtgcgtgaggacttgagagattttatctgtggcccatgtttctaaccatcttcttcttcaagcggagtcctagtggaagtcaagacatgcataatgtattttaaatagtagttaccctccaagagtacgttctgcccatagtgatcactgtaaaaggcctagatttttctctagggctacgagcagagaagtcctacaacaatcctcagattctagtccccgtggaaagggtcgtgttaggacttctctgcgtggggcaatgccgggctttaaagcctgggatgagggcgagtgtgtctattttgagaaggcaggttggtgtctacagagatggaattagactaaaaacaaatgcctggggagctgggaagagacaggagacgagggcttggctgttgtattccaggacaaatctttttctgggtgaattccttgctgtggacccagctcagtcctgaatctgaagggagcatcttctggcaatcactaacaattgctgataacttgtcttcctttgctacatctatagaccacttttaaataaggaaatggtaccatccaaaatatccgactgcttagaacaagttatattattttgagggagcatgaaacttaaaaaaattttctattatgtataaacttctaacggtgctttttaaggtttgtgcttaagcatgtctctaatggctgaggagagtgatggcttacttccaggttcaggaagccgggcctcaagtggcctgtactaagcacagcatttctctgaagtcgtagactttatgctacattctagatttagggttctatttcattatgtctgcatttttaaaatacaaaaataataatctggctccaaatattagagtaaaagtgatgcctggcatgccccacatatgggatcctggcatgcataaattataaaagcacagaactatattaatattaaaaatgaggggtagtccctgattatccactcagagatgaaggtgaaagtaatctagagacaggttaaatagagggaaaactgacagagttgaatgaataataatcattaattcatttactcactcaacaaatgcttatagtacctgctgtgtgctaagaactgagcgaggtacaatgatgaacaaatgagacagaggtgatcacagaaaaacatgtaaagctgcaatggtaaatgaaggagagatccatggagcaaagaagttctgtggctgggagagttgacctcttcaggaagatcaaggacagcttcccccaggaagtgtctcttgacttgaatctgaaagataaggaaataactaggcaaagaatgaaggaaagggctttctataaagagacagcataaatgaagcttttgtagagggagggagaatgccgtgcatgaagggctttttttctttctttctttttttcaacagagtcttgccccgtttcccaggctggagtgcaatgtcgcgatctcagctcactgcaacctccgcctctcgggctcaagtgattctcctgcctcagcctcccgagtaactgggattacaggcatctgccaccatgcccagctaatttttgtatttttagtagagaccgggtttcaccctgttgtccaggctggtcttgaactcctgacctcaggtaatccacccgcctccgcctcccaaagtgatgggattacaggtgtgagccaccgcactcggccggatgaaggactgtaaagcgagtttggtttcacaatagagagtgagggagaaggccgcatgaagtgaaattggagagacaaggccccaaagggccttgtattccctgtaagctttttctctccttatcctaaaaacaatggaaaaccactgaaagattttaagccaaagaataacatgattggatttgcattttggaaagattactccagctgctgctcagaggacagagtggaaggctgccaggatagatgcttgagctaaattagaagttaccaccagaggttgttgtgaaaagcaatattagccaggattaagggggtgataatggtgctggtggtggtaatggtagatatagaagaaaaagggttttagaagtatttatgagctaaaacatgcaggatttgttgatggattagaaatggtacaaaggggaaagagttgacaagaaaggctctaagatttctggtttgcacaccattcgctaagatcagaaacacttgaagaaggccaagtttgggggagaaaatggtgagttcagtttggagcttctaattttgaggtgcttttgagatatagtagaggagatgtcacacacgtatgaaggtgagagtcaggtcaggtctgaactgctgatttaattttggaagtcatatgcatgttggtggaatttaatgccaagagtatgaataagatcacataggaaaaagtacagggtgagaagagaaagggcctaagaatgagctaagaggaacttcagcatttaataacagagtaagaggagtcggagaagtagtggggagaggtagaagaaaaagcagaatattataatttctgaagcccagggaaagaagtatataagaagaaacttgtttgagtatcctatgctgctgagaagtcagtagtgatgataactaaaatgtatccactagattatgtgacatggaagtcaagggtgatagctgttttaatttctctggagtgttaggtaaaaaaagcagatggagggagttgcagagggagtgggaggtaaggaaacaaagaatgcatataggcaacttttagaagtgtgggcatgaagacatgaagagagggtggtgaggaagctatgaggagtcaaacaaaaatatctttttttcccttactttaaaacttttcgttatggtaactctccaacataaataaaatgagagagaatagcattatgaatcctcatttacccaccactcagtttcaacagtgatcaactcgtgaccaaacttgtatctgtagttccacacatcttaattgtttttttagtgggagatacttgagtttctgtgaaagctattgggaaggaaatcattaagagagagagaaagagagagagagagagagaacaagagcaagtacataaatagaagccaaggtttttgggaatgtgataggggatcagagtgccagagaaggcattagcagtgggtagctggagggccagctcctccgtgacccttggaaggaaagaaggtagatgtttagatgaagatttgcatgttgatatctggaagatgaggaaattccatctgatgacagtggctatccttcttcttttaaagtaagtagccatgtcttgaacagagaataactgagaaaaagagaaggtgttggatgtttgaaaacaacagagaaatttggattagttactgtggagagtgagaggatgataataatatagcagagaaatgcagaatatttactaggcggtgttaaggacccatttggaggtactggactgcctcttataaacagatgcaattcacatacatatattaataggtgtctatttaatttgtatgtccagctcgccaatgtttgccgtcataatacagggtgttactctattctctggtggaggaatgtgtccacacgcatgtgtatatgtgtgttgtacagagggcaagggtatatggattccacaatctactgaatgtatggtcagaatatatatatcgcaaaagagatgattttaattcttgaaatgtgggtgtgtctgagtccgttctttttcacattcattggttcagggcgccacctgctgggaggcttgcacaatgtcaccagccagcttttccaatgcaaactctaaataaaatatcttttttcttggtaaagtcatttttttttctttgagacagagttttgttcttgttgtccaggctggagtacgatggcgcaatctccgctcactgcaatctccactgactacaacctccgcctcccgggttcaagtgattatcctgcctcagcctcctgagtagctgggattacaggtacccgccaccactcccagctattttcttttttttttttttttttttggtatttctagtagagatggagtttcaccatgttggccaggatggtcttgaactcctgacttcagttgatccacctgactcagcctcccaaagtgctgggattacaggcgtgagccaccacgcctggcaagtcagtgattttgcacacacagcatttgcccccatgaagtttgagtttcatgtttttcagatactattttattttctgtattttggggtcaaagcaggaacattaaaatacgttctttcccgacttgattttggtcttttggtgaaataccacgtcttgcctgtttaaatgcatgtgttgtctgtaaatctcatccatgatctatatattcaagaagagaaataaaatttcagacttttatctgaaataccattaataagaaatagattatctgttaaaggtgtttaaagtacagatgatccaactgtgtagattgagcagtattattgaacagtctcctaaaatttggattttgttgtccgcccactttctatcccaagttattctcctctaggttctccaactgaaatgaatatgtcttcatagtttccaagctgatctctaaggaatctaatctgctacaaattatttttttaaatagtcttgtcttaacctgagtatagtgtcctttaaaacttttcctctaagatccttgcatcacgctactaaactgctcccaatttctagattttcattaaataatttctttccttcaaatgtactgtatgacaaagttcagagataaattattctaattacttctcctgtaattcaaaaactcttaattatgatcattatatatgtatacacacacatatgtatacatatacatatatatatgcacaaattcagtcatgatacacacagaatttagagaaacacagtataaagtgtaccgaatcattccccaaggaaaatagcattagttcatctactcatccagtctttatgaagtgcctgctgtgggtccggaactttgagaggcactggagatgcattgggaataagacaggcatggttctgggtcttaaactgcttgctctggagtgtggaagacagacattgattaggtcatcccaacacattatggagggttcactcttaggggaagtacagagaacaccatggaacatctggaagctggaggatcatcagggcttcctggaagaagtggcattaagctgtgaaggaaggagagaaaaaaagcactccaggcagtctgtgagactgacatctaatgccgagagccagattgtggaggaactgataaaccttcttaaggagttaggattttatcctaagagaaaataccagccaatgacagatttgaagagtgcgtgcgtgtgtgtgtgtgtgtgtgtgtgtgtgtgtgtgtgtgtgtgtggtgaccaggcttagatttatagtttggaatacagtttgaaaagattattccagaagaatttggagaaagactgaagggaagctaggttggagacagtttgagggtatatgtgatatggtgttggcttgtattagagaagtggagagaaagagagagaagaggataaaactgagggtcatttaatatatcaaatgaataagactcagtggaaatcagctgtaagaggcaaagggaaaaggagagcccaggatgattcccggctttctggcttgagcaaatgagtgaatggaagtgccttttaatgagaaaggggataggtagtggaagtagattctcaaaaaggccagggaagatgagtatttccactttagacatgttgaatttgaggtgtcaaatatgtaccagtagatatgtctaatgggcagctagatatatgagcctggaactgtgaagagaaatctaggtcagaaatacaagttaggaatgatcagtctgttgtgagtaaattgatgtcttgggagtggtcaatatctcatagaaggtaaaataagaaaagaagaatggctaagaagaagccctgaggaacccatcatttaaggaatcatcagaggaggtagaagcgagcaaatgagactggccagataggcaggaagaaaactaggagggctggggccagaatcaatgaacagatgcttttaaaaaagggtgcacgagccatagtgtcaaatgttgctgataagggccgacgtttcctttaggatttggtaatacatgggttgtcaagggaagcttcagtggagtgacagaagtggacattagtgagttcccaagtgagtgagaagtgaggaaggagaagcaaggagtgtatacaattaaaacatttgttgtgaaatggagttagtggatgggatgggagctggagggagaagtgtgtggtttagggagtggtttgtttgacagggaatggtagtgaatgtttaaatgctcatggaagttatctcataaagacaaacattgaaggaacaagagagaggagtaatcaatagatagtttagtatttgaggaggcagtcagagataatgataatagtagtaatgaaagttgttcccctcttattcagtaactgttctgagggcatgattccatttaattcctacacagcctctcctacagaggtactttttattgttatcctgtttttttgagataaggaaactgaggcatagaatggtactctgagtaaccaacatcacatagtaagtggtggagacagcattgatacccagtcaatctagcttgagacttgcaccattaaccacagtgtcctattgttgggttcacaacctggctgtagactcaacccttagtactgtaactgaagagaaggtggatagagcaggtacaaatgcagttgtcagcttagttagcatcatgaattttctagagatgccataacaaatttccccaaactgggtgcctcagaaattacagagatttattctgtcaaagttttggaacccagaagtccaaaatcaaggtcaagatgtaagcagattttcactcctctgaacaagcttcttagcttgggtctgcatacttccaaactctgcctctgtctttacctggccatcttttctgtgtctcagatctctctctgcatttctctgtaaggatgcctgccattggattccaggcccgccctaaatctacaatgatctcatctcaagatccttacattaattacatctgcaagatgctttttacaaatgaggtcacattcataggttttaaatgttaaaacctgggcatgtctttttggggtccactgttcaatccactgcagttaggagattggatgagtttctgacaagtggacttgataatttctgtgaggtaacaatgtgggttatttgctgagaatgtgtcccaatgtagagggatcaaacatataaggggagtgaagaaatcttgaagtatcattattaaaatatgaagagtgagctgactaggaaatgtagtttgtggagcagtgtggagaaccagatgaagtttattgtcatgaatttatagttgtgtgattttccctagcaatgattagcagcccgggtgcaaacactgaggaagctgagagttaaagtatctagatcctggaaagagggggtgtgggagggaaggaaggacaaaggcagagggggttaggatactggcaagtggctttccatggaaggccatagaggtgaagaagtcggatagaggactactggcttggtcaaaagcagtcaaaagagtgggagtaactgagtgaactcgctataacgatactaggccattctccaagtacagaatatttattactttaaacacacaaaaaaatctggattagtggttgcagtaaaggcaaatagaagtttaatggagatagaaaactcaaaggaaagagaggacgggattctggacaggccactcgtgtaaccccagagtcatgcagaaaaatggcagggcttggggtggtgtgtgtgtgtgtgtgtgtgtgtgtgtgtaagccttggcacataagatgacaatttataacaaagcaattattttattgtgggtttatgatacattttttattatcacactcctatcaccatatctggcaactattttatactaagcactgtgctgagagatggggaggttgcaataaacaagacatacaaagtcctgactctccagaggcatgtgttctactaggagagactgacaaaaagaaaagaaacagaaacaagtaaacaaagttgttgcagtttgtaatgagtttgttatgaagggaacagattaagagattgcagcagagactgatgggcagactaactttggttaagatgaaaaagaaggcactttcagttggtgacatgagaagtagggagatgaatactccagggaaagggctgctacaacaaagtgccacagacctggtggtttataaacaacagaaatttatttctcacagttctggaggctatgagaaatccagccttgggaagtccaaggtcaaggcagatacagtgtgtggtgagggcccacttgctgacccatagatggctatgtcctcatgtggtggaaacaaggaacaaacttccttgtccctctttcataagagcacttatgaaatcccattagggatcccattaaggatcccaacagggaatagttttgctgcgtcatagattacatttctgatcagcttcaccaaggtattctttcttgcttcccaaagtgatactatccattttagattgtgttttcattactgataataccagagactttgcctcccaatggccccatgccatcacattgggattgggatttcaacataggaattttgtggggacacagacattcagaccataacactagtcagggccgacactgatctgttacttgactcaagatagtgtggcgtgagagcagaggcgaccctaagggccccgtgcacatttgggttacattaattttttattgtgaaataaattatacataccctagggtatatggaatgtatatgaaccatttagaaagtataatcacaataataaaataaacactcaggatcctaccagtcagcttaaaatgagaacatcactagttctttgaagactctcgggtgaacctcatcaattgcattctttctcagtccctaggggtaggtaaccaatcatcccctggcttgtttatagttttatttcacatatagctatccccaaataatatattactttgttttgctttttaaactttatgtaagtggaaacatattcttatatgagttgtttttggcccctttaccattgtgttttgaggtttgtccatgttcttgaatatacaacagtttatgttcattaatggataatgctccatggtgtgagtataacacaatgtattaatgcattctgcctttgatggacatgcagtttttttccaggttttttgtctattataaacaatgctgttggaataatcttatatctcctagagcaagcaatttcagattatacacttgggaattggattgctgagtcatagtttatattcctgttcggtttcaccagggtatgctttcttgctttccaaagtaattctatcaatttttttttttttttttttgagacgtagtctcgctctgtcacccaggctggagtgcagtggtgccatttcggctcactgcaagcttcgcctcccaggttcacgccattctcctgcctcagcctctcgagtagctgggactacaggcacccgccaccatacccagctaattttttttgtatttttagtagagacagggtttcaccgtgttagccaggatggtctcgatctcctgacctcgtgatccgcccccctcagcctcccaaagtgctgggattacaggcgtgaaccaccgtgcccggcctattctatcaattttagattacattttcataactgataataccagagactttgcaaactggaggaagagatattacctggtaactacctatagcagtggccacagtgcaggaaatgggtggagactcccaggccagtggcagtttagtcttgcattttccttcgtccttccctgacttccattctcagacaggaaatagctctcatcacatgaatgtgttcagaaggcttttgagaagctgagaatgtcagaaaacaagagattcaagttagaggcagaaatgaaggaacattcctttgcacacagctttcgagggtctagaatggccatcaagcaatagattggagtggactgacttgcaaatgttttgctcagaattcctggccctagaatggaagtgttttttgtagccatgaattcttatagtcacagtaggagtgactgtgagaactgcatgttttctaatctcttgtccacaaaggtcatggaaatctggatgtaactctacctgaaattctgatgccttgacacacaggccgaccttacccctgcatttcctggagtaagcactttttacttaaacaccttcctctctcctctttttctctaaagggtcagccatgaaccattcacattagaaaaacagcctctaatcttcacaaaatccatgaaaagtagatattattcccacattagaaatgggaaaactaaggctcagagaagtgagtaacttggacaaaatttcatagcttctaagtagcagatttgacagtcaaagccacatctgtctaaattcatctgttctctctctctctggctttccgtggccctctaattctttgtattgtcatttataaccatgtggcgcttaacaagtgacttaccctgtctcagctttagattaaaatataacagttcacgtaggctcaataaatgtttatttaaaaatgaaaatcactatatggacttacattctagtaggagaaatgttgttatgtttgtctcctaaatctaagctcacagcctctggctaagcatgtgaatttagcttgttctacagctaatatgtgcctacggttaggtaggtcttttctataaagcatgttccagtgtattgttgcttatctattattttgcttttataccgttttgctgactgggagcatatttcctctcataatggtcacgatttttagtggaggctttcccgggatatgctgttaccaactcacaacatactctggctctgatacttgtctcagagaagcagtcaggcttggcagcacaaccagcatgccaatagcctgttccctggggacactgctatcgctgtctcccagacactttacctctccagttgcacctcagcctgctaacaggggagtcaaaagcagagaggaggcatcactcgaaggtgggaaaaataataaaatcagtttctagcttgatgtggtttggaaagatcccttgccaccacctaagatgcacctggaaggtaaattattcagacttttctcctgcacaaccttcttgctgcctccaacgtcatcaccatctcacctgttttcctcctgctctactgagctggggagagaggtgcgctggtggttcttcaatggacctctgaaacactgggaaggtcaaggctgtgatctgaggggttgttctctgtaaacaaaaatacgttactctcaaaacagaaaactgaaataaaaggagatttttaactcttctaataatcgtcatgccacatgaagaaagatattaggagccttacgtttcagttcctgtttgcatctggttgccctataacactgtagcctctactttagtaaataaaccggggagaggattccaaagaatagtaaagattacagagtacagcaatagacgagagaacagaggttttacatagtctagaacgggggctaggacgctttttccagaaagggccagagaacaatattttaggttttctgggtccttctgtctctgtcgaatattactatttgtttttatttaccattctttgagaatgtaaaaaacattttcatcttggagtccatatcgaactgcattgcaggctgaattttgcttgtagtttgccaaggcaaactctagaagctcattctcagttttactaccataaaatatcattttttttaaaaaaagagatgtaatatggtacattttgagagtaagcaatgagcagaaatattaggaacaagcattaataattaggtaagaatttctagaagacaaaaatgaaagggaggacagagattatgagggagtaattgaaaggagttaggggtgtgagaaagagacagatacggaatgagaatggaacagtgtcttgagcaaaataaagaatctgggaaagtggagtaaatgaggcagattttctccttagcatagttagtggcaaatataccccagccctgctgtgtaatagagtgaatttgtatgggtatttgagaaaaaaatctactgttatcttgtttataactacagtcttcttttgactatatgtggcaggtcgtaggtctttactggctttcctgctaccttccgacactgtggtttagcacttgttcagttagctgttgtgatttaaaaagaatggaaagtgtgaaacacccgcttgttgtaggttggcgaggattggtggatgggtgggaaggatgcacagcaataaatctgggcagctttctatggattgtgaagcaaattcactaataccagccatctaacttttgccaaactacgaatcttttttcccagatacttaactatcaggaaacatttacagatgaagaaagaagaacatctgaacacagactgaggtaatagagaaaacaaggaaatgaatctcaaatatacgacgaagttggaaaacagaacaacaggatacttttagcttgaagtaatttgaaagacagagactgctaaataccttagaaatattggatatcacaagaaagggccaacttccctcagaattatgatgaagcactgaattatgagttaaggtctcttggcttcagcctttagcctactccttgcaagtcttgtgactttaggaaagcaatttagattatccaagtctcagttttctcatcagggaaatgcagagagtattttttttataatggtgtttttatttgtatgtaaatattaaagggcttgtaagctataaataactatgataatgacagagattttattagtcttactatttcatttgtgggttgactttactcctgcataataggaagccacttgtgtacagtgacttgaggggtttccaaaggattctctgcctgtcagatttctcctaaattagactatgatgaaatgactaaatcgttttcatggagaccaaagtttttatagcctcaggttaattgatttaggaacattaagatgcaaatgttatcaaaaacagggctcaacacaactgtagacatctaagctcttgactaactagtcacctagcaatgtatgaagcgaatgggtcagaattgccactaaatagggtggcccaaagaacttggggtcaccgtgaaaatagtaaatgcctatcaagagaacacattagaggagcaaggcataaagaagagaggaaaggccttctgcaggtgacttcacaattttgactcaggctggtttgttctgccgagaaccaaggtctttgagagatggcagcctttgatctttgttcctttgcgttccttctcagtgccattgtttttctgaacaagtggatcccaggactgtgtcccaagtaatcctcctagagcaatcgtggtctggacagctaactttacaccagcaagtcatgcttcccatccaggggccactgctttcagactcccttgcttccagttgggaatggaagccaatggcatgggcatggctgtgacacatcttttataggccagggtggttaaaaagcagatgctctttctctgctttttcttgtcagcttactggatattgatgccagtggcaatattggcaaacaaatcttgaagatagatggccagagaaatgatggaaactgtgtctgagtcactgcttggaagagagccaccaaaccaggagcacttacatccgactggaatgtgagcaaaacattcttctttttagtgttaaaccattgggatttttggttgatatagcaactagtgtcactgagattaatgcaactactgatattactaaactttctcctgagatgactctgtgttctgcaaattgagatctgctggcctttttgcttgatctgtaccctttactctttaacttctctccccagattctttctgctttctttgcaatcatatcttcaaatgaataatgaaatcaacaaagagcaagagaacagaggagtaatgattattttattaatttattttatttttctgtttgatttgactgcatgggaataaccaagaagctgagtagaaatcaaggacagatgtttgtgggcttaaactcctgtgctggaagtggaaaaggtataaacagtaaaggcttttaagtttcagtgacatgattttaaattgagagccaagagaaaggatactttctcacactttgcatacataggatcagtttcttgtttagttctgactttccaattggcagagtgcccttgaaatgtcagctttgtcagtggagcaccctgcagtcattacctggtctataacattggcacaggacactcagagagtggtttctacctaaaaccaagctatgtgctgggagcctaggtatagatacttggataggagagaaaactgagagcgcaggtgttgaagtagatcaaattacacacacaaaataagtaaacaaagaaccaaaaatttaggaaaaaaaaacatgcttacaaaagcacgtcaaactggtctctgagatcttataattttcccatttatacatttatataaattgtgttcacaggtacactcacaatatgatcaagtagtgtttgtacctaaaacaattgtcacagtgtgttatttgagcagtagtattgagtaagatgatggcttctaaataagaattactctacagttacttagggattaagtggcttaactggaattgaaaacatggtttttgagggctccctcaatgcttcccatcactagtttatacaggcaatagagaactcatttgtcttgaataattctttagctttccacagctgaatatcttgctcttggggaaagagcttgctatgatgtgctggattctggctgagaatctctgggtttgaatcttggctctgccacttacagtctttaggaggttggttaagttacaatatttctctctacctcagtttcttcattggtaaaatagaaacaatcataggacttaccacatacattcatcaaaggaattaaatgacctaatagaagcaaattattggactagtaactgctaaataagaatcagttgttgcccgtgttgtttttctgttgtggggtaaatgcatttccttctgtttgagcttctgtttgactggaacacagttgatcatgccttctgactccttcagccttctctagaatgtatttacaacactggatgtccataaccagcctttccttccaacagtcacgctgggctctagccttttctgtggagctgtaattccttctccttctccatttctccattgattcttattttccttgcaattgagtgctttcccctcaatggcagttttacacatgctaatccaatcttctagatctggttcaagggttataatgatgaaggattttcatcaactggaataagaatacttaatccttaacgtttttgacagccagctctgtggcacgagacgacagtttaggagcaaaagacaacaatagctgtgataatgacacaggcagtcacagaagggcaagagaacaagctgtcctaggatgcttgtgtaagaaaaattgcacgtcttgtcttcctaattaaaggctaaaaaattgactgaattgcatatctaatagataacatgactgtacaattaaaggaattatattaagtgtcttttgcacacaggaccttttactatacgtcttttggtggcacaatttttcaggatgaaaagtactcaaggaaatcgtaaacttaacccagtagttttattcttgatattataattttgaaattattttacgtatattctagaataaagcaaataaataaataggttaataacatcaggatccagtgttttcaatgtatgagaaaagagaaataaatatagaaacaaagaaattaggaggggagataactctataaaatcaaatctaagttgtaaatgttagtatgaacataagattatatataacataatgctacacatgatctatataatgtatatcatgtattatatgcaatataattcatctatataatgtatctctaatttatctacatataatctataagtctctctgtatgtgtgagtgtgcatatgtggagaaaaagagagagggatagggaaacagagacagagagtggcacacacacccacacacacacacacaaacacatgcacacacacacatagggtgggggtgagaacgaaaatacatgctttatccactctgtccaatgaaagaacttagaaaccattatgaaccagtagtattgagcacacctgacattcggttattgttttctaaaataccactctctctaaaaagaactagggctccttatggaactggctgattctaggtttcagacagggaatatttacagtgattttaagatctcctattgtatcaggagtttctagagaacaattggggtcttgacaaaagggtacagcttgaaggggctgtcactgactgagtttgggacaatatgagcatcaaaaaaataatgtttgtgattgatcatattaacaaaaatgtccaagtccaaaatgacattcaaaaaaaggaaaaagggaaagataaaatataagattatttgccacagtagaggttattagtacaccaactccttactctgaaaattagtaattaaaaggaaataattaagctgcaccctgtttgtatttgtcaggatagagaggttatgctgcagtaacaaacaacctcaaaatctcggtggctcaaagctaaaaagtgtatttttcactttcactgcgtgtctctcctggggttacaagcgttccgattcatgtcatactcacttagggaggtgtctcatgctttcactctttggcactcataccatccagtaaaagaggagcggatcccaaggagccattgcttctttattcggagttctggtgtgagagatatgtaatgccaaactagggactggaacaaagcacaccagagccacagctgggcctcagccaaatcacagacctgtgagcaagaaatctgtgtcattatatgcaactaagattccggattgtttgttaccgatgcaaaaactgattaatacacccgttatgtatgcagaaggaaaaaaaaacacaaacaccagactattggtgaatagcccaaatgacaactgtattgtgttttaaaggacgagctctgtgagtattgcagaagattcccagcaaataagtgtagaaggaataataccagtagaagtcaccattttgatatcctgaaataattggttcaggaaagaattatcaatgaattttggaaccattaggtaaaaacattttaggaaatagaatatttgctaatattctattagaatgagtcctaagtaccaccctacagatatttgctctttataatgggtgaagtaccctttaaaataaaactgtcatcatgaaactacacctcactgacagtggacagcttgacattgtgtgcctcctgaggtaatgcattatgaagtaacatcactgcctttgaattacccttacctcaaatgttttatctgtgtgtaatcaagacttttgttcagattcccaatacataaggagtacaggagacacaggtatgtgttaaacaatgctgtacagcaaatcaggaaagtgacaattttataaagctgttgtttgagactctttaacatgcccatgtcaaggggatacaaaaccacagtctgtgcttcgttttattctggtttaaaattagcaaaagatatagaacaactacatgcagtgtgtaagccttgattggattctagtttgaaaaagctaactactaatgtatttgttgttcagtttgggaaatttgagtatggcctggatgttgggggatatcaagatatttttgatgtttctgggtataataaaggcattgaggctgtataagagatttttcttagtttaggagatgtatgctgatgtagttagtggttaaatatcatgatatctaacccggtttcaaatgcttcatcaataaatttatacagggacacaaacatacatacaattttgcagttaaggcaaaatgttaacatttattgcacctaagtgatgggtacatatcttattctgtcaaatttaaatttgaatttgtttgtaataaagcaggaaacaaaatgaagcaagacactgcacggggaaaggtgtgtgtgtgtgtctttgtgtgtgtgtgtgtgtcagtgaaattcaaagctgtgtctaaaatgtcatcctgatctagaagtctcgtaaggtcaacatggcctcagctgttttccttttcttttatatttttaaccattttattttaaaagctctgagcctgaatgattgctcttgaacttctatgtcttccatattttttccttgtccaaagaataatccactaatttaggagaaagagtcaataattacactttacttgactcagagcctcctggagaaaccatatattactggatagcctggtgcttctctgttttataaaaaaatcttggatacaaaatttatttgttatacttgatatattattatttttcctatcttcccacctcttctgccctgtctcaggaggtgtttttcttccttaaggttaactataccttttctccagagcacatgtttttctgatgcctctagaatcctaatctgatcttttttaagctacattctttgtgaactttttgtcgattcttggccttcagcctctctctgtgtctttctctctcgtgcgcacacaaatgcacctgtctcctccgtttttaaaataacttttttctgctactacacagccttccaagatgttttgccctatctctgttcttcccttgacagctatatttctgctaactacagtccatacaagctattgccattttctggccacttactcatttttctcattcatttctgaaacaactctcactaaaataacacaaaaaataacttgatagtcaaatccaatttttttttctgtactcacatatctttctctttatgcagcttaaaaaaattcagtaccttttccttcttgaattttctccctgtagcattcaggggaccttaatacagtttcagaagaatttctaatgccgagtgactttactttttttttttttaattatactttaagttttagggtacatgtgcacaatgtgcaggttagttacatatgtatacatgtgccatgttggtgtgctgcacccagtaactcgtcatttaacattaggtatatctccaaatgctattcctcctccctccccctaccccacaacaggccctgttgtgtgatgttccccttcctgtgtccacgtgttctcattgttcagttcccacctatgagtgagaacatgcggtgtttggttttttgtccttgtgatagtttgctaagaatgatggtttccagctttatccatgtccctacaaaggacatgaactcatcattttttatggctgcatagtattccatgatgtatatgtgccacattttcttaatccagtctatcattgttggacatttgggttggttccaagtctttgctattgtgaatagtgccacaataaacatatgtgtgcatgtgtctttatagcagcatgatttataatcctttgggcatatacccagtaatgggattgctgggtcaaatggtatttctagttctagatccctgaggaatcgccacactgacttccacaatggttgaactagtttacagtcccaccaacagtgtaaaagtgttcctatttctccacatcctgtccagcacttgttgtttcctgaatttttagtgattgccattctaacaggtgtgagatggtatctcattgtggttttgatttgcatttctctgatggccagtgatgatgagcattttttcatgtgtcttttggctgcataaatgtcttcttttgagaagtgtctgttcatatcctttgtccacttattgatggggttgtttgtttttttcttgtaaatttgttggagttcattgtagattctggatattagccctttgtcagatgagtagattgcaaaaattttctcccattctgtaggttgcctgttcactctgatggtagtttcttttgctgtgcagaagctctttagtttaattagatcccatttgtcaattttggcttttgttgccattgcttttggtgttttagacatgaaatccttgcccatgcctgtgtcctgaatggtattgcctaggttttcttctagggtttttatggttttaggtctaacatttaagtctttaatccatcttgaattaaattgtgtaaggtataaggaagggatccagtttcagctttctacatatggctagccagttttcccagcaccatttattaaatagggaatcgtttccccgttttttgtttttgtcaggtttgtcaaagatcagatggttgtggatatgcggcattattcctgagggctgtgttctgttccattggtctatatctctgtttttgtaccagtaccatgctgttttggttaccatagccttgtagtatagtttgaagtcaggtagcgtgatgcctccagctttgttcttttggcttaggattgacttggtgatgcgggctcctttttggttccatatgaactttaaagtagttttttccaattctgtgaagaaagtcactgatagcttgatggggatggcattgaatctataaattaccttgggcagtatggccattttcacgatattgattcttcctacccatgagcatggaatgttcttccatttgtttgtatcctcttttatttcgttgagcagtggtttgtagttctccttgaagaggtccttcacatcccttgtaagttggattcctaggtattttattctctttgaagcaattgtgaatgggagttcactcatggtttggctctctgtttgtctgttattggtgtataagaatgcttgtgatttttgtacattgattttgtatcctgagactttgctgaagttgcctatcagcttaaggagattttgggctgagacgatggggttttctagatatacaatcatgtcatctgcaaacagggacaatttgacgtcctcttttcctaactgaataccctttatttccttctcctgcctgattgccctggccagaacttccaacactatgttgaataggagtggtgagagagggcatccctgtcttgtgccagttttcaaagggaatgcttccagtttttgcccattcagtatgatattggctgtgggtttgacagggtctccctgtgtcacccaggctgtagtgcagtagcacgatcttggctcagtgaaatatccacctcccgggttcaagtgattcttgtgcctcagccttctgagtagctgacattacaagcatgcgccatcatgcctgtctaatttttttgtagaggcagggttttgccatggtggccaggctggtctcaaactcctggcctcaagtgattctccttggcctcccaaagtgttgggattacaagcatgagccaccatgcccgtccccaagtgactttagaagactggaagtacactagtgttttccaagcaggactggtcactttattggaccctttcccactaaactcaaggccacagttgttctaattagctcaaactgctgccttctcccaggctcagttttcctcttccatttgaaaccctttgtactcatgtgttttccccttatttgcattctgttggcttgtccctcatgactcctcagcatagtcccttatactgtttggggtgtttcctttgctttgacttgagttctttctgttacccagtctcttgtccactactctaagttgtgaactcccttgaaatctgggaaacaaaggaagagctctttgctttcatttctctacacctaaaataatctttggctgaactctcaagctaatacgagaaaaactgttcaggcttgtcagaaaaaggaaacagaaagctaaggattttaatgggaggagccttaaaatcctgtaacacttgtgccttctctttcccagggattagcacacagttaaacagtaagagctagtcaagtttctaagtgaaaatagccagtagcacttcttcctggctaactttcaaaacttcttatcatgcctcaccactattcaataaagaactctatctgatatatgttcttaccctatcaaaatacatggtcatccctgaagctctgacttaaggactaggctgctgtggaaggagattccagtgaggtaaggcctgtgggaagttttctagaaaaagcccaaagaacaagtttctaatcagaaaattaggaggaaatagtaattatgggtttctgtgatggaaagaagggctggtattgactatattccagaaaagaaaaagctgtaggtagtccgattttaaaccctcagttaactgaaagtatagaagtcgtcttttatttcactacaactgagacctaaacaaaagaaagtacatttggctgcatcaggaattagaatatattgttgaacgggttgaccaagatgaagtctaaaaggaattataactttctaggtgtgttggtctccaggtatcttaattgacaaatttatattcagaagaggtcttttgatttctggctgaaggagagagaaatgtagggcctggggaagagttcctaaataaaagataacaatgatatgacaaaatgcctatcatgtaatattagatttgggccgggtgcagtggctcacatctgtaatcccagcactttgggagaccgaggcaggtggatcatgaggtaaagagatcgagaccatcctggctaacatggtgaaaccccgtctttactaaaaatacaaaaaattagctgggcgtggtggcggatgcctgtagtcccagctactccggaggctgaggcaggagaatggcgtgaaccccggaagcggagcttgcagtgagccgagatcgcgccactgcactccagcctgggcgacagagtgagactccgtcccaaaaaaaaaattatatatatatatatatgtatgtatatattaggtttgaaacatcagagtataaaactgtattctgaaaacagtattcttgcagttaaaaaaaagtctagtagaaaaactctcattccataaactccatattcaagaaatgtggctttaaacatttttctgtcacatattttaacttctatttcctttagtccattaggtgtcagaaaatttatttcatttcatttaagattggaccccacttttcccatagccatggttaaattcctacggtttagggaacaaattagattcataaaactattcttttgaaatttgttgtgacatcttttatagacctgttgagtatataataaatatttctaagtattccgtcagatcaaagttgttaattgtattcttcgacttccatatttttgcctttttggctacttgaattataacttattgaaataagagtgttgtagtctcccactctcatggtggatttgtcaatttattccttgaggtctctcaatttttgtttatatctgttaagtctatttaatgaggtgcatgcaagtttagaattgttatattgctttggtgcctaatgtttaatcattgcatagaaatgctgtctttaatgaagctatttgtcttgaagtcttctttgattattattaatatagctatactagctgtcttttggttagtatttggcggctgtgtcttttctcattcttttcttttcaacccttcagcattttcatgctttaggaaagtcttttttaaatagcataggaactggagtatgtcttattccagtctgacattgtgttttaaccggcaagtttaatttatacgtatcagggtaattgaaatatttagatttggtgttaccatcttgttttttatttttctttattttttgagtcagagtctcactctgtcgcccaggctggagtgcagtggggcaatcttggctcactgcaacctccacctcctaggttcaagtgcttcttgagcctcaaattcccaagtggctggatttacaggtgcccaccaccatgctcggctaatatatgtatagatagatagatagatagatagatagatagatagatagatagatagatagatgatagatagatagatagttttttttttttttttttttgtagagacgggtttcaacatgttggccaggcctcgaactcctggcctgaagcaatccacccgcttcggcctcccaaagtgaggcactgcatttggccccatcttatttattttatattatactgcttttttctatgtttgctttcatcttttaaaaatcttttctaggaccaatctttatatatattttctttgatttttgtttcataaatcctgtcataaactctgtggggacaagtcattttcttaaaatacaagtaaattgcttccggatgtagtttttttgtgtaactgtttaggagcaagttctctttctctctttttaattgaggtgaaacccacgtaatgtaaaagtaaccattttaaagtgagcaattctgtggcatttggtacattcacaatgttgtgcaaccaccacctaactagttttaaataacaacgtctattttgctttgctttgtaatgcattttaatagaccctacgccaggttattttagccttcttgaacaaggctacacatacccagcactttccaaaggagatgtggactgtccttggcctaattcctattcactttgctgttagaataaccattagtctaatttgaggtcaaagagaagatttctttacccagtcctacctgttcttgctgtggttgtttttgtgagctggtatttaactagggtggttttgtctaatgaagaagattcttgtcctacttactgttcattgtagatgctaaatactagattagaagaaagccatccccaataagcgttgttattagagctctacctgcctttaccctcacctagagcacattagcgtaagtataattccctagatggtaaatggaatgtgatgttgcaagagtcccacactctcaccctaccccaaacccttctctgatgtgctctagatgttctaacttctgaacctatgtacaaaagagaggaatgtgaacagatgacactttagccactaaaaaaattaatatgtgtgcagtgaagggtttgatctcagttgtctgcttggtgcagataccatttatgtaatctagaggggcaggaaatagagaaggaacacatatttttctaactatgattttaggcaaacagattttgggtagcacagtttattaaaggtactgattgctcttatcaagtcatttccatcagtttctcacactttggcaataggtgggctgaccgtgtcagtttttttttctttgaaatctgcttaatatttttaatggcactttgaggtccatagaccctggtataccaacggcacagctagagggtctaaaggaacatagaatttgggcctcttgtacctagcggtgcttctaatataaaagaattttttaaaacatcagtctgactatggtcagataacctgcacacccaaaagtttggtgatagctcagatttttttctcaaaatgagatgccataggatggctcctgagagaggttttatgtggaccatggtcttggtcttcacttagaataatagtctccaatctcgtccaggttgctgtgaatgccattaattcattcctttttatggccgagtagtattccattgtgtatatatactacagtctctttatcctcattggttgatggccatttgggttggttccacgtttttgcaattgcaaattgtgctgctataaacatgtgtgtgcaagtatctttttaatgtaatgacttcttttcttctgggtagatacccagtagtgggattgctggatcaaatgatagttctacttttagttctgttaagggatctccatgctgttttccatagtggttgtactagtttacattcccaccagcagcgtagaagtgttccctgttcaccacttccatgccaacatctactatttttttattttttgattatggccattctttcaggagtaaggtgatgtcacattgtggttttgatttgcatttccctgatcattagtggtgctgagcattttttcatatgtttgttggccatttgtatattttcttttgagaattgtctattcatatccttatcccactttttgatggaatttttttttcttgttgatttgtttgagttcattgtagattctggatattagcactttgtcagttgtatagattgtaaagattgttttcccactctgtgggttgtctatttactctgctgactgttccttttgctgtgcaaaagccctttagtttaattaaatcccacctattgatctttgtttttattgcatttgcttttgggttcttaatcatgaaattcttgcctaaggcaatgtctagaagggttttttccaatgttatcttctagaatttttatagtttcaggtcttagatttcagtccttaatccatcttgagttgatttttgtataaggtgagagatgaggatccagtttcattctcttacatgtggctagccaattagcccagtaccatttgttgaatagggtgtcctttccccactttgtgtttttgtttgctttgttgaagatcagttggctgtaagtatttgggtttatttctgggttctctattctgttccattgctctatgtgcctatttttataccagtagagtatgctgtactggtatgctgttttggtgactatggccttatagtatagtttgaaatcaggtaatattgatgccttcatatttgttctttttgcttagtcttgctttggctatgtgagctgttttttggttccttatgaattttagaattgttttttctaattctgtgaagaatggtggtggtatttgaatgggaattgattgaatttgtaggttgcttttggcagcatggtcattttcacaattttaattctacccatccctgagcatgggatgtgtttccatttgtgtgtgtcgtctatgatttctttcagcagtgttttgtagttttccttgtagaagtctttcacctccttggttaggcatattcctaagcattttattttattttgcagctgttgtaaagggggttgcattcttgatttgattctcagctcggacgctgttgatgtatagaaaagctactgatttgtgtacattaattttgtatcccgaaactttgctgaattatttcatcagttctaggagctttctggaggagtctttagggttttctagttaaattatgatatcgccacaaacagcaacagtttgacttcttcttttctgatttagatgacctttatttctttctcttgtctgattgctctgcctaggacttccagtactatgttgaagaggagtggtgagagtgggcatccttttcttgttccagttctcagagggaatgctttcaacttttccccattcagtattgtgttggctgtgggtttgtcatagatggcttttgttatattgaggtatgtccattgtaagccagttttgctaagttttaattataaagggatgctggattttgttgaatgctttttcggcatctattgagattatcatgtgattttttgttttttatcacatttcttgactggcatatgttaaaccgtccctccatcccttcatcccttgtatgaaacccacttgaacgtggtgtactacttttttgatatgttaatggatttggttagctagtattttgttaaggattttaggatctatttcattggggatattgggtctgtagttttcttttcttgttatgtcctttcctggttttggcattagggtgatactggcttcatagaattaattagggagggttccctctttctctatgatgtggaatagtgtcaatagaattggtaccaaattttctttgaatgtctggtagaattctgctgtgcatctgtctggtcctggactttttttgttggtaatttttaaattaccatttcaatctcgctgcttcttattggtctgttcagggtatctaattgttcctgatttaatctaggagagttacatctttccaggaatttatccatcttttcttggttttctagtttatgcacgtaaaggtgtccatagtagccttgaatgttcttttgtatttctgtggtgtctgttgtaatatctcccatttcgtttcttattagcttatttggattttcttctttccttggttaatcttgctaatggtctatcaattttatttatcttttcaaagaaccagctttttgtttcgtttatatttcatatttttttgtttcaatttcatttagtcatgggtgtgctcctgtcctagagttttcacaagagttttttcctctttctgtaacattcttcccaaggtggctgcataatcaactccttcaagtctttgcttaactggtaccttctcagtgaggcatagtctgactacccaattgaaatcacattatccactcccccctgcagtcctgatccatttttcgtatcctgctttagtaattcttatttcagtaacatgctatagtgcgcgcacacacacacacacacacacacacatacacacatgtacatctgttgatttaaggagtaaaagaataaatgaaaacctacctaaactgtggctcatttcctcaaagacttatcaggtcactgcaagctctaaagagacaagatgttaatagatgatggcgatttactagtttatccctaaattggatgtcttttgcatttttgtttcccaaaggactattggaactttctacagcataggatttgaccactttaccatagaccagtttagagaaagtttggaagactggtaggtcttcatgatctctggaaataatcctatagaagcatctatatgttttgtccaggaggaaagctagtcctgcagtaatggttctaaaagtaaaaggtattgacattggtacagtactatgtagtttacagacctctctctaccctgccattttatttaatcctcataatagcacttcctattatctctatttagttgatgaggaaacagagcccagagaaactaaggactttctgaaaggtataaggctagttgtggcagagagccttcacacttgtggttcagtgccacatttttactaatatcactttctaaattatatcagggcaaccttgcattagttgttccttttgggattttgtaggaaagtattcaggagacagagaatgttctaatccacaacccatgaggggatgtcagtggtgtcctagtgtgcagctgtatgccctgggagcaaggtctcagtcattttccacccagatctgaatggatattttctacaaggctttcagaagaaagagaaaaattttttctttctcacatttcacagtctttttccagtttcttgctgttcccacaaccttgacagctataagcataataataggtaacatatattgaacacaccatctgacatgaactattcatgaattacacacttacatgtgatagcagcggaagcctgtctagagcagccactgtgaagatgctggctgtagcaggggaggcgtggctggacctatgtgctccacagagcctgtgggagccaggaacaggtgggagccctgcctgcttctgagttggtggagtgggagaccggcactccctgggcatggctgcagccacccagctgcagctccggacccagcgttgctgtgctcttgggggtttggaagccccctctccccctgcagtctcagaagtgcctgctctcactccctggcctctccctgcacctggcatctgctccagtgtggagcaaagttgtagctgagcccaggcactgtcatgaccttgccatgaacagcctgggtgcctgtggacaacatgattaatggagacaggaggaagacaggatcccgggcagaaaggggtgggtcctcagtgaagccccatcttcaaaccaaggatggcccgaagcatgggggccaggctgtcagtgttgggtggagtctgcagcctggagtgagaacttacggtgcttttttcaggcccacctatgactacccatggaccaataactacacactttctctcttctgagcccataaaaaccacagattcagctagactcacatagacatcgggactactagctgcggaaggagctacccaattcgggtctcctcagctcatcaggatgacgtgcctccagataggaactactcactctgggtctcctctctgctaagagctggacactcatcgggacgacctgcctgtgtataggagctacccactttgggtctcccaaaagatgttccgttactcaataaagctcctctctaccttgctcaccctccagttgtccacttagttcattcttcctggacatggggcaagaattcaggaccgctgaatggtgagactgaaagagctgtaacacaaacagggcagaaacatgcccccccactcactatgttgcaggctatgagaaagaggagctgcggcccagaccaagggggtccacgggcgagggctgtaacaccctctttggaggtctgtggtttctggcatctgcaagcttttggatgctactgcattccccctgtccagacgccagttgcagtacgtctggtccagtcgtagcctcacatggagccagtgcctatgctggcgcctggagctgcctgccctgccgcagcagctggagtgcctggctgtgtgcagtggctggaccccacacttgctcgctcacacaccccttgctgctctgtgcctggctcacccttggcaggcatgggatctgggctggtagtgtaggccaagcacagcctgccaggctgagtgggtggaatgagcccagcaggcccaagcaagactcaggcaaaggtgccactggacacaggggtttccggctggtgaaacaacccctgaaacatcctgtgacacatataattcacttatatttcacaccaactctatgtcgtaggtattattattggcccatttttcgtaaaaggcccagaaaacacatttgagcacatctcctagctagaaagtggtagaaatggaatttgaactcatgtagtccatgctccagaaaagcattgtccaataaaaatataatgcaagcacatgtgtaatttaaaattttccagtagctacctcaaaaaagtaaaaagagacgaacgaagtcaatttaatatatctgattaaacccagtatatccaaaatattatcacttcaacatgtaatcactataaaaatcactcataagacacttcacattttttgtattaagtctttgaagtctgatgtgtattttaatcttacagcacatctcaatttgaatgataaattttaatcagaaatatttcattagtatatagatttcatagaatttagttgaaaatgaaggtttatatatttaacttatttcaatcatacttattttcaataactgaattgaatatgagttttaaattaaaactaaatacaatataaaattcagttcctcagttgcacatttaggatgtttgagagctatgtgtggcttatggctgctgctgtgggcagtgtgggtttggagtccatgcctgcagccatgataccatattgtttcaatatcaggggagaagccctcttgtcaccgtggctctgcccccatttcccctatcttggaatagtctctttccatcttcttctcatgggcttttcagatcttctgacatttagcccctaatattggcatcctcatattcagcattagtattcaaataccccagtttatacagaccatactccctacttggggaaagtgaaacttcataaaataaaataaaaaaagtgtaggtttttcctgttatttctgcttactagatcagaaaatttgggatgacccatcctgggggaaaataatagccagacagatttatgccaaaccccattacttaatgaggttccaaaatagctcctgcaattactttttaaatctccttacatcctcctttggctggcgtgggtgaatttgggagagaaaagtgatttgtcagaaagagaaaggagaaaactccccctagaatttcatttgctactgcagatttgttattcgggaaggctatggaagtgaaagtgagaagaaaggagaggtgtgcaaggcagtggaaaaagggaagactcaggagttagtgtatctctcttgtattctagtcaatggtaagcaccaccttaaaaataaggaaaatgattatttcagtcaccttgctcatgtatgccaggcctagatccaaaagcaatgggttgaggactatgaaaatcttcctccacctccccttgttttaattcctctctaggtgaggtggaaagaggagatggctgtctctccagattgacctggagcaggttttgctgctgtgactgactgtctttctgagatgaacactaagctgaggaatattgtgaacccataccaacatagtagatgcaggaaaaaaaaaagtgggaattgtgaaaactgtgatgtattagcctgttctcacactgctatgaagaaatacccaagattgggtaatttataaaggaaagaggtttaattgactcacagttctgaatggctagggaagccgcagaaaacttacaatcatggtggaggcgtttcttcacagggtgtcaggagacagaatgagtgccagcagggaaaatgccagaagaatataaaaccaccagatctcatgagaactcactcactatcatgacaacagcatgggggaaacaactcccatgatccaattacctcccactgggtgcctcccacgacatgtgggaattattacaatttaagatgagatttgggtggggacccagaggcaaactataacttcccacccctgacccctcccaaatctcatgtcctcatgtttgaaaatacaatcatgcccttccaacagtcccccaaagtcttaactcatttcagcattaacccaaaagtccaagtccaaagtctcgtctgagataaggcaagtcccttctccctgtgagcctgtaaaaccaaaaaaccaagttggttacttcttagattcaataagggtacaggcattaagtaaatacactcattccaaatgggagaaattggccaaaaagaaggggctacaggccccatgcaaggccagaatccagcagggcagtcaaatcttaaagctccaaaatgatctcctttgactccatgtctcatatccagggcacactgatgcaagaggtgtgctcccatggctttgggcagctctgcccttgtggctttgcagggtacagctcccccgccgggtgctttcacgggttggtgttgagtgtctgctgcttttccaggcacatggggcaagctgtttgtggatctactttctggggactggaggacggtggccctcttctcacagctccactagccagtgccccagtagggactctgtgtgggggctcctatctcatatttcccttccacactgccctagcagaggttctccatgagggctttgcctctgcagcacacctctgcctagacacgcagacatttccatacatcctctgaaatctaggcagaggttcccaaacctcaattcttgtcttctgcgtacctgcaggcccaaaatcacgtggaagctaccaaggcttggagcttgcaccctctgaagcactggattgagctgtacaatggccccttttagccatagcaggagctgaagcagctgggatgcagtgcaccatttccgaaggctgcatagagcagggggcacctggtcccagcccaggaagtgatttttccctcctaggccactgaggctgtgatgggaggggctgctgtgtaggtctctgacatgccctggagacattttccccatttacttggtgattaacatttgccttctcattacttacgcaaatttctgcagctggcttgaatttctccccagaaaatgggtttttcttttctactacatggtcaggctgcaaattttccaaacttttatgctctgcttcctcttgaacactttgccacttagaaatttctcccaccagataccctaaatcatctctcttaagttcaaagttccacagatctctagggcagggacaaaatgctgccagtttctttgctgaagtgtagcaagagtgacgtttgctccagctcccaagaagttcctcatctccatctgagaccacctcagcctggacttcattgtccatatcactatcagcattttggtcaaaaccattcaacaagtctctagcaagttccaaacttttccacatcttcttgtcttcttctgagccttccaaactgttctaacctctgcctgttacctagttccaaagtcgcttctacattttcgggtatctttacagcagtgccccactgtctcagtaccaatttaccgtattagttcatactcatgctgctatgaagaaatactcgagactgggtaatttataaagaaaagaggtttaattgactcacagttctgcatggctggggaggcctcaggaattttacaatctaggcagaaggcaccccttcacagtgcagcaggagagagaatgagtgccagaaggggaaatgccagacacataaaaccatcagatctcatgagaacccactcgatatcatgggaacagcatggagaaaccacccccgccccctgcccccaacagccccatgatccaattacctcccaccaggtccctcctacaacacgtggggcttattacaattcaaggtgagtcttgggtggggacacagagccaaaccatatcatatgagtatatgtgatgttgtctaacttatctgtgatgaaagtgaggtgaaagtgaggtgtacttcttgttatgtatgtagatgagacagcctgagtcaactgaatctacacttcagcctgggggacagtagatctggaagccatgtagctataaatccagtgacagaaatttcatccatcctcagtgccctttagattttacaaagatttttcacttccattatctcacttgaacttccccagaaggacatagagcagatatgactagcctgctgacactgagattcagggggtttaagtggttcattcggggtcacaggaccaactagccacacaaccaagaaccaggtctttgactttagcttcctcttcactaagctttgctttcctctacaggtaaaatgtaagacaacacaggaatgcagattcaattgttgtaaaggaacattatagactttctagactctagagactaatgccaacttaggttcagaataggtttcatagccacttctctacttattcctgcctccaccttttttaataggaacatctagaatttcatcatttctctccaactgacccattgttcctctccttcctgatttcatgcactctttctttccttcctccctctttcccttggtcctactttttcttcttttctaccaaaaatattcattacatacatttgatgtattagatattacaagagtaccagaaaaataaagatgaacttaaaaaaatcatttcccaacacaaatggttttataaggtgaccagatagatttttttaaagttgcagtagagaaacagtagtgtcatataggagaaagtgttttataggtgaaggtggctaagggttgcaaaagtcttcattaacatggagagtcaaaagagcaaggtctggaagggtaagtaggaataccctaggcattataaggtagagaaagggcagaccatgtttctggaaagtttactttgcatgatgattttgccaggttttatctgccagttcacttattgtgggcatggtgtcagggttcctaatttggttgcagactatggagccttggctgaagcacaaacgattctcacggtagaagctaaaatgaggggaaaggctgggagtaagaatgacattttgctctcattttttttaaggccagagaaggcagttattaaagccaatgtgcaaatgtaaacccagttgggggaattatttgaggctaggggattttcttgctgctctttaagtgagtctccgttgtcttagactgatcttgtttttacaggcaaggttaggcctgaaagccaagaataagtgatcctctggcttttgctgggatcatgggaggatcctagagctgtagggcattctctatcaaggagaatcaattccagctggggaatttgggtacttggttgctgatctgagcagacaccagcccattaacagatgtagttatgttcctactttcaatccaagtaggtgacttgaaaaaagaaaagttgttccctgaaatgggcacagagtgatgtgataggtctagtagtctttgggagggaaaaaaaacaaagtaggtctatggtgaccttgtggaatgaatcctgagtcgtgccttaaggggcaagtcagaatctcacatctatgcattttcacctgcattgctttcacctctagtttcttttgtccacccagttctatggccgctccctggaacttttcttctctgaacaataaaatttgaacatttcgctctctaaccattgcctacctggctctctgactgtcctttcaatcctgtggccagttgtccctgccctttgtctcctcttgccccattcagatctgcaattttcgacctattttctcagtgtgtattagtccacctgtcttcactgccttttctgttaaagttggatttcatggtcctgagcattaataacccttgccatactcttaattctatggacccaccattctactgttacaagaccccaacagtctgactttcttgaactttctccagagtgactgagcactgatggaaaaaaaaaaaaaatcacacaaccatgaagcttgtgccactatgtttttaagactctcagactcaaccgagtcctaccttttcagtggattgaagtagtctctttttgttatcctgtttttttctccatagcactcatcataaccagaaactatctcaggagtgtgtttgtctattatcttcctccgctaaagctccatgagaaagagcctttgtttattctttcctgtatctccagcacatggtacatatggagtatggcacatgctcagaagatgtttgttaaacaaacaatctcagcttagatgtcactaactctaggaatttttctctaatccctatctcttaccaagtctgactttatggatttttccttcagcatcccgtgtttttctgtcatagcattttcacactgtattctcattgcctgtgtacttatttttatctttctctaggtcagcaatacacaatagaactttttataacgctggaaatattctatatctctgttgtccactacagtagccgctaagcacatatgactatgaaacacttggaatgtggctagcatgactgaagaaatacatttttacttttattaatatttaattttaattaattttgagctgaaatagtcatatacggttagtggcaactgttggagagcacacacgactctcaattttcagctctatgaggtaagggactgtctgtatagctctctgttgtatttctcagggccagcacagtgcctggcttgtgccgacaatatgaagaaagttgggcacataatctgtagattgtgtgtctcttagtggttattcttttccatggtgagatgaaagttcaatgtgaaaaaattctgtctcaaaaggatttggatatctacactgatggatttaagatatttaaatgatcattattgggtatgtgaaaggtcttcacatagctagcattagctggtaggcttaagatatctgaattcactgtagaaattgcttattctgactcaactctgaactataccatagagatttttaaaaatgtgttttcataaattctctggaggtgtacaaaatgagaaaaacgaagaagacccttactgggaatgtaacactgtctcagaatggcgttttcactttatttctcctttgtggttgagtggtttcagtgcctgcaattcttgagttagaaaattgatttgccgatttggtaatgtgaattaatacttatagtttgtgtcatataataagcattcgtctaagtgtttcatgtacattaacttatgtgatcctcacaacaacttcattaaataggtactactattatctccatttgacagataaggaaatttaaacatagaaggggaagggacttgaccaagattactcagataactcagttaagtggagaaatgaggatgtgagcccaggcattctggttccaaaatccattctcacttggattgcctactgtataattacttgtactatcttgtactatctctctgttcttagcataattctgctcttcattatggctgtgaaattgtgtgtgtccacatttggtgaaagtttcctaaagataatattttgggttgcaggctgggaggtgaggggactggaaggaataaagagtgggaggatgtagctatggcccaggggacaataattcaccttggagttagaagcctctgcttctaattccttctaatttattctgttatgaaatttggggagatatttcctaattttattgttaaaatgacataaaatatgtatgtgaaagggcttcatcctgagcaggggctgagaatctgatgtattggcacagtggctagtaaggaatgtcaggtctcagagactacacagttacaagacttagcggtttgcctgagactggggcagaattcagacttttctgtctcctgcagctcaagaattcatgcccttgtaggggtgaaagagaggtagggatctgcctacttcccgactttattttcttttttacaatcccagattttctgtgccttggagctgcctaaatctcagagcaacctaatgagtaggaaatcacctagatcacaagcaggtgacaatatcgaaggatgaagggaatactttttgtttgtttttgtcgctaaaggccagtttagtctctgtataccccccattccccccatcatccttcaccctcagggaatgaaagttacctctaagtcttgaagcagcccatgtcatacctgtgctctccagcctgctggtacctacaaatagttacaggcattcttcttctggttggtcccagctctgagtctactgagccatggtgtgtctgccttgagagtgccttttgcaattctgtctatgatcatacctcaggaaagaaatggcaagccacagaaattatgaaaagtttagagaggcagtcttacaaagaaataaatttaaattgtctcttaaagctggaaaaggagcccgtggatatatagagcaccaaaatccataaaatttttaaaatgaaaataaatagcaatttacttattaaatactatattattattcccctggtatacatgacacatccaacatttattaagctcagactatgagctattcattgtgctaggtgattcacacattatcctgtttcttttcacaacattactgcaagataggcattatatttttattttacagacaagaatcagagagagagaggctaagtaaccctcccaaggccaactagctagtgaatgaagtaggatttgaagatgcattaaaaatgttttaagtgtctgctttttctactacacaaagttgcctgtcttgaagcacaaaggagaaggctgggacaactaattaaagaaggatcttttcagcctacagtagcattgtgtttatgttgaatcaggaaccagcacccttgtctctggtagtggagtcatcccaaagcccagatgtactctaccaagacagcttataatctggcttgtggtaacatgagattttatgaaaatggacctttattatgtgatgtctcaaattttattgagatttaatatatgagaccctagtctaattccatactctttgcaatttcttctcaatttgatccctcctttcactataatatccctgaaatgaaaaatgaacatccatagtcaccagtataaagcattgaattgaaattttgaggctctccttttcagtggtcttaccttcttagggaactcttgataatatacaatgtatgatattgccaattaagagactaaaatgttaaatacttctaaccactacagatttccaagcatcctttataatattttaagagtatttttttttcacttcaagacaaacgtggtaccttaaaattcttaatttacatacattttctatatcagacagagtaaactaggtatctttcagcaaaggaggaaggtccagaaaaaagtgcagaacatagcagagagcattcttgagcacgtagctggggaaacagaggtaacagctgtcacataagcagaggccctgtaggcccgggtggcagatacaaggtctcaatgctcttacttcacctttctcttcctgagccctcagtactgagaattcatggctcaagtacatgcaaccactaccaaattgattcgagttgacatttgtaacaaaaactattctctatcatgctttatttttttttctgcctcggggaaatggctgaatcatttcacaaatcccttaggatacagagacagagagaagggatagatttaaatgttttcttccttttgatttagactgactataatgcttgatgataaagcatgtacaacaaaaataaacactttccataattatattaatttacggatagcaatgaaaatgatctgaagggatttctgcagaagagttaatacctgtagtgcttctctctctggatgatgggattatgagtgttgttctttgtctgcttttgtttggctacattttctggattttttttcagtaatgatttaaattgcccgcttttgtaacagagacaaaaagaaatgggcttaataaaagaaataataatttttttgatattcagggtttttttttacctttttcgcataagcagcctagactaagaataattggccccaaataaattagacatacaaagcaaaaaggtaaaatgacattctcaattttggaaagttgatttttaaaatgtaaatttcataaatcattgcaaaaaatttgtatggtatgtcaagttaccaatacttaaaaaaattcagtgagaacatttgatttgttttcttttcattttttcttcggagacagagtctcgctctgtcgcccaggctggagtgcagtaatgcaatcttggctcactgcaacctttgcctcctagtttcaagcgattctccagcttcagcctcccgagtagcagggattactggtgcacgccaccaagctcagctaagtttttatatttttagtagagacaaagtttcaccatgttggccaggctggtctcgaactcctgacctcaagtgatccacccacctcggcctctcaaagtgctggaattacaggcatgagccactgcacctggccttgatttcttaaaattgttgaatactgcatacagaatacttttaagcacatgtttaagatgtaaaagtacaccagctcaatgaatagctatgtacctaccacccaatttatgaaatattagtattaggttggtgcacaagtagctgtggcatttgccattacttttaaatgggaaaaactgcaattacatttgcaccaacctaatagagtgttatcattatttctgaagttcccgtctgtcctctggttctagccactttccagttccctgaagttacgactaaattttgtgtcttattatctctctgcttttcatttaagttttataacaatgaacaatatattaagtttttacaaatttttataatttaaatatgccatgtgcagtgactcacgcctgtaatcccagcactttaggaggccgaggcaggtggatcatgaggtcaggagatcgagaccatcctggccaatatggtgaaaccccatctctactaaaatacaaaaaaaaaaaaatatccaggcatggtggtaggcgcctgtgatcccagctactcgggaggctgaggcaggggaatcacttgaacctgggaggtggaggttgcagtgagccgagattgtgccactgcactccagcctggtgacagaacaagactccgtctctctctctctctctctctctctgtatatatatatacacatacatatatatgtatatatatattttctaaataaataaaatgttatatacattcctctgtaacttgctgatcttcattatgtcataactgcagttcattttcacagctgtaatgtattccagcacatgagtatccatgaatatgccacaatttatttgtccctttgacaggtttccccgttttttggctttaacagtgctgctaaaagtcttgctgggactgggagtgctgtgtcataagatgtatgtgtcttcaaaattaatagataatacagcattatgttccaaacaagttgtatctccctatgctaccagcagtgaataagatttgttaatctgtaagaaatattaaatccaatttttctcccagaattcagtgtgttctggctacgtcactgcactgaccctcaggaaatttagatgccttttaatattgtatagctgagaaggggaattgaagtatcatgctagatcttgtagaattatatatatgctgtcattagtacttcttttccattagtgtcatgaagttgcgtgtgtttgtgtatttgtatgggttaatgtgctttcagtattttatttatgcgaaatcagaatggtatggggttaagatttcagcctctggaagtaaaagttctgggatcaaattatttatttatttatttatttatttatttttatttatttattttgagacggagcgtcactctgtcaccgaggctggagtgtagtggcgcgatcttggctcactgcaacctccgcctcctgggttcaagcaattttcctgcctcagcctcccaagtagctgggattacaggtgcccaccaccatactcagctaatttttttgtatttttaatggagatggggtttcaccatgttgacaagggtggtttcgaactcctgacctcaattgatccgcccacctaggcctcccaaagttctaggattacaggcgtgagccagtgtgtccagcccctgggatcaaattttgactcctctacttacacctttgtaacctcaggcaagtaacctatcctctttcctctgcatcttggtttctctgtctgaacgtaggtacaattgttcctattcccagagttgtggctgggcctagagaatacttaggacatgaggattcacctccttctccacttcctgacatgatgttgcctatgcttccccacctctcccaccttacccttcaccgtgttcttccttgtcctcagaaaataagctttaacctccttcagtctgataatgtgggcctgggtccagaagaggggccagtctctaatctgtgtaattgcggagtatgtttttggagtttaacttattcatagttagggctaaaattgttatctgctattacaaactcctgctgcatatatatatttataacatttaggccatcttctacatattatgtagtaacttaattgttttcagcttatgcaacatggtgaatcatttcctgagtcactttggtggttagtctcttagttttgcatgttcagataatattttcatgttttactgctaaaattgtgaatagtcatttatttaaatgagtttatatatttgtttcctacagcaaatatcaggaattagaattgttaggttataattgccctcttttttcaataatttttaattcatgataagatgactcacctaaggatttcacttaattgtttttttccttaatttgaacattagaaataggactatgtttagggtgtgtgtgcccttgggcaatcaccctctgtttcctgtggccctgctacattgctaacttcagtggataccatttactttctgttttgtgtatccttgaggcccctttcatgctagaatatttttataggtgacagcagtttaagcatccacattctaagcaggcccttttcaatagagagggacgaagccaccatttttgctttggcaattgctggtgtgtcagtgaacacacacacactcataacatttgttaccacatcctttatacatcaccccctaagttactctccaaataccttcccccaagggcatccagagggcaggacttcagctggctgccttgattcatcccatcctacagattgctgtcaacacaagagatgatcaggataatgtaacgattgcactttgtaagtatataattttgttcattgtcaccagttacatgctggccatcctcaagcatataagatagtcttgtaacttgtgaatcttcagaaatcagaggagtttctcctcctcttcactgctgacagtagtcaaaagggacccagcctagaataagtaaagggaaaggcagaacctgccaaagcacgtcgtgacaagcatgtcattgtggactgactctacccagcattttttcagtggttgtaatgccacacatggctttaaggtattaataggattggacacaagcttttctgtcttctacacttataagaccaagaatggctaaatataaaaaatgtaacctttatcctatcattctcttttctagctgtattatttgttactttattaagtaatgtttaaagttatttgtattaattatttttaccattctcaggaccatacaagccaatttctacaagactagcattaggattgaggtttctcatttaatggtgattcatctttcccacatacagcctgccccttcattctgatgtttccatttcagcaagagactgaaagggaaaggaggtcaataggaagttactcaggaagaagaataccaggagggagtgatggtgctgaacacaagggagccatttgaggtggaatctttgaaactcagacactttatgctaatgtggtagaggttgcttagggaaagtctttagcatcaatgtaaaagacaattttaactcaaagaacgatcaaaaattatttccctgatggtttgctagagtcaaaacatgccttacacatgtttgatgctgactctgacagagggatctgtgtctccagttaccatgtcaggagactagacaaacagctcatggtaaaaaataaaagacaaatgaataacctcccaaacacaaccttgtaggaaaaatagtaagagttttcaccttaaggtaaagttttggacttggtctgaagtgtccatagaaggcatttaaataaacatttttatttagagatagaaacaaaaacaaaaattgaaaggcatggaattttagtggcgtgatgacaattacaatgacaaaattatgaaatgtgaagcagtcacacgctttctagcagtatgcgagagagactgattcatggactttaaattcatgtattatttttacattctggtatatttttgcactttatagtcacatctttttctggtgtatgtatctttacactgcattcctgcactttatttaaagtgacagtatttgtgaatatgactgaagttaagagttgaatgttgtcttatgttgggtccccaagaaacagactgttagatttgcctgcaagaagtttattagagggtgctcttgggaacacctataaaggagagagggaaactgggttgggcggagggagaagttaaattgcagtgagggctgcagccaatccccctgggaaccctagagctgggatggcctctagttatgcctaagtgaggcaagaaggctgtgaccttgaacctcctcatagaccctaaatccttggcttcaggctttctccatggaaggatgcaaccttggggaaggcagttcccttcagcatagggcagtcctggaacacagactcaggtgtcagctgtaacacttctagcagctgggaaaataggcactttggttgtctggttgaagggtctagggtccagttactgaaaacaaatagttactgaactaaaaaccgatagaataggtagggcagagatgaaagagcagtgatttatggaaagcttagaagaataacttcgtcgtaggaaaccatgtgtatattcttatgattgtgtgattctgggactcagggtacatgttttgagtggccatttttgttttgactggtacataatttaaagaactaagcagagtgatcctgtgtttgtttgtttggttttgcattcagctatcctgagagtaaaggagtgaaactaggaaagaaacttcttaagggagaaccagatagtgaaactaagcaggggagcctgtaggtaagggggttgaacaaacaatccaacacaggggcttctttaagcaagtgacatgctttatgtctaccttctgtgcttctatcctgatctaccttggtttttatccttttggttatggagttgaacttcttcatcttgccaccaggaggcagtgttttttagtgcttaggaggatgtgctttggctacaccagatgaagttcaaatcttatttctaccattcactaattgtatgaccttagtccattcacaaacaccgctaagcctctattttctcatctataaaataagaataatgacggtactcactttgcaggattgttaggaatattaaattgaaataatgcttataagcacctaggtcagaagctcacagctcgtctcacttgccagaaatggtctctttttccatctcatacaaatgacagtccttaaccaagttttcttaagaaattcgtcagtgttttctttgaataaagtatgaaggagggaagtaagatgtaatgggtttggtgatgaactaagttaaaatgtgaaaatggagatacctgtgaacacagctgctcttagtcattgtttcagtccattttgtgttgcttataacagaatacctgaaactgggtaatttataaagaaacaaaatgtattttttacagttctcgaggccgagaagttcaaggttgaggagcccatctggtgagggccttcttgcttgtggggactctgcagagtccccaggcagcagagagcatcacatggagaggcagcttagtgagctagctcaggtctctcttcctcttcttttaaagccacaagccccaccccatcataagctattagtccattaagccattaatccattcatgagagcagaaccctcacgactcatcacctcttaaagaccccacctgtcaatattaccacatcagggattaaatttcaacacgagttttgaaggagacaaatatttaaatcatgtcagacatcaatacatagaaagaaaaagctgcagttacttagacactgcagtttcattgaagctggttcttggtggaggaacatcatttgcctccatggaggcatatgttttgatattgaattggggaaaaccagactgaagctgtaagtcatgcccttggcattatgaagcagcaaacatcgggcccagctgactcatgcagctcctgaatcctggcattccttcctctcatggttctaaggcatgttcttttattgaaaaaacttcttggccacatgttcaggaagatgtaggatccaagtgtcagagacataacttctgtgtctcacatctcacagtcacatacctcaaagccattttccagaggcagttcagtcacccccagacctcaagcaggcctgataacatcaaaagcatcctgtgcctcatctatgcctcttcctctttttctgtccacccgatgttccacctagagactcaacttatcaccagttatattaaatctttccactattttgtaatttcccttcatctactttgttaaatgagaaacaggaaagaagcaagaataaactgaaaaatttttaattatgcaaaaaaacttagggatcaaaggatcactctggcaatgcagaaatctaccaaactctgccacttatcactattacatttaaaaaaagtagacttggctgggcacggtggctcacaactaattccagcactttggggggccaagataggcggatcacttgaggtcaggagctcaagactagcctggccaacgtggtgaaaccccgtctctactaaaaatacaaaaattagctgggcgtggtggtgggcacttgtaatccaaggtactccagaggctgaagcatgagaatcgcttgaacccaggaggcagaggttgcagtgagccgagatcacgccactgcactccagcccgggtgacagagcaagactccatctcaaaaaaaaaaaaaaaaagactttatccagaataaagaaaaagcctggcattgctttttataacacacagatggcatcataggttattaagaatttattaataattgattaatataaatggtgggctataaataccagaatcgtcctcctgatccccccatccttgtcttcaggtatacttccacagttcagcacaagtatggttccttccactgacacttaaaggttaacttagtctcagccatggtgatcattttttttttttatcacaacctcacctgactgccatcatccttaccatcaccctgactcagccctatcactagtattgtcaatataaaggacattgagtagtgtaggagtcaaggaaaagcgaagaagtagagactgttgggttgggagcctaggtcagtgggagagttgtggttccattaacagtaaaagggaagtaagaatgagaaagtacttagagtcctaagacaatcaatgatttaggatatgtagaggttgaatttttcattatgtatttaaataaaaatgtgtagcacaaagtttcaaatgtacacttggagttttaaggtggtgagtcttggtgatttgagtttgcaattattttatacagattcagtttctgcccctaaggagtttacacttcactgaaaaaggcagacaagacattagccctcataaaacaatatattgatagtcataataataatggatagagtttactgagttctttctttcagttactttgcttagtgttttaaacatgtaaactcttaattttcacaacaccttctaggattagggactgacagccttcaatagactaagagacttactcaaggccacacaggttggtggagcagggattttaacttgcacgggtgtagtgcccaagcctgtgagtttacttctttccactttattgctgtgatggaaagtcctggagatgatgggaaaataaacaacaggagcacttagctcagacttgggcttgcaggatttgaaaacaattttggagaaagtgagatataaagaaggacctgggggtgagtaagaattagccagatgggggaggagaagtagagggcgaggtatgtgcagattcacctggagcctagtgtatgtgggcagagggaggccaggaagggcctggccccagagcgctctgatgagctggccaacaggaaaacagaggcagcctcatgtcacaaacaaagcatccatgtttatgaggtggaaagaggagagacactgacaacgaggacaaagataggtggttcagaagctggaagagctttaggatctgttctctggcttttattaatatttttgcctcacccttgttgcctttttacctgctccctgtttcagtacattgatatcaaatataagtagagcaaaccaaattaaacatcatagaatgatgggtaaaatctggtggaagcaaataattatctgttggatgtttcctagatctgaaacaggatttgctagatctgagccctatccttctttcccctcacactccaccaccagctttattgaggtataatcaacaaataaaaattgtatatttacagtatacaacgtgatgttttgatatttgtgtacattatgaaatgataaagttaataaacatgtctgccacctcacatagtgtgtgtgtgttagaacatttaagatctactctcttagcgatactcaagtacacactacgtcactgagtgccatcttccttgaaatactctttgccttgccttccagcactccaccaggtctggcttcttttctctactgctctgacctttctttgtaagtcttccttgttgactcttcctctttagcccaaccacttgctgtctgagctctacgtggcttggaggcctgcccccttctccttcatgatggcctctcctgacagtctcatcctgttctgcagcatcagctgccatctgtatttggatgctgcccacgttactgtctggagttctgacctttcgtctaagctccaggcttatatattcaattaaacatctccatttacatatctcttgggcacctcaaacgcaacacctccaccgctaaacccacattttcctcacttactttgacctactcctccttgggtactccctgtctctgtaatgacactatcattcacctactttcctgagccagaaatctgggaataattctggaatccttatctctcttgaatgagtttttagtggccatgtgtcacatttgtaccttcccagaaccttttaaataattcacatgtaataattctcacgtccccaactcagaagacaggagtcagattctcattttttttttcttgcagcccagatggacacaggtgacctaggcttgccctgtcagatgcttccaagggaggcttgatttagaagtcatcaacatgagaacctggctctccatggagtttccatcttgctgatgcggctggcttcagacatctgggttttaggcaatagcagcaattgcgaagtacatacggaagtggcatttgttctgtagatttagcaattgcagtgtagtcaggtcttggcattatatgtttagggagcagaaacagtgaacttatccagaatagttttgttgcctggtttggtgtgtgtgtatgtgggtggagggagaaggtgtgggaaacacatttttgttttttctgtgagtttagtcttgaccttgttccttcagtccttcagactctccagtgatctctgagggatgtgtgtgtgtgtctgtatgtgtgtgtgtgtgtgtgtgtgtgtgtgtgtgtgtgtatttcagacagggttttgctctgtcactcaggctggagtgcagtggtttgatcaccactcactgcagcctcaaactcctagacaatcaagtgatcctcctgcctcaacctcccaagtaattgggactacaggcatgtgtcaccaagccctgctaatttttaaaattctttggagagataaggtcgccgttttttgctcaggctggacttgaactcctggcttcaagcgattcccccgccttggcctcccaaagtgctagaattacaggcatgagccaccgtgcctggcctgggtttaatatttttaataaagtttctgtctccttaaactatcaagggaagcttatgttgtttgcagtaggaatcttgaacagttcaagattgttgctttctctccagtaggaagtctagctgtgttttgagctgtgtgaaaggagaagggaaggatgtggtgagcgagaaccagaaataagtgggcttggaggagggaaggccctgcctctccagggttttttcatttgatcacattatatagaatatataaattatgtacaaatatgccaaaaagcagggcagagtgatggaaagagaattggaattttagaaaataaccagatttaaattctgactctaccacatactagcagggtacccttgagcaaatgacttaacttctttaaactctgttccctcacttatgggtttcaattaatatatttaccacatagagtggtagggttacatgagatagcctgtgaaaaagatctctcacttattggcttactggctgagtggtaaaggttagctctgtgtgccagaggcaattagggactctagagaatgcatcaataattggttatatataggtggtccataaatattgactattcaattccattggcctagaattccactttttgtatttccacatgttaaaactcttattccttccaataggactagtccaagtgctattgtttttctctaattggacctttccaaattcacttagctggaagtaaagaattctatttctgaaatattattatattttatcataggtcatatttggattaatggtgtagaatgtagatccttaggatagtatagaatatagatccttagaataggaagatacttgggtgagtatttagtagagctaaaatttagtagagctaaatggtatagaatataaatccttagaataggaagatacttcaatgagcatttagtagagctatttatgttttaaatttattttcattcagttaatatattactattgattgaaattcaataatattacaaggatgataataaagagtagtcccctgcctcataccttaccactcccaattcccactcactcaaggcaacattttttaacctttcataatattgctacattcctagttttcaattttagccactccattatctattgatttgctgcaatagaagatacaaatttacttttcttacacctcttttcttacattgttggaaccctacatcttacaaatacatgtacatcatctctctttccactttcccaatatggtcatttcacaattgttgattaaatcactgtttggtgttttacattaccataactatctaaataaaactaatagttaagccatgtagtatgtttagattccttctttatgcatctttatttttttctgaagtcagtgacatatctttaataatttgttccatcttgacgtgcttattgctaattcttttaaaagatccaaaacagtaaaatttctctcaaaataaattcaggtaatttctctgcaaccacccactacctgcaaaacttacacatatatctcacacactttttccttaggaaatattcttttttgagctttccgtccccctgttttgaacaagtttcagtctagctgtgtacaagtcaaggttcaagggcttctggtcaccattatcctggggtgacatcatccttgtggactgaatgtttgtgttacccccaaaattcatatgttaaaatcctaacccctaatgtgatgatattaggaggtggggctttggggaggcgattagatcttgagggtatgggcttcgtgaataggattagtgctcttatactacgtgggatagtgcccagggagcactttcatctcttctgccatgtgaggacacagcaaaaagccatcatcttgctaggtgtggtggtgcacacctgctgtccaggacttagggtccagctttggcaacatggcaagaccttgcctttaaaaaaaagaaagagagaaagaaaagaaaaaagatggctgtctttgaaccaggaagcaagtcttcaccaggtactgaatatgctggtaccttgatcttggacttcccagcctccagaattgtgagaaataaatgtgtatataaattgttgtttataagtcacttagtctatagtatttttgttatagaggcccaaacaaactgagacatggagattcctgaataattttgttccttccttacatgtacatgtgattattataattatcagctaggtatagaagacgaggctgaaaattgttttcctcaaatgttaaaggaattgctccactctcttctagcttctagtgttgttgtcaagaatgccaattctattcttattcctaatcctcagatatgatctattctttctcaggaagcttttaggatcttctctctccttggtgttttgtaattttaaaagcatgtggctagaaaaaaagaaagacctaaaaatcaatcatctaagctcccacattaggaaactagaagaataagagtaaattaactgcaaagtaagcataagaaaatacagttttaaaaaattagagctgaaatcaatgaaattgaaaacaaaaattaagagtgcttcactgcctcctgttttcagggagctggagcttacttccccagggacttggctgggaagggctttctagcatctgggccacactgcaaaggctggagtattttaagagtttacgtgtcaggaagagtctgttacttttaaagttaacttaattgtccttttagactttttttaaagttaacttaattgtccttttatttttggatcaagtcctatgccagggattttaactgcactttgaatgtgttaccaaggttatggtgacccttggatgctatttttggaagaaagacgaatggtgacagactgcaaaatcaatactcaagagcctgaggagcctctggattttgacttctgcagcaccaatgttattaataaaattattctgcagtcagaggggctctgaagcatttcccagattggatgtgacgactgaggtcctacagattatcatgtctcctgacaagcattatttcaggttatctacttttgaaaatttagaaagtttgcaatttgacttccaaagatttttatgtggtgcaagcatttcattgtaatcagacccaggtcaacagattttatttctttgctaatcccctttacaaaaacgttagtcctatcttgtaaggtattttattcacacaaataacaggatttctttcattatggtatatttttagaatgaaggggggcaaatatcttttgtggaatattactgttgccctgatgatgaagttcctgaatctgagtcttgagtatgatgattcactgtgatatttatgtgtacattcatgataagttgagttatcattatgagtataaaaatcttcataatttcttattgaattttctgtagagaagatgcatggagaagataaaagcaaggtccctgtaccctaatagttatgtattttgtgaacaaatgctttcatgaagtcatagattatctagtattagactggcctgtggctctgtcttttgaactcatgggaatcactgtgagccaagatgaataagttataggttctattccacttaagtaaaacatttcaagagtctgaagatttaaagtttgttgaaggcatatcagaactgttcttttgtttatttactattagaaaatgcaaaggcatatggacattgcttattagtttaaatgccagagattagatattaaagcagtggttctctaagtgttgtgtcaagaccaacagcatcagaatcacccaggaacctgtcagaaatgctgggggtgaggcctaaaatccgtatttttcacaagcttcccccaggaaattctaatgcatgctaaagtttggaaaccactgtttaaaggatacattttttaaaattagcatttaattgcattgaggtgtttgcttttacttgtgatttctttacaaaagttctgaaattgaggcatcactaaacaagtctgaacaattctttatatgatgtatttctaaagtatacctttttaagaaatctatggacaagatatgaaagtcttcagagtcatagattttctccttattcttaaaactgttcaatgcagtacttattagatacctttcgtttgctcataaacatttattgaccaaatcattgtattaaaaaccaattagtggtttcttacaagactaaacatactcttattatatcttattatacaacacagcaattgcattccttgatatttacccaaagttgaaaaattaagtccacataaaaacatgcacacagatatttatagaaggtttattcgtaattgccaaaacttggaagcaaccaacgtgttcttcagtaggtgaatggataaacagataaatggagacaatggaatattttttagtgctaaaaagaaatgagccatcaagccatgaaaaaccatggaggaatcttaaatgcagattaccaagtgaaagaagacaatctgaaaaggctatatactgtatgacttcaactatatgaaattccagaaacagcaaaactatagagacagtaaaaagatcagtggttgccaggatttgtcgggagagagatgactagacagagcacagaggattttagggcagggaaaccaccctgtatgatactgtgagggtggatactcattatacatttgtccaaacccacagaatgtacaacaccaagtgtaccctagtggcaactctggagtctgggtgataatgatgtgtcatgctcagtccaccctggtgggaatgttgataatggggaggctgtgcatgtgtgagggaaaagggtatatggaaacctgtaccttcagctcaattttactgtgagcctaaaactgctttaaaaaataaagtctactaaaaagaaaaaaactggaaaaaaaatgcaaagtgacatgcttttgtgtgtgttctttctcattcatcaaattcggtatttatttgataacttgcttttttctccattcgctcttgtttaaatgcttattagctggttattattcatcggggcataaacctgtatatttcttattttttttctctcctgtttttccattttattcttttctaggcatacttttagaaagagatcttcagctttatcactctattagctttaaaacttttctgctatcacatttagaaaatatatttataaaatctcttctgtaatttgttcattttttacaagtattagcactgtctttttgtttcatggatgcaatgtcttttcttatctctctgatgaccatatatatttcttcttctaccctctgctttgtccttaagttccttcttctgatttgttttctgttttttttttaagttggaggcttttctgaatgttatttatgtctgtttactcatatttaagaaagaaatgtccatacatgtatacacacaaaactgacttgaattctttttgcgttggcctggtttatttatgagttagtttaattataggattggcacgaaagggcctgagtctttgtattggaaaactcaaaatgtcagtaacggtgagagtttttcccttcttgggccagttgctacagtaggagcctccagtcttctgcttatggcataaaccttgctgtcagtactctagaagtcagggaggaaagggcttggggatcccacttttctccgtgagactgttaacaaacctcctttttcagcacagttgcctcctttcccttctgtgtcttgtgtcaccaagttgggtatctctctgattaaatttcttggtaaaacaaagctggacgatgagtacttgtctctctgccccaggtgcagcagtgtacctgctcctcattgagaccacttcccagcttaatcacttaactcaccttttacaggacctgaagcctcaaatcagtacgcctctctggggttggtgcttgttgggttcttcctcaacagggagctttctctcgtttactcagtaggttaccaaattcatacacttcacatctttttaattcttacatattgttctctttggtgttctttcgccttgtgtgatccactcattcatgcattcactcattcaacgaatattttctgaacaccttctctgtgcctggcactgtgtcaggtgaagtggatgcagtgagccagtgggcagaaatctcttccctcatgtgccttacattttaggagcatgaggcagagaataaacaaacaaatgacatataccgtatgtcagatgatggtcagtaacacgtgtgggaaaagataatgtggggaagaggtagagaacatgctggtcagagaagccccacagataaggtgctatttgagctgaaagctggcaaaagtgtagaaacaagccttgcagtagaaagtgaaggaggtcctgcagctctgggctgattacctgggcatggttaggtgctcttcctctgctccttgagcatcttgagcatgctttaattataacacttatcatcatgtcctattgtgattattaaatcacatgtctgttttcatgacttggcagagccgctcaacatctggaactttgtcttactaacttttatattctcagaatctaatacatcatattagatgttcagtgcataattgttaattcaatgaataagaaaggaaaacctcaagtaaattgctgactagaatcaagccctcaagctctgaatttagggttaggagcctgggttaggaagaaagactgtatatatgcttttgaggcaagcagtcagtgagggaatgaggcatgattacttgcaggtggctacaagcaataaaaatgcggtcaaaaaggttagcagagggattgccccactagtagataggaactgttacaacagcctgtgacaatgaagacagattgcaaacttcctacttaggcacagatgagaatgtaacacagaagaaactggccgcaactggttaaagccaagatggtcgaaaacttggctgactgctgacccttagcttcattatgcccttaatatcataaaacttccatggggaaattcccactcccatcatgcacctgacgccatgacagttccggattaaccatctttagtcaagaaaagggtggcaccccgattccgggaattgcccgcccatttcccagaaaacccctccccttgattacagagtactccataccttcattgtgcttattcatatagtacgtgaaccacattgcctgtgactcaaatctttgagtgcctgcactcctcccttgagggtgtcgttggttttgctccacaataaaatgtctatactttcgcttgggtctcattttcagattctcttatgctttgaagacaagaacctgcactgccctactggcaacacttttagataccctctgagatcagtgtgcttgtttataccagaaaaatgtcatcaccaggccccttagtcacaaagtgtatcaagaagtcatctgcggtcattttttacagtttctaggccactttctgtttccaatcagtgtagttcctatgtggcatgactcagatacaagtttctatagacattttcttctgtggctgctagtgagaacccaaaccagctcagccaattagagctccagttgtcactcctacccacactgggcctgggggtgaagggaagtgtttattaggggtacatgtgaagccgtccagaagtgtcagagtctttgtagctttgaaagtcacctaggttatttgggcatgctctcctgagtcctctgctagttaagctctctgaaaagaaggtggcagacccggtttgctgatcgccccagggatcaggaggtaagcaccatagaggagctgggttagagacgagagacttaaccgtttctctgctgaaaaagacaactgaggaaaggccagccatgctgtgcacacctctgagaacctgaacctgcaaacatggacatcagctctgaaaggatgggttcatttctcttttattcactttagccatgtcctctggtgtctctgagctggtgttccttaagcttcggcttcctttggggtttgtctatcagcctatttgtaaggctgacttttatgccaatagcaaatacaagcattttttaagttaacagatattatgaagtaaaatgcaagtttttcatttataaggcaacataacttcagagaaaaaactgagtcaatcacataaaatgtgattaaaatgtgattgttattatataagagggttataggaagattagcttcttatggacaagtagaaaagtaggaatcatccaagctgattgtcacagtagatattcaacaaaggtagtgtccttccttgctttcatcagtaggatgggggcatttggatggctttatcattgcaaatatttttaatgtattccttattttgaaaatggtcctgataatagttttaattttcactcatgaactctacatgtataagtagagtttctccagcgcttaccaacatataggaaaaaacattataaggccattaacagtgatagtttagaatttattaacattgactctactgatgggggtattcaagcttccctaaaattcacaatcagttattttcagctcataaacatcttttcctgttctttggcttatttcttccactttatatgttgctgctctggaagtcattaattgctaataatgtcaaacatcttttttatgtttattggatatttgagcaaattgctcattcacatcttttgcacacttttcaaatagactgttgttttcttattgatacatggttctccatgtattccaaaagcaaaacctctattagctctctctctctctctctctctctatatatatatatatagcaggtatagccatatatatatgtgtgtgtgtgtgtgtgtgtgtgtgtgtgtgtgtgtgtgtattgcaggtatctgcccagtttttgccttgtataatcactttgtttagtgtgtgtgtgtgcacggatgtgtgtgtttcctacaaagaaattgagaatatgcatgcaatcacatttgacaaattttttttttctggcttgtcctttttgtgccttatttaaggaacctccttctacttcaatgtattgagaaattctgtgttttattcaacatcattactattctatttagataattaatccaaccagatatatattttgtgtatgatataagagaaaggctgaatatatcattccctgtgtattgtcatttgtctgaacactttttatagttggccattctttccttgtgatttttaatgccactttgattatataccaagctttaatttacatgtggtcctgtttccacactctatttattagttcatttttttctacgccactgccatactgatttaataattatacatttgtagtaagtattgatacctagtagtagggatagtacatcctgataaacatattcaacttgttttgcaggtttttgtctttatttttttcatttaggttttaggatcattctgataaattctatgaaaaaccctttgagattttggataggagtttatagattaatttgacaacactgctgtcttcattttatcaaatcttcccatttaaaatatcagacatacacccacttaagtaggtcctttaaatctcccaataaagttttataagtttccctttaaaactcttaaatatattgtattcgatgttcttatgtactttgtagttttgttgctattggaaattactttttttatgtaatttttttctctcttggagtggtactaaaataaaggaatgcatttctgtatattaatcttatagttataaactgttgaattattatttataatgttttgtgtattattttggatactatacataaacaactatattactacaacgtgattttggcaacaagttacaaaaataggttgatggacagaataaagaatccagaaatagactcactcatatttggacaactgatttttgcaaaggtaaaaaaaaaaatcattaaaaatgacagtctttttaacatatgattctgggaaaattcatattcatatgaaaaataaatgaactttgaatcatcacttatatcatatacaaattaactcaaagcagtacatacagccaaatgtgaaatgatcaaaccgtaaaattcttacaggaagacataaaatcttctaatcttgagattggaaaagatttcttaaataagacactgaaagcatgatccatgaaagaacagattgattaattgcacttcatcaggtatatgtatatgccaaaatttatcagattgtatacttccagtgtatgcaccgtgttgtatgccagttatgcctcgataaatctattttaaaaataacaggaaaatgtatcctgtttcctttttgttgttgttgttgttgttgttttgagatgaagtttcgctcctgttgcccaggctggagtgcaatggcgcgatcttggctcactgcaacctccacctcccaggttcaaataattctcctgcctcagcctcctgagtagttgggattacaggcgcccaccaccatgctcggctaatttttgtacttttagtagagatggggttttgccatattggccagtctggtctcaaactcctgaccgcaggtgatccgcccaccttggccttccaaagtgctgggattattacaggcgtgagctaccgcgcccagctaatgtatcttgttttctgagaattccagaggtgttgtatactttctgaagatgtctttcccaggagtagtgatcaccttgcttaagaagttcttacctatgtcctactcaaatctcttttactactgcaaatattttatttttctttaaaaaatattaatagctcaccttgctttattttgaatgtagaatcacttttggtggtgtaatcttacatgttttggattccttataggctgatcccaaagttgtcagatggagagtaaatacaaggagatactcttgctaacaggcctggataacatcactgatgaggaactggataggtttaagttctttctttcagacgagtttaatattgccacaggcaaactacatactgcaaacagaatacaagtagctaccttgatgattcaaaatgctggggcggtgtctgcagtgatgaagaccattcgtatttttcagaagttgaattatatgcttttggcaaaacgtcttcaggaggagaaggagaaaggtaatgtgggagttccacacctgccccgtccctttttctgccaagcctgggcctttcctttcatggcatccctgggatatgacccccagtgcacattgttggaatttgtttgctaacttagtgcacctgtctctttgcccccttttactgagaatcgcttctaggaagtgtttgttacaaattccacaaatccattccagcctttgtttgcatctcttcttccagccttagggttaccacttccatttaacatcttttctccttgcccatctttgtctccagttcagttgcagtgaatatggacgtagaatttcaaagttaacttctcccaactccatttacacagtatgtaatgctgtcacattctactgaagtcttgaaagtataaattattgcattggaaaactgtaaaccaggatattgagcaccttttttccttcacacagtctgtctattcctctccttgtccccagctttctgtggtcccagactatccttctttaggcgatgatctcctccttcttcagaagggagggagaatccaccttcagggattttctttcctctctatctccagtacaggtgacagtataaattacccacaacacaaagattttttttacattattcaataaatcactcatctccatctgaattatctacatttagtttaaattcctgattttgtttactaagaacaattgatatgtcccagctttatgtctgaagaacaaaaaggagctaacagaggagcatatcactcaaggactctccaaaatgaaagtctccaaatgcaacagttttaggattcaaagtacaacagtagcagcaaaaattataatagcttttagtagcatttgtgggtgtacaacaagggtgacatggcttctcacacatgagttataggaaggctaaatgaagccacataagtgatactatgtacattcataattctatacagatataaactgttaggtagtttctaaggcactaaagagaaaggagtggtggttttcccaggctttaagttagaaggtgtagttcttagagatggcccttagatggcagtaactacacatgttacttccaagtaaccaaccaaaacattgccctgtgtttttcttatctgggatgagccaggaatctaggcatattggcaaacataggctgagatatttagaaatatcttttattttggtaataaatcaagaattaattcttctctttgaccaggatagaacaaaatttccccttctacaatcttctccccattttgctattctaatgattctgggattttgttattctgcttagctaaaaaagatccagtttgggactagcttggaaactcaggagtagattatccaaggactctcccaaatgagagtctccaaatgtaacagttgtaggattcaaagtatgcttttgggccaggcgcagtggctcacgcctttaatcccagcactttgggaggccaaggcgggtggatcacttgagttcaggagttcgagatcagcctggccaacatagtgaaactttgtctctactaaaaatacaaaaattagccaggcatggtggcgggcatctgtaatgccagctacttgggaggctgaggcacgagaatcacttgaacctgggagggagaggttgcagtgagctgagatcacacctctgcactcctgcctgggcaacaacagtgagaccctgtctcaaacaacaacaacaacaaaacacaaagtatgcttcttgcatgctatacaagaaggcagttaagttccttcatagctctaaaattctatccacggacatacttaggccgcttttgaatgtaggaaatttttgtgtgtccatgctatttctattattttaggaaaacagtttttgttttattttttgaacagttaatctgtcattcttggttaagtgatccttctccattgccattgcatgtctgcatgtagagtgctatatgctattctactcatgacctcacctcatggaaggtagaagatacctggagaatctttaatgaagacagaggcaataattagtagacaggagaagcttttgtatgaagcaagatgagaaaatataaggacacataagcgtagaaaaaggaagctaagagaaaatgtgatcaaagtccacaaaagtcctgcaagattaaaataaaatgctgaaaatgataaatgaaataatcagtaacaatgtgcacctgattattaaggcaaatgagagatttataattggcagacaagcttgtccacaaatattgcattggtaccacagtgtgtgaaatgaaatatggctgatgtgatgtggtagaatggtaggttgattccttccgcctcccttgatgctgttttctctccgatgctgtgaacatagaagagagactttatctgcatacctttctgaaaccaatttcatggaactaacttaccattggaaggttagtttaacttcttcctagtgcagagatcctgctacaatatccctgtcagacagtcaaccactttctgatctttgaaaggtaatgacagagtacctactacctcataagacagttcattctactcttagctctaataattaaatcgtttctctttttagtaaaatcagtgattgccttgctatttcagtccagaattgttcaaattctatcagaaataacatctaataatttcccaggccctcttctgcctgagagtgccttaagtcatcaaacatggccatcttgttacatggtctttttaaaaatcaggagtaggagttggcttttcacgataacatataacctgaccatagacgtggaggagcccagccagagtatacgactgcattttgtaggcattagtgaggagccaacatgccacccatccatccatttcttcatccattcagtaaatatccattgaattgctaataggtacaaggaaagcttttaggttcttatgataaaacaaggttttaaaaacaaatccaaattttgtacagtttatactctaaagggaaagtagatatttttcttacaggcaaattaactgagacaggtaactaactgagacaaatgttctgatggaaaggaagatggttcttcagcagcatgtgtcaaaggagcattaacataagccaggagttagagttggtgttggtcaaagcgggttccatggggaagtgacttgcactaagctgtgaaaaatgcataggagttaaaggtaccttcagtcagagggaacactgtgtgaaaatccctctgacagcaggtgttgacttgcttgaggactgaaagaaggccagtatggctgcagtacagagaatcttcagagggcaggatggggtcccctcgacagaaggaaaatgcaaggccttgtagaacataattagaaatctgtggccaggcgcggtggctcacgcctgtaatcccaacactttgggaggctgaggtgggcgcatcacgaggtgaggagctcaagaccagccttaacaacatggtgaaaccccatctttactaaaaaaatacaaaaattagtcaggcgtggtggcatgagcctgtaatcccagctactcaggaggctgaggcaggagaatcacttgaacccaggaggcagaggttgcagtgagccaagattgcgccactgcactccagcttgggtgacggagtgagactccgtctcaaaaaaaaaaaaaagaaagaaatcagcccttgtttcatagcagcagtttattcattttcactactacataagattccatttaattgataattacatatacacataaactgatatacatatatatagagagagagaattggtgtatttttattgttattttagtcattggaggccattatgaataatgctgctatgaatatttatgtacattataagccttatatacttatctttgtatgtttgtatttgtatgtgtgtttctcttgactgtacacctgtgaatggtattactggatgttaaggtaagtagatattgaattttaataaatagcgtcccaaaccattttccaaagtgttataccaatttaagacgactactacttcatagtttttgtttcttgtcttttttttttttttgagacagacagggtctcactgtgtcatccaagctggagtgcagtggtgcaatcatgactcactgcagctttgaactcctgggcttaagttatccttgcctcagcctcccaagtagctgggactaaaaacatgtgccattatacctggctaattttgaaaatattttttgtaaagatagggtctccctatgttgactaagctggtctcaaacccctggcctcaagtgatcctccagccttggcctcccaaagtgctgggattactggtgtctgtgccaggtccagtttctttcattttaaaatatgatttttttttaagaaaaattagctgttcttgaagatatcttaatatggttttagtatttattcctggtgacatttgaaaatgtgcactgctcatatgtttatatgcttattggccatgtctttcattttttaatcagttgataagcaatacaaatcggtaacaaaaccaaagccactaagtcaagctgaaatgagtcctgctgcatctgcagccatcagaaatgatgtcgcaaagcaacgtgctgcaccaaaagtctctcctcatgttaaggtaggataaggagagtggagtggtctttgtccttgtaagagcatcactgtcactgtcacttcccatattgttctctgttctttatctcacagcatgcaaataagggaagcaaggccacagcatgaaaagcattctgagtcacaaaaacaggaactacctttgattcatcagattaaacacctgttgagcttctaatctctgccaggttctggacacattaacactttgttatgttttggattctataagaagaaaactctgagatagaccgttgtttacaggaagtctattttagagcactttcagaattaatatctgtgaggaagtgaaaggagaagaagaggaagaatgtcaagtccaatgtagttgcaatagaggccttggcctaccctacagggagctcgggagctgagaatgtctttcagggctcccaagatttgtgagggagtctgtggtttgtacaggcccaggctctgggtcacatcagagatccaattcagagactctgacactcggtctggcatgcctctgtttgttttctgcttggttcttgacagcaaattgcttttttaaaagtaatgtaaaaaagccctttatacacctgcatggacaaggtgaggtggccccatttagctgagagagtagtggctggagagtgtcattggtgagaatgattactttagtcctgagggagtggcagacaacgttagaaaggcccagcacagaatccaccacacatgcagtttcatttcctatgaagcaggtattacattattttatacctgtgtgagctctaaaaactgatgatatatacttcattctctttgtctagaggaaccatttcctctgggtttggcccagaaacttctggatttttcaggaaaacaaggttcaagtataaatggtgtgattccctcatcagtaatgaaaatatgcatttttcagtctggaagacccaaataaagatacatggaccaaagagaaggacttctgtagtggacctcagtggagctgacctttccctgcattgatccaaatgcagtcagttatgctgcccatcagggccccttactggcccaagctccactgccccaagctccaggtcacatcagagacacccttcagagactcctacgcttggctttttatgcctctgtttgttttgccctgtatttccctttggttctaaatggcaagtggcttttaaaaagtagtattttctcccaaaacaaaccaaaaagaggtgtcttatctctgttaattcagaaaaataaaaaacacagagaagagaataaaattatctataattgtatcgtctaggaaaaaaatacattgatgttggtaaatatctctctagtgtgtttgtgtgtgtgctttaactgcttatttatccaataagaaacagattgtttatctgtttaggacctttccctttattgaatcagttataacagtttatcatatttctctaaagcatttttaatatttgcacagtaatctttttgtgactatacctattttatttaaccaaatctattttttaggtatttaaattatttctttttttataatttcaaataataagatgtactttttaaatataaaccttagtgcataattcattatttaagggtaaatccataaatgtagtattaattctccttttaaatttctcctttaactcactcataagatctctgaactaggtctcccccttaactcacattaaatgtaatctgcattttgttatgtacaatgctccctaggaatttggggagccctgtgctggtcactgagctccctcacttttataccagagtaaaatgaacatttaggacagtattggatagagaaacaaggacacatgcccgaatggaattgatagaagatggaatcagatttgtcagatttaccccgaggcttagcagtatttcagaaatctgatgaagtctttatatatagtacatggcaaagcaaggatttggtttcagggatcctacctccaaaacgtgttacaccgtcttatctgaatacaggagtcgaaatcttccttctgcactctctgttctatctggatcgttctaggcctcaactctcttcgtatcccctctgtatctcttcccttgattccacctatcttctgctggctttctgaggtttagcactgtaggtgaagtaaggtcctttcaatagtacctttttgactcacagctgatatctttcttctcttgtcttcagcctgaacagaaacagatggtggcccagcaggaatctatcagagaagggtttcagaagcgctgtttgccagttatggtactgaaagcaaagaagcccttcacgtttgagacccaagaaggcaagcaggagatgtttcatgctacagtggctacagaaaaggaattcttctttgtaaaagtttttaatacactgctgaaagataaattcattccaaagagaataattataatagcaagatattatcggcacagtggtttcttagaggtaaatagcgcctcacgtgtgttagatgctgaatctgaccaaaaggttaatgtcccgctgaacattatcagaaaagctggtgaaaccccgaagatcaacacgcttcaaactcagccccttggaacaattgtgaatggtttgtttgtagtccagaaggtaagttttcatatctaatttcatattgattagtaagaataacgtatttcccatctgatcttaaagaaactttggaaatggttttaatgtctttctatatagacaaaataaaaaaatacaaagttctaaagagctgcagagtaaacatgccaaaattcatacaaaaactcaaaaattgtttttattgtcaaaaatgtcacgatcctatttcaacttaccccagtagcctctgaaaaaggaattagttcattcacataatttttatttctgcattatttttgtactttgtacatattatctttattttaagtgactatagttgtgattatctttattttaagtgactattgttgtgaatgcaaagtaagtgtagttgagtaataaaccagattaatgacctgaaaaaccaatacgcaaggcaggattaaagaactgtgattaaatgaagaaaacagaagaaagagttagcctgaggagactttttttttaattaaaaagtaaactttaatgtcaaaaatgcaaactgggggaagacagaaaagatcacacacaaggctgtcacttcacacttggaaggttgcacggcggccgggcagaggcgctcctcacttcccagacagggccgcggggcagaggcgctcctccaggatacttattagaagtgagaaataataaagtatttattatgattctgagcctcagggaactagccttgtgggatgactttttctggtctagggcaggacctaaagaaccatagagagagaacctgctgcccctgcattcagagcctcagaataacctctgctgccctgggttagtttcagaaggaattgataggaagactctccagtcctcctggaaaactcaagtgtaaaatgaccttggataggaaagtcatgttctttatcccagttttcagctttcaatctggccagctatccactcatatatactgatttagtccataaaattaaacctaaaatacgatcaatctcctaaataactgaccaacctcctgttccctttggatctagacttgattgtgaattgtttcttgtctttgattacttactagactcttggctgggtcttgcatcattacctcatgtctctcctggacttgttttaaatagctctcttcaggctgggcgcggcagctcatgcctgtaatcctagcactttgggaggccaaggcgcatggatcacctgagttgaggagttccagatcatcctggccaacatggcaaaacctgtctctagtaaaaatacaaaaattagccgggtgtattggcggacacctataatcccagctactcgggaggctgaggcaagagaatcgcttgaacccagggcgttggaggttgcagtgagccaagattgcgccatcgcactccagcctgggtgaaagagcgaaactccatttcaaaaaataaacaaatagaataaatagctctcttccaacccagggtcttcttttttcccttgactaatctggctgctggccctggagaagctccatcttctctatccagcagttgttgcttctatgggccaccctggcctcctcctaaaggaagggaatttaggactggaaagataggcataggagacaacatgttctaagtaagacacgtctgcctcctctgtgtgaacttgctaacatctattagatatatacctgctagtttcaaagcagaaacattttttcaagttgtcccttgaacaatgtagggattagggcttctgaccctgagcagttgataatctgcatataatttttgactccccaaaaacttaactgcttaatagcctactcttgatcagaagacttacggacaacataagcagtcacttaacacatatttttgtgttatacatattatatactatattcttaaaaagtaagctagagaaaaatgttattaataaaattataaaaaagaaaatatactaactattcattaagtggaagtagatcatcataaagttcttcatcctcattgtcttgatgttaagtagactgaggaggaagaggagggttggtcttgccatcttggggtggcagagacagaggaaaattcccatataaatggacctgcacaggtaaaatctgtgttgttcaagaatcaactgatttctttttagagccttcttctggcatgtctgatgtgtgactgatgcggcattcattaatccgattatcagaggctgggtgttgattttcttttataggtaacagaaaagaagaaaaacatattatttgacctaagtgacaacactgggaaaatggaagtactgggggttagaaacgaggacacaatgaaatgtaaggaaggagataaggttcgacttacattcttcacactgtcaaaaaatggagaaaaactacagctgacatctggagttcatagcaccataaaggtgggaactgcatggaacaaagtcaactctccaagggggtgatattttttgttttctatcagaaagccggactggagccattgaacaggatatagagtggaagacattgatatttagtacacgttcatctcacagaactgaggaacctccctcttaggaaacatgtattctagatacacagttaagagaacatgggcttttcaaggcagaggcgcatattgttgtgcccacagagcccaaaaaagagctccttatttatactacaagtctaaagcagaaagcttgcccagagtcggaaaagtcattctgactaatgtctttgaaagtagacagacaataaatactttgaggacacatttccctagccagtcccaccacgtctgcacctaccatagtccagtgcagttaagtccatgtaaacccctactcttgaccttccaccacaccctcctacccgtgtcctgccactacttggtgctcttccccaggtctcagtgttggttgcactgcctgctatctctgtaagagtggaggccaagatttgagaaatatgcgtatgtgaccttgctaagtgggagtgtatttctcaggtcagatattcacttcaggagtatgatccaaggcagaccaatgtattagaagggtgggaacaaaataattttatgagaagatgatacatacacttcagaaggccatagtgactgcaaacagtggaggggccactcatcgactgcatctcagactgcatgttttttttctccatccaggttattaaggccaaaaaaaaaacatagagaagtaaaaaggaccaattcaagccaactggtctaagcagcatttaattgaagaatatgtgatacagcctcttcaatcagattgtaagttacctgaaagctgcagttcacaggctcctctctccaccaaattaggatagaataattgctggataaacaaattcagaatatcaacagatgatcacaataaacatctgtttctcattca

SEQ ID NO: 422 - DNA, 6810 bp, Homo sapiens
gctgctgccacgtaagaagtgtctttcgcctcccgccatgattctgaggcctccccagccatgtgcaactgcgtgtttactgctctgggcccagtgcctccctcgctcaatggagtgacggcatccaactcacaagacaggagactcaacagaatgaccaagtggagaagacgtctaagttctcagcggtctcagccgaatgactgaagaggaaccagggacagggatgactcacatgggaagaggaccccactttgttctgtttgattctaagaggacacagactgcttcattcatttcagtttccccagcacctggcttaactctcagacatgttagacggtttgtaagcaccggctctactgaactggcatcaaatcatgacctggttcagaagagacacgaggactggatctgttctaaacagattgtgcaaaggggaaagacacagactcagcatttccacagcttttaacatttcagcgagaggtgagaaagcatgtcaggaacacaggcccggccgatgaaagtgtctgatgctaacacatgaactgtcttctgctgggcacactaaggggccacaagcaagctacgccccagagccactccacattctctctgggtgcactggccctcggccacgcaaggccgcgccagcctccgaggtgagccagaaggacacacacctgtggactcgatgtccctgacttgggctcgatggccagccccagggtgactccgcccgccagcgctttcttcaggctctccttgacctccgtcagctccagctccaggctgacacgctccgcctccttctgccggcactcctcctccagctgcttcagcttctcctccaggatcgcctgcggcttcctgcctggaattcccagaaacgccgttactcccgcggcaggcacaggttctccaaacaacagagaaggcacctggtccccaagaagaacttccacaaaacgtctgaggtcgagctcccctgacttaggtcctcgttgtgaaacttaaattcagcagttctctaagggatcagagtccttctcctaccatttccctttgctgcagccgttgaggactcggaccaggaaagaggagatgctgattctgacgaaggccaggagctcctggctctgggcctcaatgttctcattttaaaacgtggaccctaaactccacagttcccaaagctgccaccttcttggagtgtgaaccctgtcctcccctaacgctccgccgatccttcagtcatcttatttgcgcccgaggcaatgaacagtagctcagcttgcatctctactggacatggcacacatttctttaaggcacattcacttattttatttgaggtttgctgcagtgacctaagatgcacccactgggcagatgagaacaccaatcccaagaggtgaacggacttgtgcccagggcctgggccggtggtggccggcaggcgaggttctctttttcaaagccaaaagcactcctggccctcctgcatcttcactatcctgcaagctgggaacacgggagaaatgctacttctgtctcattaaactccatgccccgtcccattctctggcacagcctcctcccgtagggtcagcctcagactgcaggccacatcctgggcctcctatagggtcagcccgacctgccctgccaacacctgccttccctcctctaaactccaaaagcatttcccttcatcagatcattgaggcacaaagtccagcaaggctggagctgctaaccacctgctgggtgtgcgtcagctcctccccgcgcggcgagccatgggaaggccacagcctcttctctggaccacccagggctctgaggcatctgaagcccccgtcccagcccaggccagtacaatctcaatctaaggagccagtcttccgtagtctaagcaccgggctggaagggaggccatgcgtaggtaagcggtgccaccccaggctcaggagctgagcgccagctcccgccagcaggaattgcacgcgcctggcccagggctgccactctggctgcaaactcagtttctgtgacttcagtccctctctggtgtctgtattccattagcctggcctcttccctgatgcatcccaagacagatgctgccttgctctcgcctgtcccttctcaacaaacgaggggctgcttctacccttgtctggacttctgaatattactgacccctgtgggctaccctctgtagagaaatccagctgatccctcctacccggtgaccagaatctactgcgtcctgcggatacaggggccatcctccagacaatctctgttgtcagcgccagaagccggaacaggtcccccagcacctcccctgcctcggtgagcagcgtgtgggtctggccctggcctctgcctgcacgccgcatgtttgaccacacaggcacctgcctcggggttaccagcaatgtttccaagccccaagaaacactgtgagataacccactcttactaaataaaatgacagccttggtgagcaataggtcctttgggcaaagcagaatgaaatctccagtctctaatacaaacatgcaccctgggcagtcacccacacccttcataccggcgttcacttcaatagccgctcgaaggtcttttctttccttgcggagctgggccagcctattccgcagggcctctttcctcttcagcagctcctcctctttggtctgtagccgcttggcatctgcttctacccggttcttgccatacttgtactgggcagcatcttgagaagaaaaaaaagcagcaattaaaaattaggtttactagcctgggaaatatgggacgatcccttctccacaaaaaatacaaaattagccaggcatggcggcacatgcctatagtcccagctactcaggaagctgaggtgggagaatcgcttgagcttgggagcttgaggctgcagtgagctgtgatcctgccactgtgctccagcctggatgacagtgagaccccgtgtcaaaaaaaaattaggtttattcaagcagataatggggtaactcaaaaagcctgttgaatcagccaactcagtaaacaaacacaaagcattattttgctaattcaacaagaaaaggacagggctggtatgaaccaagcagaaaagtgactagttcaaattctccaatattctttgaatcaaattcttaaaaacgaaaacagaatattaggaaattcctttaattcacttccctttgaggcacacggcttataattaatctgcaacaaggtggagaatgaacattctataatcggaaaagacaggagtaatatcaaaaataatgtctgaaatttgcttccttctctacgtcttcaaatccttccctaacaccgcagtatctgttccttatggccatgtcatctgactggctctgaattgctgctacacccccagcactgagattagcacccggcacggagtgtggcacaataaatgcttgtttagtgaataaatgaacaacggatacatgaagaggcaaccaggagcggtatctggagcctgactgtctaggaaggagtcccagcttacacttgtagctgcatgacctggaacagggcacgaatccctctgtgcctcagtttccctcatccgtgaaatggggatagtaagagcaggcaattcactgagtggttacgaggattaaatatttataaagcacttagaacaaacacaaatgggcaacacataaatgcttatttcataaaatgaataaatgaagaggaaactagctgtagggaaaatttacagacttggcaacttcacatcaccagtgaaaacagctttcaaaacctgaccccatgctctctcctattatgttggcttttcaataacagtaatttaggacaacacctctttgttaagacacatggaagagatgaaggttctaacaaaactcggatggaggatcaccgatttcaaagcttccgtggtctcccagtcgcttctaacaatcactcacgcctgaaggcaactcccaggccttcctgactgcacaccccaagtgtctgactccctcacaaggctagaaactacttcaggtagaagccacaggggtggcataatgattaagaataaaaacactggactcagagaggtggctagaaacccacactccaccctcccttgctccatgactctgcaagcaacctccggagaagctcagcttcaccctctctaaagcagaaacgagaaggaatcctgtgtgtgtgtatgtgtgtgtgcgtgcgtgtgcatgcgtgttttaaattagaacgttatatctgaaaaaaatctaacaaaatgatacgacgcctgatgtagtggacattcactgacaattcttaccatatcagcgataagtgattcccagagccttgtccactcagggacagcagggagccatttctagcacctgtcctaaatgctggatttgccaattcttgcaacgtaagttatcatgatttcaatgaaatactgcatttatgaaggcataaaaagtgatcactccccagtcaattttcccctaatcaaaagaaccacatagaatgacagcaaaagcgtcggcagcctgaggagaggcgaagcattcgacaatctgaaacaaaaggatcgctgtttgcagctaaggttaacaacatatttggcaaacagggccaagtccaaactctactcgcttatttctaaactaagctgtttccccaatgaactcaatgcaatcacctataaatttccacatcttttggtccccatgtaataaatcccatctaatctataatgcaaccggctggattcaagcaaaaacacggaatgccattatttttctcttttgtcaccattagacgtcaccacagttaataaaaactccctacagaacatcccataaaataaaggaataaatcatctaggaaataaagtcagcacaggtactgacagagaaacaccatggcgattgagactccgtgggactccgattttgcttgtaacaaagctttccaggtgtgagctgctcctctcccccatctgcccctcctcaaagaaacaacactaaaagaggtgaaagtaaatacacctgatacattcaggaaataagatttgccagataaggtcaaaggaagttagtacattaaacaaatggtggtaggagggaggatttggcccaactggctccaacctatctggtcaacacgtatgttgggtagaacagaggtggagaaaagcctagatcagggatgtatacgcttccttggggcagacgcagcctggccctgcggagcgatttcaagcctcgttcacgaacatggccaaggacactgccagcctcttcattcccctgtgtggatgctccaactccaaaagtggaaccacagggcaaatgaatgtcggcacgtgtcggtatggcagcctcgctcttcgacagctggtgtgggggttaccacctggggctagctggcctcatcttcgttagcactgagactggtctaccagttgcacagattcagatttgaaaatctcaggtgcaaatcccaagtggcgatggcatgtaaccacatcaaactcaacatctgcacctaactcccaccttctttctctgggaaatcttcctggacatgcccagatggactcaggagcccatcacctgtaaatccccacactgcagccctgccacttgcttgtctgcatgtgtgggtccgctggaccactttggtgtatctttgagccccttgagtgaaaaaatgctgcctggctggctccctgattagacatccaacataatgaggactaacaccaatacaaacacttaagagatgacatatcgccctagctggatctactacagggaagggaagagggtgctgggtccaggcaggctgagtgtctcatgtcttaatgcttctctgcccaatctatttccggctggatgtggagtctgaaggcctggcacccactctggctctgtgatttaccagctgtgagccttgggggagctgcttactctcttggtgattcttttctcatttctatgatggggtagaggataatgcctatgcttacaaagtggctgtgggaagtaaaccggatgggataagaatggcttgctgtggaccacaggcaccgcaggataaccattcctcagaactcctcatactgctctagtgcttggaggtccgtgtattacctcagctattccaaccgcaccaaccacgggagccacgtgtctacgtctgacagataaagatgctgagtttagagtctgcaaggcttgacaaccacagatcagggacaggagctgaggtctcctgacctggagcccagggccacccggagctgcaagaaacctgcactcacaactgcctcctattttaaaatgctgagtcgatcccacaggtggcaaaccagttctgggcttcaatttacaagcagtcagaaaagctgggttgaaatcgccactgtccttctatgtggctgatgaggaaggatgacggtgcccaccgctccatctctccagctgaccccaagctggcactcacgggtgggcaggctcagacaggcccagctccaccaagtgcacttgaagccggaatgcaagacatccgatggtatacttactcgaacccgtccttttcacaacagccgcgggatccgctttctttggctgactgctcagagtcttcccttttcctgtgaccccattagacgccacggggggctttttacccttgagctgttgaaataaacatataagaacattaaaaataaacacaaagtcaaacaaaaaaaaaaaaaaaaaa

SEQ ID NO: 423 - DNA, 26066 bp, Homo sapiens
aggcagttacactgttaggcagcaacagtgctgatgctggactgtggcaggcagagggtgctatcctgacacacttcaccttagtgcaggaaacttcaatttggtggaagaaaggcgatttcgaggtgccaatctgggcgacacttcccagttggagagtcagcaaaagggagagggcaattccaagaagagggaaaagcttgtgcacaggtgagtgtgtgcaaaggtgagtgtgtgcacaggtgagtgagtgcacaggtgagataagatacaggagagggaagagccagaactgcgccctgttcccgcaggaaagcagctctgcaggattagaggggcggggacgcgtggtcagagctaggagttgaggtcggggagggagcccatggtctgcagggcctggtcagtcatccaagggcagtagtgcgcctgcaagtgggcgttgaagagcccgttacaccgggaagggacttctctgtccctcgcgcgtgcacccccgcccccctccatgcacccggcataagccgcagaggaggaactcaaaccagggtcggggccgccagccacccgcagaacgcacacggagctaccttggggccgacggcgcggggcctcattcggtgtcagccccgggagccggcgcctggggaccgcgcaggcccgcggagccgcgcacctggggccccggggccaagcgtctgctcccgagcgccggccgtttatcgcgcacatctcgcggcgaggaggagaggccggaagggcgccccagccccagggctcctgccccgcctgggcctccggctttcgtttccccgcaacgcttcgctttcgtttcccgctggcgcctggctccctccgggtttcgtttcccgccggcgcctggctcccgccaggtttcgtttccgaggcggggccgagggcggcgtcgctgaggcgcccatggccttcgcccgccggctcctgcgcgggccactgtcggggccgctgctcgggcggcgcggggtctgcgctggggccatggctccgccgcgccgcttcgtcctggagcttcccgactgcaccctggctcacttcgccctaggcgccgacgcccccggcgacgcagacgcccccgacccccgcctggcggcgctgctggggcccccggagcgcagctactcgctgtgcgtgcccgtgaccccggacgccggctgcggggcccgggtccgggcggcgcggctgcaccagcgcctgctgcaccagctgcgccgcggccccttccagcggtgccagctgctcaggctgctctgctactgcccgggcggccaggccggcggcgcacagcaaggcttcctgctgcgcgaccccctggatgaccctgacacccggcaagcgctgctcgagctgctgggcgcctgtcaggaggcaccacgcccgcacttgggcgagttcgaggccgacccgcgcggccagctgtggcagcgcctctgggaggtgcaagacggcaggcggctgcaggtgggctgcgcacaggtcgtgcccgtcccggagcccccgctgcacccggtggtgccagacttgcccagttccgtggtcttcccggaccgggaagccgcccgggccgttttggaggaggtaagagttctgtccgcttccagctcccagcgtggcatctgaacccttcagaccagagaactggaccaagaggctggtctgtagagccggttcttgcctgggtggtttgtttatttccgttcacaaatcaggtagggaaggtgtcctgtatgccaggcaactcttttaagattcttgtttgcaaggatcttccaacctgacgtggaacatagacctacaccaagccacgcgatgcttgctgtaaaagcatcccaacagcagtacagagggagtaaaggggctgccgggagtgagggaaaataatgtcagctgggaagtaattttatttgctgatgatcaccattcaaggatcttggggtgaaaaagaaaatgcatgagtttagggggtttaagaaatttagacttaaatagtgtttacctaccgactggccatgaaccttgtgcaggttactcaactactctaagttttgccctttgacatgtacaattcccatcttgcgatgttgtcctgattaaggaaacatctgactcacagcaggtacccacagaaagagactgaaaattctttctgatcgcaggctaggcagatgtcctcctgtgacacagatgagccctgaggatgcccccatggatcttgggaatattttccaagcttacgggacagcgttgtggagcagttaagagcgcaaggtcaaccacgtgtatttaaatttaaactctggcatttattagctgtgtcactttgagcaagtttcttcaactctctgcctcagtttccttaattcatatggtgggaataataatagcacccccccaccccagttcacagagattggcaactgaatacttgtaaagcacttagaagattgccatgctcagagcaagcacataagtgtctgagcctcgctctgagatgctgtgagcgtgcagtgagataatgcacattgaggaactgggaattcccagggggacgctgctctgccagcttcatgattgcagtgcttggctgtttatctcagccccctgaatggctaggagaggacatgctgcagatgaagactgctctctccagcccactgtgcagctgatttcccattcttgtgagacagtgttcccagcgggcctgtagttccatggttgcggtgtcacaggacattgtgatgatgtgccttgcctggcctttctcaaagctgctcagtgaaggctgcaggccaccaagcgatccagacagggacagctgtttcgagcctcggctgctcaatataaaataaaacactccagtccatcctagcatcgaaatactctgaattcccatggcctggcacagtgctcagtataacttaggccttattagcatgcggcaatattgtgctcagcaatttaggtgtgatttctgcaaaagccccctggcttcattgctgatggatagacgttgttttacagtgtacctcctttattcctgaagcccgggcagtgcttgacctggtcgaccagtgcccaaaacagatccagaaaggaaagttccaggttgttgccatcgaaggactggatgccacgggtaagataatattaccttttagttataggcaatgacactaactgattagttgcagaaacagaaatacttcctgcaaaaccaaactttatatggagccttatgtgtgcccctactgtgtggcaggccctgtgctaggcaggccctgggatgcagagatgaataagaccttcaatatgaagcagcatgatgtgtgggcgcggatcctcagtgctctggcggaacacaggaagggcactgaatctggcctctgtggggctttgtcgggtggagtgcatggtcaagggtgatacctggattgtattttaagtacagataggagttggtcaggtgatgaaagcaggtaacatcctccagacagaagaaatagcctgggcaaaggtgcaggggcttgaaccagggtggtgtgtccaggaaccacaggcaattcagagattcttctggagcaaaatgtggaagaactaggaaatggaagaaaaaaaagccttctgagctgtcaaactgaggtcaaaatataatgtgtgctcacatgagaccaaagtacaaaaggggcagacatgctgctcctgtggcccaggacacactgaggagagggttgatgttggagaactagcatccgagtggttcagcgtaggagtttctcctcctgtgtaaacttgaggggtacagacttttaataatataaaaggcaatttccatatagaggtacttgtgaacccagctagggagatgtggcacaggtgatggcccatgttgaccatcctggctccatgtgaaggagcgggccatgtcctggccttcagggagaccagctgtcatcactcaaatgtactggccgtgtccaggacccatcacagtttctttcagctgcagagggaattgtaacaccatcaatccttcagctgatgtgttttgttgatcatttattttgtacccacagctaatttagatttggtgggattacaggagacataaaaattcagcctcaacacaagcatccacacatacaaatgttacaaggagttagcatagagtggcagaaagaacacaggctagtggttccgtctgccctgcatttgcatcctgcaccaaggcctatcaggagggtgagtttgggtaaatttattaacttctccagtgctcaatttcttcttctgtcagatgattaaataataactgttttgcagggtcactgggagaattaggagtataacgtgctgagtacttggctcctagcagacactgagaaatggtagctactgttagggtccgtcctgacaacctaagaaaaaaagaaaatagatagttggcaataaagtgttaagtgtgtgatagagaaacttaaaaataaatcgaaacagtaggagctcagagaaactagtgcacagtgtgctggagtagatcttctcatcaccacctgtcctgagctccaggcagcagctgagaattgtgagatgggctctgggaagggactaatctgtcacccgaggctgtgcaagggggagtcagaaagtcaatgaggcctaagcagtgcctttgaggagaaagctgaagcctaaagcagatacaaaagctctaaaggccaaggccaagcccaaaggggcaagcacaggagtgagtggtagaaccagggctggaaattggaaagggattgcacagaagtggaagcagggtatgaagaaggtagaaagagaggaggggcgagaagagttgctgtggatgccaggtgtgggttcatcaactatagacaataagaggagagaaagtcttctgggtgggggacatggtaagagggtgagcagtagctgggctgccgggaataaaagtcacacgtaaaaggggctcttgtgtctagactcccaatatcagatttgatcactaaccagaatttttcctccgggtttcctaataccacacggagaaatcctaacttcctatgggtctacagctttttataaagaatcctgttatttagtctactcatttcatttgcagtttgagagaacgtctgtgctctttctacgtcaatgttaactttggggctgtggttaagatgtatatattttgtgtatgacctgcaggtaaaaccacggtgacccagtcagtggcagattcacttaaggctgtcctcttaaagtcaccaccctcttgcattggccagtggaggaagatctttgatgatgaaccaactatcattagaagagctttttactctttgggcaattatattgtggcctccgaaatagctaaagaatctgccaaatctcctgtgattgtagacaggtaggtataaagatgccttgaattaggcattttctccctaatatataagtgtgtgggtgtgtgtgtgtgtgtgtgtgtgcgtgtgtgtgtatacgtacatgtatatgccaggaaaaaaattgtgtttaagtcaaactgttattatgataataataggaattctccttatgaattgttaattacctataccaggcacggcatttgctagagaattacatatataatactagtatctggaactataacttgggtaggtgaatgttacatgttattcccagtttactgatgagaactatagatctcagaaaggtaaaataacttgccaaggtaagctggaaatagcataccggggacattaatgagtctatactttcagtcatttatttgttcattggcttattcaacaaatacttactggacacctcctgtgtgccaaagactagtctcaatttagaggattcaatgataaaccagtgtattagtccattttcatgctgctgataaagacatacccgagattcggcaatttacaaaagagagcagtttaatggacttacagttccatggggctggggaggcctcacaatcatggtggaaggtacaaagcatgtctcacatggcggcagacaagagtagagagcatgtgcagggaaactcccctttttaaaatcatcagaccttgtgagacttattcacaatcatgagaacagcatggtaaagacctgtccccatgatgcaattacctcccactgggtccttcccacaacacatgggaattcaagatgagatttgggtggggacacagccaaaccatataactccactcctggcctctcccaaatctcatgtcctcacatttcaaaaccaatcatgccttaccaacagtcccacaactcttaactcatttcagcattaactcaaaagtccacagccaaagtctcatctgagacaaggtaagtctcttccacctatgagcctgtaaaatcaaaagcaagttagttatttcctagatacagtgaggctacaggcattgggtaaatacagccattacaaatgagagaaattgaccaaaacaaaggggctacaggctccatgcaagtctgaaattcagctgggcagtcaaatcttaaagctccaaaattatctcctttgactctatttctcatgtccagatcgtgctgatgcaagaggtgggtcctcatggtcttggacagctccatccctgtggctttgcagggtatagcccccctccttgctgctttcacaggctggtgttgtctgcagcttttccaggtgcatggtgcaagctgtcagtggatctaccattctggggtctagtggacagtggctctcttcaaacagctccgctaggtagtgccccagtagggactctgtgttggggctccaaccccacatttcccttccacactgccctagcagaggttctccatgagagccccactcctgtagcaaacttctgcctggacatccaggcatttccatacatcctctgaaatctaggcggaggttcccaaacctccattcttgacttctgtgtacctgtaggctcaacaccacatggaagctgccgaggcttggggctttccccctctgaatcaagagcctgagctgtaccttggcctcttactcaaggctagagtggctgggacacagggcaccaagtctctaggctgcacagagcagagggaccctgggtccacaaaaccatttttttccttctaaacctcggggtctgtgatgggaggggcagcagcagaggtctctgacatgccctcgagacattttccccattgtcttggtgattaacatttggcttctcattgcttatgcaaacttctgcagccagcttgaatttctcctcagaaaatgggattttcttttctatcacattgtcaggctgcaaatcttccaaacttttatgctctgtttccattttaaaaccgaatacctttaacagcatccaagtcacctcttgaatgctttgctgcttagaaatttcttccaccagttaccctaaattattctctcaagttcaaagttccacaaatctctagggcaagggctaaatgccgccagtctctttgctaaagcataacaagagttacctttgctccagttctcaccaagttcctcatttccatctgagaccacctcagcctggatttcattgtccatatcattatcagcattttggtcaaagccattgaacaaatctctagggagttcaacctttcccacattttcctgtcttcttctaagccctccagactgcttcaacctctgtctattacccagttccaaagttgcttccacatttttgggtatcttttcagcagcaccccacttctggtaccaatttactgtactggttcattttcacactgctgataaagacgtacacgagactgggcaatttacaaaagaaagaggtttaatggatttacagttccatgtcgctgaggaggtctcacagtcatggtggaagttacggcacatctcacatggcagcagacaagagtagagagcttgtgtagggaaactcccctttttaaaaccatcagatcttgtgagacttagtcactatcatgagaacagcatgggaaagacctgcccctgtgattcaattacctcccactgggtccctccaacaacatgtgggaattcaagatgagatttgagtgggatcacagccaaaccatatcaatgagatagataagtccctattttcatggagcaaacttaacattataggagaagaaaagtatcaggtgaacaaatacataaaataatacataagatgaggtaagataatatcaaagcatgataaatgcagggaagaggaaaaatcaaagtaatgtgctaaaaaacggctaaccctccactagatatggtttaggaaggcctgtctgagaaagcaccattagtcagagccctgatttaaaaaaaaaaaaggcaaatgtgaaaattcccgggttaacagaaagcactgtggagaaagaaatctgcaagaatgaagctaagactgaaataagctaacatatctgacaactagaaaatgttatatgttctgagaacatagtaaatgtggaggtgctttgtggatgaatgggaagaggaaggttggggcaggtctgtagggcttgtaggccattcatagaatggattttattctgagtgcactggggagccattggaatgtttctgataaaggagagacataaactgatttatactttaaaaattcacctgtaagaaatagcttcactttgggaggctgaggtgggcggatcatgaggtcaggagatcgagaccatcctggctaacacggtgaaaccccgtctctactaaaaatacaaaaaattagccgggcgaggtggtgggcacttgtagtcccagctactcgggaggctgaggcaggagaatggcatgaaccccagggggtggagcctgcagtgagctgagatcatgccactgcactccagcctgggcgacagcgagactccgtctcaaaaaaaaaaaaaaagaaaagaaaagaaatagctttaggtcaggtgcagtggctcacacctgtaatccaagcactttggaaggctgaggtgggaagagtgcttgagcccaagagttcaagaccagccttgataacatagtgagaccttgtctctacaaaaaatatttaaaaaaatagctgggtatggtggcacccacttgtagtcccagctacttaggagactcaggaaggagaatcccttaagcccaggaggtcgaggctgcaatgacaaagcaagaggatgacacagcaagaggggccttgtctcaaaaaaaaaaaaaaaatcccaaaaacaataaaacaaaaaacaaaaaagaagaaaaaaatagctttaaaaatactataagaaagaggaaaggatatgacaagcaggtcatactgaacttacatcacgatgacaaatggatgagaagattataatcaccatgagattccattttactcccatctggatttcattttactcccctccagttggtgaaactactataactaaaggtttcttcatatgatatggatcaatagaaactctcatatgatgctagtcagaacatatcatatgatagtagcataatcacttagagagcagtttgaaaagatgtagcaaagtggaagattgctcctgcctactgaagaaacactcacaaaagtttctttcagcttccttcatactgttgcaaaatttgaaaaacctaaagcccatcaacaggagaaagcataaataaataccagcatatgtataaggtggaaaaccatacagcagcagtgtaaatatgttgtgcaatgcatgagggcacacacattacaaaaccgtaatgttgaatgaaaatgtcaagttgccaaaagatgtttattcagtagaatacatgcagttatccatactgcaaagagtagagagatgaaaggatgttgaacagcagatttaagaaagttgttctctgggaagtagagataaatgtggttgataaggagatcagaaggactttgattgtgattggattatttcttaacatttcttgaatgttcattttctccaaagatttacttatttttgtaaacataagcaattgcatttaagtatggcatagttggtaaagaacattaatcataaatgtaaatctcaaggaatttcaagaagtgaacacagtcaagtcacctgtacccagatcaagaatgagagcctgccacagcccctacacccctgttctgcccccacccagtcactgcccatttcctccccaggggtagcaactgtcccaactgccatagccatatattagttctgcctgttcttaaactgcctacagatgcaactatttgttaggtatggagttttatttgcacctgacttctttcataccacatgtgttttgaagatttgcctgtgttgttgtgaactaaattttatgcatttttggtgcacatatggatgcagttctgttacataggttcccaggagcagaactgcaggggcatggggtttgtggctgttcaggtttggtagatgttgcaaaaagtattctaaagaggttgaaagaatgttgagtctcctcccctccccacagcagtatttgccaattccctgtgactaacagccctgttgacattagtattaccaggctttaattttgactcctctagtttttccacttgttcctggtgggtaagctggtcactgaaaagctgatttgtcctatctggacacagaactactactcctttcttgaaagtatatctttttctgtacacttttctgtatgtctgaaatattccatcaagagaccaccctgactgtatgtggagaataaagtgtgtggtgggggaggggcaagaaaggaaaaagaatcagctagaaggctgtggctgcagtctaggctgtgatggcccttgagtagttttaatcctgggatgacaatagggatggcaatggggataacaataataatttcaaggttggcaagttacatggaatcttaggatgaactgagaaggatacgaaatcttgttcctttatgggaaggctttgcctggaaaatgtttttgccctattgttaacatgcccgatgttatcatatgtgatatctgtattagttctttctcacactgctataaagacgtacctgatactgggtaatctataaagaaaagaggtttagttgactgacaattctgcatggctatatgggaggcatggctggggaggcctcaggaaacttgcaatcatggtggaaattgaagaggaaacaatggcaacaggagagagagagagagaggcaggggcaggggcaggggcagaggcagaggcgagagagcagggggaagtgctacacattttaaacacccagatctcatgacaactcaccatcacgagaacagcaaggggggtgtctgcccccatgatccagtcaactcccacagggcctcatctccaacaatgggaattattaggttggtgcaaaagtcattgtggtttttgatattattattaatggcaaaaaccgcaatgacttttgcaccaacctaataccctttggcatgagattttggtggggacaaagaaccaaaccatattgacatcttttttgatacagtcccctttatttccaagagaaagactaaggttttcctagtagggtatgactttcgaggtccattatgtcctaggatgcctgcggatcctgaagcagcactggccactgtgtgcaggcagggatttctgcactctgtcccccagttttctgatctgttaagtggggatactcatgcccccttccctgcctactgtcaagagttgtgatgatgattcagtgagtggatgtgtgtggaagtaccctgaaaataggaaattgctattaaaatataaagcattattatatgagcagtgtataatgtgttggcaaattgcttttgatttgaactaatgtggcttccctgatagcaggagtggagaatactaaatagtgggaagcgtctgaaattgatgggctaagggtgcaattatttaaaacaagcagccgtattttcaatgggagaactctataggaaacaggtccttaattcttcccttgatttgtcttctttgtgtgtgtgaattgcctgcaatttagttctttaaagaaatgctgtatcaccttgtcagatgaaaagaaaagagcagttatttgttgtctttgtggattttattcatgtttaaagattttaataaaatccattttagacagtaccattatctagctgaaaaatatgagagacagtaatttttaacggggactgtggttaaggttggagtcttaatcaccccattacctttaaaaatctattcttgctggtgacttttctacaataaagaagactttaaaaataagataatatcagactctatattcataggtaggtatttaattcaatgaatctggagcatgtgctgaccatggtgtaaattatagtttaagtaccagaaaaagaaaactgagaccctaattggctttttttgagcttgagggacaaaattcatctggcagagagagtgaaagtacaagtttgtgagtaacaggagttgggtaagtaacacataggaaggtgtccaggcagaattcacaggagctggcagtggcctgaagctctcagagcacacttttggaggtgaacaagggctttgaaggatggatggtgttgagattatcaactcccaagtgaatttttcttttttttttttagatgaagtctcgctctgttgcccaggctggagtgcagtggcgcgatctcggctcactgcaagctctgccttccgggttcacgccattctcctgcctcagcctcccgagtagctgggactacaggtgcccgccaccacgcccggctaattttttgtatatttagtaaagacggggtttcaccatgttagccaggatggtctcgatctcctgacctcgtgatccacccacctcagcctcccaaccaagtgaattttttacttgtttccttttcagtgctgtcctgtgttctgttatcataatttgcaatgatccggctttagttataaccagtgtctgataagaattagatatttatcttatagtaacagtgtgatacagttttttttaagcacttgtctgtatttgtaacaactatggaaggaaaacaaaccttgcatgatctgtgttttccagatgaggagatggaggctatattagcttagatgacttttacctacatgtacaaaacaggtggggcgggggacacaggcagaataatgtacagttcaggtaacacagggaatttattatgtggataccactgtgtacttttcactgtggagaggagttcaattctaaaatgatcaaaattttaggattttaaagaattgggccgggcatggtacctcacgcctgtaattccagcactttgagaggccaaggcgggtggatcacctgaggtcaggagtttgagaccagcctggccagcatgatgaaaccccatctctattaaaaatacaaaaattagccgggcgtggtggtgcatgcctgtaatcccagctacttgggagggtggggcaggagaaatgcttgaacctgggaagcaaaggttgcagtgagctgagatcgtgccactgcactccagcctgggcaacagagtgagactccacctcaaaacaaaaataaaggattgaaggtggtaatttgaaagtacaaatgaggaggggcccctgggtatctctacgttggaatgtttatatcataaatatttattgtgagtgatggtccttttatattggatctgaattgtccatttagtcctttaaaattggaagatggcatgaacagggcaagagtataataaactatgctgataaatgaaatcgttctaattcatttattcatttatacacccaaataacattctttcattgcatatctattatgtgccagacatgcattactaaaaaagatttcccactcaagaaattacctaatggaggagacaatagatattacacttataacaagtagttctgatttgcaatgaggagtttttcagtagagtcacgtagaaagggttttgagagcacagaggagaaaacagtcaattctgtttgggggcttcctaggagtctgaagggagaggagagttttgctggctgagaacctcactctcaccagaggaaaaggtaagcaggtgcagactaggagggatgttctgtgtcttaccagaagaccaagcatttcctgtaggttgtaggaagccactaggcatttttaaatagagactgatttgacttttgtgtatggtaataactttgttttcctcccccaaaatcactttttaaaacagccagcagaaggagcgactgacttgcttagggaggactttcatggagctgggcagggcatatttgtctccctgtctcatactgaggcaccatcagcagactggatagttgggagaaacaaagaggcttctacctcaggggtcccagaatgtgaatttcattggcaagttcaagtgaaaacagtgtaggaactgacatggcctttccaggattttagtctgccaagacacagcccttaaatacaaatgaactgccaaacaggttcattgtcccctgtcaccctccattctttcatagaggaatgcggacagcaggaccaaaaagatgtgatgacagaggggaggccacactaaatggtagtttgagatgggtcaatggagctgtgtgaagaacacactgcattattactgttgtcaattttattttttaaacaatattgtataactttttttagtttataaaatttaattttatttaacttatgcaatactagaaaaacttctgtagagccaaccctggtttcatcattcctggctgctgattttcagatgctactttgacttcttctgcagacagagaactcactaccccattccttctcaggtactggcacagcacggccacctatgccatagccactgaggtgagtgggggtctccagcacctgcccccagcccatcaccctgtgtaccagtggccagaggacctgctcaaacctgaccttatcctgctgctcactgtgagtcctgaggagaggttgcagaggctgcagggccggggcatggagaagaccagggaagaagcagaacttgaggccaacagtgtgtttcgtcaaaagtaggtgtcccagtgcaatgcaatgtgagcggcaggcattcctgaagggagatgaaccactggcactggctttaggattgtgaggaagtgatattgtttccagttttcaaacacaagagacaacatcctctaagttacttcagccccttccaatgggcttgtcaccacagggctgcagcattgttatcttaaagcaaaggtcatcggactagggatcagaccctgccactgatcctggctgtgctaggagcagctgcacctgggtaagacagtaagtgtctctgtgcctcagtttccccagtcatagtataatcacacagagcactagataacgagctcatagtaacatctacctattagatgcttcccgtgtgtcaggcattttactgatgttatgtcatccttgtgaggaaaacattagccgtattttacagtttacaactttaaggctcaaaggattaagtgatttgtctaaatgtacataactattcactagtaaaaccgggattaaaatctttctgattttgcagccagtgtttttgttttaattagaaagttataaacacgactgcagaagagagtctggccaggcctcctgcctcatgactgagtatgaatcagttctacaccactgcctttaaaaactgaagcagaaatattttctctaactgaacaatgatagccctgttatcataacatagtaatgttataaataatggtagctgctgtgggtaaagatattatgttaagcaatttacttgtattaattccattaaacttcagtgaacatttgcaaggaaggtacggtttcagtcttcattttgcagaacaggaaactgagacacagagaggagaagagatttgaccaattcacttggctaggaagtggtcaggcagagttgtgaatgcagacgatccacctcgacacccctattttaaccacagtgctataaggattccataaagaaacaggcactagtcactctgtatacacatgaaggctagctagcatggaaaggatatgtagatttctggcaaaatattagaagagtcccatgcatatattaaggactgtggcttgtatgaaaattattcagggcacagacttgggggaaatttgccactgaacaaattacctaaattctttgagcttcagttgccttctctgcaaaacagggatgacaatagtcttccctcctaaggttactttgagaattaaatgagaaaaatcatgcaaaatgctaatgcttggcagaaaacaggtattcaacaagtgctagctattaaacattattattcatttattatttgttaaacaaaatgcatgaacgtcttctgtgggcaaagctagttacagtgagataaatgacatgggaagcttgcttcaagctatttatactatggtaggaaaagaacattaatgcaaatagctgtgtgaaaaagtagaccaactctttgtgttttgcctgtccccagggtagaaatgtcctaccagcggatggagaatcctggctgccatgtggttgatgccagcccctccagagaaaaggtcctgcagacggtattaagcctaatccagaatagttttagtgaaccgtagttactctggccaggtgccacgtctaactagattagatgttgtttgaaacatctacatccaccatttgttatgcagtgttcccaaatttctgttctacaagcatgttgtgtggcagaaaactggagaccaggcatcttaattttacttcagccatcgtaccctcttctgactgatggacccgtcatcacaaaggtccctctcatcatgttccagtgagaggccagcgattgctttcttcctggcatagtaaacattttcttggaacatatgtttcacttaatcactaccaaatatctggaagacctgtcttactcagacagcaccaggtgtacagaagcagcagacaagatcttccagatcagcagggagaccccggagcctctgcttctcctacactggcatgctgatgagatcgtgacatgcccacattggcttcttccacatctggttgcactcgtcatgatgggctcgctgcatctccctcagtcccaaattctagagccaagtgttcctgcagaggctgtctatgtgtcctggctgcccaaggacactcctgcagagccatttttgggtaaggaacacttacaaagaaggcattgatcttgtgtctgaggctcagagcccttttgataggcttctgagtcatatataaagacattcaagccaagatgctccaactgcaaatataccaaccttctctgaattatattttgcttatttatatttcttttctttttttctaaagtatggctctgaatagaatgcacattttccattgaactggatgcatttcatttagccaatccagtaatttatttatattaatctatacataatatgtttcctcagcataggagctatgattcattaattaaaagtggagtcaaaacgctaaatgcaatgtttgttgtgtattttcattacacaaacttaatttgtcttgttaaataagtacagtggatcttggagtgggatttcttggtaaattatcttgcacttgaatgtctcatgattacatatgaaatcgctttgacatatctttagacagaaaaaagtagctgagtgagggggaaattatagagctgtgtgactttagggagtaggttgaaccaggtgattacctaaaattccttccagttcaaaggcagataaatctgtaaattattttatcctatctaccatttcttaagaagacattactccaaaataattaaatttaaggctttatcaggtctgcatatagaatcttaaattctaataaagtttcatgttaatgtcataggatttttaaaagagctataggtaatttctatataatatgtgtatattaaaatgtaattgatttcagttgaaagtattttaaagctgataaatagcattagggttctttgcaatgtggtatctagctgtattattggttttatttactttaaacattttgaaaagcttatactggcagcctagaaaaacaaacaattaatgtatctttatgtccctggcacatgaataaactttgctgtggtttactaatctatgctgtcatcctgggtacatattgatttgtctgaaaagtgctttctcagattccccttttaatattgtgatgtaaaggagggaaattttggtaaaggaagttgaaaggtgtgagctggcaggctaagtggaatttgtggtcagagtgctttcagagaaaggggagggctattgttttattttacatatcatttcctcattacaaatattaaagacattttgtaattcattctttttacacctggactttttatatactgataggtatatatgacttacgagtattttgtaaaatagcacctcctaccctaaaactgatggcaagtaaccctttgcttggctctgctcattgcaagacgagctttggttttgttcctgtgatagaccattagttaccccaaaatttattcttcctttcttccatggtaatgtaatatttagcttggtacatgggtgccaataattcctagtgcatttccaaggctcccttaacagctggaggtgggcgactggctagtttcttgccaatagtatgtgagcagaaggaatacctgaaatgtcaaggggatattatcactttcccctttaactcttcatatcggctgtattcagaggtgatagccatctaaggaccaagagatgaggatgacactaaaaggaattagcttgccttaggtaaatagcaagggaagggtccccagagagccctcggcccaccagtcagtgcctcaccccacataatgtaaaaagcagcctggggaaaaaatcaagctgcaggcactgataagggaactagcacagggtgttgtgcctggagacatgcctacggctgcacagataggagagcctctggcccattcagataaaagcttgcacaaacctctggctcactcagatgagggaacaagtcctggcataaaaacacctttgtcctttgtatagtcagcaggctcccaggaaaaagtttttttctccttttgtgggcgtgggcacagtgggctccagttagttccagtgggcactttccttgccagtttttggactgtgagtctggcctctgtgaatcataacttcagcccctgattggtcccaggcaaaggtcctaggccaggctttctgattggtcctgggccagggtgcctggccaagctgagtcatgccttctccaagacagccggtagactaagcacattcattcccctttccagcccgtaaaacccccacaactggcctcatagtgggcaccccattagagctcccccttctgctggcagagagctttcttttttcgcttattaaagtttcactccaacttcacccttgttgtctgcactccttaatcttcttggaattaggacaaagaactctggatattatctcagacaacgggagactgttacatcttggtgcattggtaagattacaacacattttggtgcattggctgggaagaagggaattcatcagaaggatgattaagagttgacctttaactttcacctttacttgcatttctgaggcttcttgtctattccagtctagtttgctttcacagagggcctagccatcatgtgggattggaaggtcccagggcaactgaaggtttctggctggggctaccccctcagtgttatctgaaggcccttggactaactccagtcccctacagcccatcagggagtcagcacaaagacttgcaatcttttcctattgcattttccttctttcttcttgtggctatcatgtctccaacctcttctttctatgcaatgttgtgggtgtttttgtaacctagggatataatcttgcggagtagagttagttggtatcttaataatcaagaatgtaattcaaagagttgttgtttttgtgatttcctggaaacagggaattcaagacttcagtctaaattttcacctagtaagggcctttctatccctcaataatagacattcatggcaccatatgggaggatctttcaccccgagtgaatatcctcgtctccttttgggttgtttttttcctccatataatagctcagcattgtccagtgaatttaaacagttcttttatgagagaagttaattttcttacggtctgggcttgctatgggggcaacctatcaaaccccaaatctctctttctaacttttgcctgaaaagaatttggagtcagagtttttacctaacatttctaaccctacaatgccacctagtggaaaggaatttttctccctggggagccttatcatccctctgccccaaactccttgtttcccaattcttttcccttttacgttcctctatcagtgatcagagcccatgtcctatttgtagaccaaacaacaaaaaaaatctccactttcaacagctgggaggtagccatcctgataagacaaatcttagcttcaatactctccccatcaaaggaatggcagccattcaattcttatgctcatttgaggcacctgttctgcattcaactacaatgggattttttaaaaaaggaattttatgtttggaagttaatcagtcccattctgtggaattctgatttttcactggggctatagcaagggaagccacagatggtattaggacattccctgcattaaagagtcttgcccaaacccaactactacagaatctctcctaggcctcttagggtactttgggagccttttgggttgagtgggtctaggaatccagcagggcagaaagctagagccttatgcaggtgagcatgactagtcctgccctactggctcctctggatccatgggtgaaggatatgcttgcatccatggggcggcacctatgatggctgcagggacccagaggagagaaggaaggagaagaggaatgccttttctctctttccctccaccctgggtaacgcagagaggaggaaggggactgagggatgccttgtctcccatctcttattagatgggtaacaaaccatctgcagtctgtaatctcctcgagtgcattctgaatcactggaactcctttgatgctgaggttctgatgataaaatggctcatattctattgtacaaggacatggcctttttaccatcttggagatgaaaaaacctggctttctgagggaagtctttttttatatactattcaacaactagatattttctgtaggcaggagggtaaatggtccaaggtttactatatacaagctttctttgccctgcgagacaacccaaatctttgtaagcattgtacagttgaccccacactcttggcagccatgtcagacaagcctacaaaagatacttccccaaaatcagagagtcaaaccctttggggaatcctcaaatgcaacttctgggtgccctacctgcctcacttattcagggctcccaatagccaaatcattagttcctctggttgtgccacttaaggaattcccaactttggacaggttctctgatgaccctaatagatgtatagagtctttccaaaatttaacgtaagtgttttatcttacatggagagatgctatgctacttttaagccaaaacctaacaggaagcagaaacattcagagatgaacaatgtatctcctatagccagtctaaaagtctggaagataagaagtctaaaagaagggagagcaaaagagaaaaagaaggtgaacaagtggcagaatctctattaccaatagggagggaggcagtattccttgaaaatcccagttggaatgccaatgatcccatagatgagttgaatagaaaacacttttggatgtgcatactggaaggcttgagaaggacaagtaccaaacctcttaattattgtaagttgtccatgatagatcaaaaaccagatgaaaatttctcagcgtttatagaaaggctgagagaggcattagtgaaacatatctccctatctcctgattcagttgacggaaagctaatcttaaaagacaagtttattacccaggcagccccgatatcaaaaggaagttgcagaaactggccataggtccagatagtactctagagaacctcttgaaagtggctactttggtcttttacaatagagtccaggaggaagcccaggagaagaagaggaaatatgagaaaaaacagaggctctactggtcacattagaggcctataaaatccagaatcccccaggtgcatttgctaatcactaccactgtggcaaactggggcacttaaaaggggttgcccagacagcaagaagaagccacctcaaccctgtccaccctgtggtggagacaactggaagtcaaactgtccctggagatataggttgctaggtccagagccagtctcccagatggtccagcaggactaatgggtcctagggctcaatttcttggctccagcaactcgaactgccattactatccaggatccctggttgattctggacgtagaaaggagaaaggtagacttccttctggacaccagagccagcctctctgttctcctctccagtcctgaccttctctcctcccatatcacaaccatggtgaatgtctaaggaaagtctttaacccaatatttttcatagcccctcggttgtagtaggggggaattgctatttactcatgcctttttaatcatgcctgagcatcccagtcttttactagagatattctagcccatatgggagccaccatccttacggttccaggacagattctttgtctccccttagtagaaatcaatattagcccagaggtgtgggcaagtcacaggaaaattggtcaggctgcaactgctatcctggtccagattcaccttaaggatcccacctccttccctaactagaagcagtaccccctaatgcagtaccccctcaaggactttaagccatcattaataatttaaaggcataggaccttcttggaccttgcaacaacccttgtaacactccactattaggggtacagaaacccagtggggaatggatactagttcaggacctccatctcattaatgaagctgtaattccaatccatccagtggtttgtaatcctaatactttgctaactcaaatgcctgagggaaataaatggttcacagtgtgggacctaaaggaagtctttttctgcatgctattgcacctcccaatacttgtttgctttagaggatccctccaatcaggctaccaagttgacttggacagtactgcctcagggattcagagacagcccccacttgtttgggcaagcattatcaaaacacctctctgaattctctcatcctcagattaaagttttacaataagtagatgatattcccctctgtgtcccaactgagggactttctcaaaaatgcactgaggctcttcttaattttctagcaggtagtggatataaaatttccaaatctaaagttcagctctgtcaaacttcggtaaggtacctaggtctagtcttatcagaaggaaccagcacattagatgagaagaggattcagcctctttcctccttcccccttcccaaaaccctcaaacagctaagaggattttggggttttttgcagattgtggatacctgggtacagtgaaatagttcacccttcatatcaccttataaaagaaactcaatagctgaaactcactccctgatctgggaacctaaggctcagaaggcatttaaacagctaaagcaagctttacttaaagcatcaaccctcagtctttccatagggagggcatttaatctgcacatctcagaaaggaaggggatagctttgggagtcttaactcaggcctgaggcccagcccagcagccatccagtaacctaagcaaggaacttgacttgatggctaaaggatggccagcttgcctctgaacagttgcagtggtggctttgctggtgccagaagtgactaagttgagcatgaggaatgacctgattgtttacaccccctataatgtaaagggactgttatcctctaaaggaagtctctggctaacagataatcgcctcctcaaatattaagttttgctgctggagggatctgcagttcagttaaaggcctgtcctttcctgaactcagccactttccttccagatgaaattggagaacctgaacatgattgtgaaaaaatagtgatgcaaacctatgcagccagagaggacatccaggaaactcctctagaaaactgagactgggctgtctttacaagtaaagttctattatagaacaaggaacctgtagggcagggtatgcaatagtcaccctggatgacatcattaaaagcacacctctttcaccaggtacagtgctcaattagctgagttaattgctgtcatgagggtgcttgaactaagcaaagctaaggcagttaacatatatatggattctaagtatgctttcctggttcttcatgctcatgccgctatttggaaagaaagacactccctgactgctaatggctcttttattaaataccattaggaaatagattgttgtcctcagttttccttctgcaggaagtggcaatgatacattgcaaaggacaccagaaggggatggatgaaatagctgaaggaaataggctagcagaccaaacagctaagtcagcagtaagaagaccccaaagtcccagcacacttgaaggctgtctaatttgggagggctccataagggaaataaagcctcagtattctcctgcagagatagaatgggccacctctcgaggatacacttttcagccctcaggatggttacaatcagaggatggcaaatgttatttgtcagtctccagtcagtggaaagttcttaagatccttcaccaaacttttcacttgggaaagaataaaactcatcaaatagcccagaggttgttctcaggtaaatatctaccaaaaacagtcaaacaaattgttaatgcttataagatctgcctcaaaaacaatcccctcaacaaatggcatctccccatccccagcaacacaaagaatgggaaactgcccaggggaggactggcaaatggattttacccattttccaaagataaggggaattcagcacctcttgttgtgggtggatgccttcactagctgggtagaggcatttctatgtcaaacagaaagtcctctaaggtgataaaagcattagtcaatgaaataattcctcgttttggactccctaaatacctccaaagtgacaatggcccctcatttaaggcagctgttacccaaggggtctcaaaagcactgagcatacaataccatcttcattgtgcttgaagactgcagtcttcagggaaggtggagaaaacaaatgatatcattaagagacacctcaggaagtggtctcaagaaactcacctcctctaaactgcttatcttcctatagccttagtgcaggtgaggagcaccccttcaaatttggggttgaaggggtgttccttcacccttttgaaatggtatatggacggcctttccttaccaatgattttatattacatcagagaacttctgaattggttaaacatgtaacctccctggcccagttctagcaggaattaaaacagttatcagaattccaaccccaagaactagggccacctctgttctaccaaggagacttggtactggtgaaggatttttcctctcttttcccctctctaggtcccagctgggaggaaccttataccatccttctctccacctgctcggcagtgaagtttgtgggactggaatcttggattcatcacactcgagtcaaggcctggaatga

SEQ ID NO: 424 - DNA, 5851 bp, Homo sapiens
gaacagcccagcctggagcgggaagcagggacaagatgacctcaggaatcccaggctgcgggggtgcctgcgtcctcccctcccgagctccactccgcaggcgagacccccaacactgctccccgacactctccgaggcacccctcctccgtgctcacacccaaacacgtctgctcacccgtgggcttcccaccccgaacacaacgaggactgtccaggtgtcagtgacggtcaccccgacctggtcccctgtccggcctcgccaggtcagcacccgccgcgcgcacagcagggccgggtggaaggaggccgggcctggccgtggctcaggcgccacctcactggggaaactgggaggtggtctcagcccccttctgggcctcagcttccccatctatcccaaggagccggggtaggcctgggcggcgcggggacccccaccgcgggctcgccgactccgcccgccggaggcccctcccgcgtcccgcccctgcccccgccccggggccgcgcggctgcctgggaggctccgggccagccgcggtccagagcgcgcgaggttcggggagctcggccaggctgctggtacctgcgtccgcccggcggtgagtccgcgggcccccggccgggacgcccccgccacctgcgcgcacgcgctcagacccggcggcctcggctgcggtgcacgcggccccggctcagccacgcgcggcggaaggcgccctgcgggggccggggcgggagagggtgggagagagcaagaggggcgcacggggaggcgcaggagaggggctggggctgccggtgggttggtccccagagagctgagcttctcctcccatcccccgcaggcctccccgaatgtttccaaagatctggggcgggagcgggcggagactgccgccaggagcctcccggccgccccagggctgcgcagccactggagcccatcacccaactccagacgctcctggctcctctacgtgggccgggagggacagccttgaggactaggggagggggcacgggaccttgcagagctcctggccggaaagggaggattgaccgcccccggcatatcaccccggagcactggaacccgcccccgcttcttgttttggcactggtggtgcttgcggtgaggtccaaggagcccagcctccctgagtggaccgccgggcccctccccgttccgggacacaggagaggctcccgccccttgctggctgggcagcccctagatacctggctcccaggggccagcttccctgagcctggggatgagccatgagcctgcagcctgggccccaggggcgccccccacggcctgccggctggctccctccgggctccatggcccacccggccttcctaattgccttcggctcccaccggtgccttagctcagcctggtggcccagcgggttgggtgccacccagtgagcaggtggcggcaccagctggacctgtttgtggccctgtatgctaggacttcctcagagacagctcagggacccccccacaccagaacctcactttaggggggtggggggaaaaggaattggagatccttcctcctcgggctactccctggaggcggggataggccccagccggacttggcactgtttttggccacctggggctcccactcccaaccccaggatgtcagcccaggtctcactgtcctggcctgctgctctccccttagggcctctgcgggcccctctccagatctgttctctgaggcatcctccttacccccagtgcccagcactagctccccaggcccgggatgtccctcccactcctctgcccacggctgtccctgacagaaggcagcagcctccccctccaacaccatgcactcacaaaacagagaatcacgaccccagctgggtgtgttccagattctttctccagcagtgcagagggtcctgtgcagaggccgaggagcagtacagcgacccatctggccctttcctgctggtgggaccagtggcacgcagccttgtctctcggagcccatttcccagccacagaatggggagtagcagatactgagtggggtgctttcctcggaactgagtaacatcaggaatggggagtgctttccccctcagccatgccccacctggccccaggtctccatgtgaggggagctgcctgggctcaaaacactgagccatcccaaggaaaattctagatacagattagctaatatacactgacagatacacatatagatgtgtatatagatttctcttttttttgagacagggtctcactctgttgcccaggctgcagtgcagtggcatgatcatagttcacttcagtcttgaactccctggctcaagagatcctcccacctcagcctcccaagtagctgaccacaggcacgtaccacgcccggctaatttttgtattttttgtagaaacaggaggtctcactgtgttgcccagggtggtctcaaacccctggcctcatatgatcctcctgccttggcctcacatagcatggagattacaggcgtgagcccctgtacccagccccagactagctaatattatgactgatcaccattccccattccccattcccccaccccaggaccactggcagaggccactcactctgccttcttttctgtggttctgagaaggctgctgagtttcctcctcttgcctgtgcagccccctcctgccaggtttcaggagggagatagcctagagcatgtctgcactgagtgaggagtgggtcaggagagaagcagggaagtccttgtgtgctggcaggtcccttcccctctgctgtctgtgtcctcatctgcaaagtgggggtgcatggtcttggggaggagtgaggcaccacccggccccctaaccagtgtgtctctccagagcaggacaggctgctttggtttgtgacctccaggcaggacggccatcctctccagaatgaagatcttcttgccagtgctgctggctgcccttctgggtgtggagcgaggtgaggtgcccttggggaccccagacctttgtccagctgtgccctgctccactccctctccacccctctcccctgagcagacgccccaggggtccttccaggccgctcccagcagagggctcacccggcctggccacactgtctcactgtgtgtttgagtgtcgcttgacctgctcgacggccagggtggggtgtcactgtctttgctctgccttcagcccagggcctggtatacagtaatttctcagtaaatgtccactggggtcaggcctgggagggacactggaggcttccctgagacaggtgtgtcctccttccgcagccagctcgctgatgtgcttctcctgcttgaaccagaagagcaatctgtactgcctgaagccgaccatctgctccgaccaggacaactactgcgtgactgtgtctgctagtgccggcattggtgagtgccaggcctcagaccgtgccttcctcccctggccatctccctagcccgggccggggctcagcagaggccattgctgtctgtctgcagccgtctgtctctcccctgacagcctcatttcccatgcagggaatctcgtgacatttggccacagcctgagcaagacctgttccccggcctgccccatcccagaaggcgtcaatgttggtgtggcttccatgggcatcagctgctgccagagctttctgtgcaatttcagtgcggccgatggcgggctgcgggcaagcgtcaccctgctgggtgccgggctgctgctgagcctgctgccggccctgctgcggtttggcccctgaccgcccagaccctgtcccccgatcccccagctcaggaaggaaagcccagccctttctggatcccacagtgtatgggagcccctgactcctcacgtgcctgatctgtgcccttggtcccaggtcaggcccaccccctgcacctccacctgccccagcccctgcctctgccccaagtggggccagctgccctcacttctggggtggatgatgtgaccttccttgggggaccgcggaagggacgagggttccctggagtcttacggtccaacatcaggaccaagtcccatggacatgctgacagggtccccagggagaccgtgtcagtagggatgtgtgcctggctgtgtacgtgggtgtgcagtgcacgtgagagcacgtggcggcttctgggggccatgtttggggagggaggtgtgccagcagcctggagagcctcagtccctgtagccccctgccctggcacagctgcatgcacttcaagggcagcctttgggggttggggtttctgccacttccgggtctaggccctgccccaaatccagccagtcctgccccagcccacccccacattggagccctcctgctgctttggtgcctcaaataaatacagatgtcccccagcttcctgctctgagtgtggctgccccttgcggggagaggcagagcaccccaggtttggagggtcctggggtcttctgtggtatggcccaggggggtggtgggggaggaggagtcgtcccctgagccacagccagctgcttgcctgacctcagagggagcccctccccagtgctctgccctttcttctgccccaggttcagcaggtcaagtgagttcctcctcccacagcggaaggaggtgttggggggcatggaggaaagaaagcgggtgcaagaaggagcacgctcaggctggggcagcacccagggccgtaggacttgggaatggagggtgtctgtctggacccgctggtgcagagggtacaaaagctgggctggggcaggacagacgggccggagtgtagtgagtggcctgtgggaggggcagggggctcccacgcagaagctctgggcagcagccctgacccatccgtgcctggactgcagtgctgcccgcttccccctggcaaacaggtggcagcctcctgacagaggaagccggcccaggccgccgtgtctgcagttgggtgctgtgcgctgcccagagggctctttgggctggagagagaaaacaagaacagacacccagtggaggtgtgtttgttcatttctccgggacagtgggagggagccggccagggtctcagccacttagggcccgaccctgaattttcccggctggccagaaactgtggtgtgtgtgtgtcaggatcccaggggcaccgtccagcaggaggggccggtggtcaacgtggaggcccgagattcccacccctggcagctgatgtgaatagccgggtcctcccaggtccctgaggtcaaggcaggtcaaagacctgtgtcctcctcctgggtccctgagctagtgattcctgtctgaaacacatgaatcattactgccacccatgaggggcccattgtaaccgagcgagagggcctggaagaggtcagcgggaggaggggcctgatcggtggatcagctatccctgtgcaaggacccggagcccatcagagcagcctgcagagactgagcttgagattccgtcgggagtttggattcgctgagtgggtcgctctagcattgagaaatgcaagcagagaacagagggtggaaaccagatggtccaggagcctgggcactgtagccaggaggacagagatcccggtgttcgggccccggtgtgcagtgcgttcactgcattgttcactcggaatcgcaggtggctttgctggagggacagacagttgatcatagtggagctggtgagaggaagctgcacccaaaagccatggccgggaacctggatctgactgcagggaaacagaagcgtggtgggcgctgggcgatgatggaatttctaacaaatgctttgtttctgctaaa

SEQ ID NO: 425 - DNA, 105884 bp, Homo sapiens
aaaaccgctgcctctgcactttggaatcccatcttgagactcgctaagcgtcccagccgcatccctcccgcagcgacggcggcccgggacccgcgggctgtgaaccatgaacacccgcaatagagtggtgaactccgggctcggcgcctcccctgcctcccgcccgacccgggatccccaggacccttctgggcggcaaggggagctgagccccgtggaagaccagagagagggtttggaggcagcccctaagggcccttcgcgggagagcgtcgtgcacgcgggccagaggcggtgagtattttaacaacctggcttcggggcgggagcccgggccccaaacatactcactcacaagcaccttggtccttggagtttaaaaccacaggggcccaacaacagggattttgactgaatgaaagctcatttgcttaaatgaaagtatccatgccgcaccttataaattgagtcggctagtttgcagtcctttggtaaataaccagcccggttccttccaggaatactactttcctgatttttgtgactggctacaggattgaaagatatgggtgtgtcggaactgcctaggcatccagtaagatgtcattttccaggtatctccagaactcatactccaaccagtatggaaataacttttcccttactgtttttaaaaatttggtgctgggccaggcgcgttggctcaagcctgttatcccagcactttgggaggccaaggcaggcagatcacctgaggtcaggagttcgaaaccagcctggccaacatggtgaaacccagtctttactaaaaataaaaaataagctgggtgtgatggcacgtgcctgtagtcccagctacctgggaggctgaggtaggagaatcgcttgaacccgggaggcggaggttgcagtgagcggaaattgcgccattgcactccagcctgggcaacagagcgagactgtctcaaaacaaaacaaaacagaaaaacaaaacttggtgtcctaaacggaattactgtatcagacactaacaggtaagggtcaacaagaaatgtgatatggggtagaaggttcaaattctgcctctaggtaggagcaagcctacgtcccagcaagactcgcagataaactagcctcttacaaccagaggagtggagctgagagagtgaggaggtgagtgaccatagtacctctcatccctgatgttgatatgtgctctatgcaggaacagataggtagcttttattcctggtctttggttcagggactgcagtgagtatccgggaaacatttattaagcaagtgtcatgagcctctctttctagccaatggaatgaactttaactcaacagtatggtttatcacaacatcactgcctttgaagtgctgcctctgtgaattggaactgtccagatggttttatttttagtctctcctttttcatcgacttctagtctctgaaagacaaaccctggttgctaagaaacagtatataaccttatggccgataaacagtagattttctttcatcccttagcttttggaaagtaccaggcctttaatattattatttagcttaggtttacccttagatggggtggataatctggaaatcaattagagattgttgcatttctttcctcctcagaataattagtgtctcgccacagtagaagcagccaattactttcaagtaacccacgtatctacaagctatagtacttaacagtaacaaaggtcacagacatatggtctcgtgtccatgaatagttaacgatgaacatgatttgcatgacttttttctgttaaaaagcatttatttagatacaaccatttatttctaagctcatatcatcgcataagtattaactgttgcatctgttttcttatttggttgtaattaccctggaatcttgccagatcaaattgctcagaaagaggcagctttctgatgggttatccaggccttaataccctgaagagctcactgtacactattttgcgattcctgaaaagattttcaaatgaaccattaaaaaaataccaggaagtgtttagttatctctcacagagtcttcctttttttttttttttttcctcatgtgaaccagttgcagtaagtacagaattatatattcccttttaggggtttgatgtctgagatcctgttgggatgactttgaatttttgttgcatctccattagttacttagattcactttctcacttgtttcctttaatgaagttggaaaaccaaggaaaatgaatggcaaatatctcagtagaattagctgcctacccgctgccccaaaataaagaaggctttatttattttggggataaaaattagaaacactttctgatttaaaaaaatgaagaggccgggcatggtgtctcacgcctgtaatcccagcactttgggaggccgaggagggcggatcacgaggtcaggagatggagaccatcctggctaacacagtgaaaccccgtctctactaaaaatacaaaaaattagctgggcatggtggcaggcgcctgtagtcccagctacttgggaggctgaggcaggagaatggcgtgaacccgggaggcagagcttgcagtgagccgagatcgcgccactacactccagcctgggcgacagagtgagactctgtctcaaaaacaaaacaaaacaaaacaaaaagcaaaaaaaaaaaaaaaagaaaaaagaggataaagtgctttaatagtacagtttcatttgtccactcataatgtgaatttatttatatggtaaaagatttgtcttgttttgtgggaatccttccattaatttcctcctgcagccccagtgtggggattaggaatatgggctctgatgctgggtagacctgggttcaagttctgattatgccatcacttgctctttgaacaaaatccttagctactttatgcctcagtttcctcattacttaatataagacaataccaacttcatagggttttaatttttccacgtgtatatgtgtaaaacataactttattcctggtaaagtactatgctgtcacccttaagtcgaatgtttgtgccttgttaaaaaaaaacactggtttaaaacacctacttgtggtcgggcgcaggggcttgtgcctgtaacctcagcactttggaaagccaatgtgggaggattgctttagtccaggagtaacatagggagtcccttgtctctccaaaaaaaaaaaaaaaaaaaaaaaaatttaaattatctgggcacggtggcacatacctctgtcccagctactcaagaggctgaggcaggaggatagcttgagctcaggagctccaagactacagtgagctgtgattgtaccactgtactccagcctgggcaacagagtgagaccctgtctcaaataaataaataaataaataaataaaccacctatttgcatagaaagaaagtatactagtaaaaatctgtggctatcaatatattaaattattctgagtacctctgatagactctcagacaagattgagttctttttttttttttttgagacagagtctcgctctgtcgctcaggctggagtgcaacagcgcaatctcagctcaccacaacctctgcctcccgtgttcaagcgactcctctgcctcagcctcctgagcagctggtaccacaggcacatgccaccatgcctggctaattttcgtatttttagtagagacggggtttcgccacattggccaggccggtctcaaactcctgaccttgtgatctgcctgcctcggcctcccaaagtgctgggattacaggcgtgagccaccgcgcctggccaagattgagttcttgatggaatttggatttaagttattataagtatttactaattcatactggctttcccaattatttttacttggtgatttttgtcttgtccttaaatatcaaagctgtctacacaaattaaaagagaaaaaagcttacacaaacttctaatccaaagtaaacctttatccttccttttaatattctgcttgtttgtaaatattttacattatttatatcacctctagataaatataagacaaagacatgcatttacctagttttatccaattctgggaaatggggtcttgcctgtgctggtaatatagggttgaattcacattcatgtacttgtctaaccatacctggtcctttagcttgatgctgtttgaagaaaataaaaatatattttgaaaatgaacctataatatggaattttattttacagttaacttgagctgaatttgtatgtaaattatgttaatcttaacatttttgtggcctacttcgtattagtattgtagagacttcaacatgagcaataataataatagcacttacgtagtagctagtatgtaaatgcacactatgtatactaactctttcaatcctcataaccaccatggaatgagaggatctctagcttaaaagaactaattaaaaactaggaacaaataactattcaacacaaaataagcccttatgaagcttactgtctaattgatgggacagacatttattaatatgtgaacaaatatgtatactttaaagcaggggtatccaatcttttggcttcctggggccacatgggaagaagaatcgtcttggccccacacaaaatacactaacactaatcatagtggatgagcttaaaaaaaaaatcgcaaaaaaacctcaatgttttaagaaagtttatgaatttgtgttgggccacattcaaagccatcctgagccacctgggctacatgcaccttgtgggccctgggctggacaagcttgcaaggaaagctggggtctcagctggtcttgggagcaggaagatctttccttagaggtgacgtttgagctttggtctacaggatcattaggagttgtgtggttttttttttcctgacatcaaatatgtcattctaacaccaactaactgtgaccccaactaggtgtcccacagttcaattctaacactaactactcagagttagtgtggaccccacaaattaagggctcagtcccacaaaactgccccccacttcagacttcagacactagctgcaaatggagtctccaggctacctgtatgtctacccaccagactacaaagttgggggttcccatgcatctccccttccccagttttgataattcattagagtgactcacaaaactcgcagaaattactatatttatgattacaggtttatcataaaggatacaactcagtcaagtggaagagatgcgtaaggcatcttttgggagatgaaggggtaggtggtggggtgtgaagagtttccatactctaggtagatactttgatgtgttcgccaacctggaagacccccaaaccttatagttcaagaacttttattgaggctttattacctaggcataattgattaaatcagtggccattggtgattaaatctccagcccccgcctctccccagaaactgagatggggctgcaagttgtttttttttttttttttttttttttttgagatggaatcttgctgtgtcacccaggctgtagtgcagtggcgtgatctcagttcactgccacctctgcctcccagattcaagcaattctcctgcctcagcctcccaagtagctgggattacaggcatgtgccaccatgcctggctaatttttttgtatttttagtagaaacgaggtttcaccatattggccaggctggtctcgaactcctgaccttgtgatccacccacctcgacctctcaaagtactgggattacaggcgtgagccactgctcccggccaggggttgaaagttttaaccccccaatcgcatagctggtttttctagctaccagtctcttaagctagctgtctagggacctcaccaacagacattagcataaaaaagacacttagcactctgggaatcccaagggtttggggagctctgtcccaggaaccagggaccgtggctaaatatttattttttattatgtcacaggagtttaaatggcctctggacagccagagaaacttgttattcagattgtcttcagaagaacttacagtggggagcatagtcagctgacggccccagctgccacccttttggatccattacaccttgcctgtgagtgctggcttgtgctgcacccatcccagccaatggctgagcattccagggtgccagtgctgttgcaggactgccaggcttatacgccctctgggcagcaacagacccatacactgacaatggcacttgcagcagagaaagagtttaatcatcgcgacattctcagtgaggaaacaggaggaattctcaagcctcaagtttgtttcttccatgggttctgggcaagggtttttaaggggattcatggagggtgaggggctagaaaatctggggttgtccattggacagctcaaagctgggctagtgagcaacaaccagctacaaggaagtggaccaaagggcaagctggcttaatgattgctgctgcaagcccggttggattttattgttttgtttttctcttgctcaattttatacaattttcttgggatggttttagtgctagcctattcctggcccatgcagaactcctctattaggcaacttttgctggaagactccccatattcgtgtccaagattttctcagaactgtataacactgaggatcttgctactcaatcctctttccttcggtcctttcatagaatgaaagttgtcagactcaaaatgaggtcacttgtgtcaaacacgtggagctggggccatgaagggaagattctcatgcacatatgcctcataacaagaactctcacaaaaggctctgcaaaaactacaactttgcacaaaagctacaaccttacacaaaaagtacttctgcaaggacatctgcctagcaactgtctgtccagccttggactgattctacccttgttgatttttgtagccaaggatatttgtctcaaacaacttgtatcaccctcctttcctcacttttccttaaaaaacctttgtcttcctttgccttcttgaatatacccactgtattcccattgcaatgctcaatccagaataaatatgattttctttgggagggcctctctcactgtcttttatttaggttttggcaatagtaatcagacctagtcttgttctcaaagctttccttccctacccctgctcccactttcatccttcacaagcattcccccttatccatctcttgcttgtctaaccccatcttggtgtcagcttctgaaggactcaaactaatacagtctctaaaacaccctactgcaacctcaacacttagacatcttatttatgtctgttgttggcatgctgtctatgcagattggggaaacccattctttttctcatttcctccttcagggcccagaaaaacatttcctaatttccttgatccaaccttaatgcgtcccaccagtttgttatgcttgagggaaggaaataatctttgtaatccttctcttcatccccaaactctcaagggagataaaaggagaataaatgatggtttgataagagcagttcatcatggccaatcctgatttttctcttttctccttaaaaagcattgttaaattttgtaaagtattttgtaattataagatggaatacaaggtgggatatacaataataaagtcactaagttatagtgttaaatttttatcaatatcactatttagtgtctattttctgcaatcctgaagtatggtttcttatgtctgagacagaacttaagtcattttgactcacattatttgcatctgaataagccacataaaatattctgaaatgaagtacaagttttaacaaacttattagagcatattagaactgttttcactatttcttcctcactgcaatgttcagatgttcaatttccttctctatatgattatgagaataaaattctgcttatagatgctaagtggcctgaatgcatcagtctagtattcttccctggagatggagaattgggtaatgctggagttccttttaatgttatgaaataatagtacattggaagatagtatctgtgattgattgtaatgagtaatcttgatggctcaatatagatggttattcattaggggattatttaagtcaatctctagcatgcagaaagtttataaagcaacagatagtatttaactcttcctaatgacatgtctcaatgagctgggtagatgtctcaatgattatcagatactaatactactactatttgacttatttttgaaatgagaaatgtaatgaagcattggaatcctgttgtagcataaagtaaattagttatgatctggaaaaattaaactgggtacccctgagagactaaaaccaaaataacaattagtagctcatgtgttttccatgattagccatgtgctagaccttgtgttaagtatgtcaggtacattattgaatattcttttcatgataagccatttgctaccttaaagatgaggaaactgagtcttgaaaataaaatgattttccaagatctcatggctttttgagtgacagaaccagtattcaaacctatgtctatctaccaaattttggatcttgaatatgatgtacagatggagaatagatagaaggattgatagtacagctagctaaggtcttatcattgttttttttttttttttttttttttttgagatggagtctcgctctgttgcccaggctggagtacaatggcgtggtctcagctcactgcaaactccgcctcctggcttcaagcgattcccctgcctcagcctctcgagtagctgggattacaggtgtccaccaccatgcctggctaatttttgtatttttagtagagacgtggtttcaccatgttggccaggctggtcttgaactgctgacctcgtgatccacctgccttggcctcccaaagtgctgagattacaggcatgagccactgcgcccagccctatcattgttttatattgacattaagaaaagagaagttctataggctaaagagagtggtaatatcgaagcagtaatgtgacatttacagttgcagagaggggaagatttctttccttacctatccctaggttcatggctgatatccctataaaaaaagacagattaacaagagaaaagcatacccattcatttaacataagttttataggacataggagcatccaaaaatgaagattcaaagaaccagggaaaactgtgtctttttatgcttaggtttgatgaagagtggatagtatatagaagtatgattggtcaaaaaggagtatggtctaatgacataaactggggaagcttagcaagtcctgtttgttcaaattctttgtgtctctatgtctccacttctttcctatgggtttagggaggagggaggatccctctgaaatgaggatattatgacctaccttagaggaaggtcagagaaattttttatggcttgcttcaggggaaaaagatgggagaaggtcagagaggctttcctccttttgctgttttctcaaataccaaggtgctatattttgggataacatgtcgtgaaccccatcatagctttaaaatgatttgaatagagaagtactttgcaggagaaaagtttctctggggattccctttgttctgctgcttttcacaaatgacaggtgagcttggtagccttgtgttagtgttactggcaaggggtcctgatccggaccccaagagaaggttcttggatgttacacaagaaataattcagggcaagtctatagagcaaagtgagagcaagtttattaagaaagtaaaggaataaagagtgactactccataggcagagcagccccaaggcttgctggttgcccatttttatggttatttcttaattttatgctaaacaaggggtgggttattcatgcttcccctctttagaccatctagggtaacttcctgatgttgccatggcatttgtaaactgtcatggtgctggtgggagtgtagctttgaggaaaaccagaggtcactctcgttgccatcttggttttggtgggttttagctggcttctttactgaaaactgtcttatcagcaaggtctttaggacctgtatcttgtgccaacctcctatctcatcctgtgacttagaatgccttaactgtctgggaatgcagcccagcaggttttagctttattttacccagcccctattcaaggtggaatctctctggttcaaacacctctgacattagagcagttatctcactctcactgtgcaacctcaacaacatagtaacttacagtgatttttttttcagacttctgatcatagcctgcagtgagcaattcatttgacatcatgacctagtacctgactgagtatatattagggtatatataactgaaaaaatttcacaaaacaattttcacctttattatatgtgatgtactctgacagtttctattcttgttcattaaaaataaatccactgaattgatttcataacccattagagggttacctcctacagtttgaaaagcacagttctatgcatggcagaagagacagagtggatgaaaagaaaaaaacattttggtttgattagatcaaatttacattcctgtttgtgcaggacggtagaaattatggtcctgtttagaaggaatttccaacttttctgcactggattccattcctcagtatggtacgcatttgtggtctgccaagccttggggagcaatcatttttgttcaaatacaatatcaccaaaaatgaatgggaattgctaaaaagtctttggcagctggaacggtgaaacaataaatcaacaggatgatgaaagcttgaaaacatattactaacaataatcagtagaaccatagcagaaatgagaaagaaacttagttcaattacacagtaaggttacttacttcaaagtcagtagagtgctgtaaggttatacatattaaggttaattgcatctattcagaatgtatttgaatctgaaacaaaagcttaagaggaaagaaaataatcaaagggagatgactgcatttgaagggtctattctatatcagagaatcggctgatgatggttcctttgttctgtaatgtttgtaattccctgtcccccaccccctgcaaatatgaagacttaaaagaaaatccattaaagtcctgtagaaaaactgaagatgtttaccatcattaaaactcaagggctagtattgcccattgtttgttttactatggtactagtgaaagcagaaacctatgctacctaatcttgtaagaaaagctgagcccctgctataagaaatctttatattaaatatttctctattaaaaatcttcagaatatgtttctctgattataaaagtaaagtcatatctgcttgttataaaaactcaaacatttcaaaaataatacagaatgtgaaagtcccctgcaattctgacccttagaaataaacacttcaaagagtttagtgtaaagaaatctctaaagtacagattgcactctttgactctttattccaagtagaaaacctagggccatgatgcctaatatggtttggctgtgtccccacccaaatctcatcttgaattgtagctcccataatcaccatgtattgtgggagggacccatgggaggtaattgaattatgggggctgttttttcctgtgctgttctcgaaagtgagtaagttttatgagacctgatggttttataaagggcagttcctctgcacgtgctctcttgcctgccaccatgtaagatgtgcctttgctcctcctttgccttccaccatgattgtgaggcctccccagccatgtggaactgtgagtccattaaacctctttttctttataaatcacccagtctcaagtatgtctttattagcagcatgagaatggactaatacaatgccctttgatttctattgccaatagaatgtgacagatactctttttctaatctttgttttaaactgtgattgcactccatcatatagacggatcttgtttttcactttggcttattatttagttgcacaaggaaacaacctttgttctcacagtggcatcttggataacatgtcttatctagtattctttctaaaaatgtttaacctaatcgaatcatgaggaaataatcttttccttacatccagattgtgaagcattctataagaaaagttacctgaactcttcaaatatgtcagtcatgaaagaaagaaaaaaaaagtcaaggaaattgtctgagctcataggagtctacaaacacatgtcaaaccatagaaatgtgtaatccataattggatctaggatgaggtaaaggtagggaagaatattaaaatggaaacaatttggaaatttgaatatagactattaggcaatattaatgttaaatttcttggtgtgataatggtattatatttaagtaggagactgtttttatttttaggagatacatgctaaaatatttagggatgatgtgttatgaccctgcagcttattttcatatggttaaaagagaaaaagcaaatgtgggaaaacattaacagttggtaaatataagtaaacagtatatggatattcattttaataatatataactttgcttgttaggcttaaaatttcttttcttttcttttttttttttttttttgagacggagtctccctctgtcgcccaggctggagtccagcggcgcgatatcggctcactgcaagctccgccgccttccgggttcacgccattctcctgcctcagcctcctgagtagctgggactacaggcacccgccaccacgcccggctaattttttttttgtatttttagtagagacggggcttcgccgtgttagccaggatggtctccatctcctgacctcgtgatccacccgcctcagtctcccaaagtgctgggattacaggcataagccactgtgccccaccggcttaaaatttcttaaaacattgggggaaatacaattttaggtgatattctaaagctcattgtgcctattgttatttttttccttttctcttttggaacctggagaatgtaaaagaacttttcttatgaagctgtatgcttaaaatttgtgccgttttctgtagttacgttatacgttaatacataatttaatgaaaaaagcctgggctcagaatcatgctaccatttacaggagaaaaaatatgtactaatttttaagatgtattatttataaatactactttgtttcatgcagtggtccttattattcaaaggaaagaatcaggaaccaggatacagttgttaaaaggaagagccagaaacagggatataaagaaataattagaaaaaacttaatgatatatatttatgaaagaagatgcagcaaagggaatcagtcacagcatgaagaaaggagatgtcctagtgattcagggctaagttgttacatataaaatagatgtcatatatgttatatatagttgttataattacatacaatgcaatagatgtccccttagttatcttaagtaagtatctatggctttctttatttctctcccataaaataagtctgaaggtaggtagtctagggatgatctaatacaaataatggaaaactataatagaatatttgttattttctggcattgttctcagaactgtgaaatgaaaagaaatcctggggtccccaaatcactaagctaaagggaaaagtcaagctgggaactgctcagggcaaacctgccttgcattctattcaaagtcagccctctgctcactgagataaatgcatatctgattgccttctttggaaaggcgaatcagaaactcaaaagaatgcaactgtttgtctcttatttattatgacctggaagccccctccccgctatgcgttgtcccacctttgcttccagttgtcctgcctttctggactaaaccaatgttcatcttacatatgttgtttgatgtctcatgtcttcctaaaatgtctaaaaccaaactgtactctgaccacctagaccacatgtcatcagggcctcttgaagctgtgtcatgggtgcgtcctcaaccttggcaaaataaactttcttttttttttttgagatggagtctcgctctgtggcccaggctggagtgcagtggcgtgatcttggctcactgcaagctccgcctcccgggttcacgccattctcctgcctcagcctcccaagtagctgggactacaggcgcccgccactacacccagctaatttttttttgtatttttagtagtgatggggtttcaccgtgttagccaggatggtctcgatctcctgacctcgtgatctgcctgccacggcctcccaaagtgctgggattacaggcatgagccaccacaccaggcctttaaactttataaattaactgaggcctgcctcagatattcagggttcacagcactttatatcctatgaagtggatagttatcccgatttcacaggtgaaaaaatagaaaaactgaataatctgctcaaagttgtacagataggaaataacagaattagggtttgaagttgggcagtacagcaacggattaccactgatgtggtgttttcatggtcacagagcaccagactgcttctgactttctgctctgccattcctgatcatgtcttccatattcaggttgcctcattgactaagatggttgcttgagcaccagctaccacatcaaccttccaggaagaaggaaagtaacaaaacagctttttctatttgtctaccaccacttaaaggaggctttctagaaatctctctccgtgacttccacttatgtctcaatttctcaaacttaatcacataattttacctaactatacagaaggttggtggctgtagtcttttaattgggcacattctctgtctgaataatacagaagtgctattagcaaggaggaagtgagagtgaatgttgggtagggcctacatctcttttggttaaagaataaaggatgtcacacataagagtggaaattaatcatatgattatgttgtctcagatttttgaaatgtaaataggatatctaaggaagaaaagtttaaatgtagcccacattcctgttcagagtattgaattcagaggactgttagtgttttcttctggataatgttctgctgaaagcattatgctttgtacatcctgtaggattatttataatagtgaataattgaaacagttgcaatagttgagtggttatatgatgcaccaatatcatgaaatactacatagccattgagaattaagcatgttacatatataatcaaattaggaaaaccacttataaatgaaagcaggatgtacagctgtacttaaaatatgtttgcaactgtgtaataatatgtatagagcatagatgaaaagtaaattcacccaaataaaattgtaattgtggtgtttgagaggtgggattatatgtgacttttaaatgtttttaaaatagttttctgaattttcttttacaagtatgtttctttcaaaatcagaaaacatgaatttcatttctaagtgttctatgtacagattttggagtacatcactatgtcttgcatttctggttttttcctttaagttatagataaccttgagtaaggcttgagacagaaacataatccattctaagtctattaataataataatgggaagagaaaatatatagcacatttcataagtaagtggtttttctgccaatatcaatttatttatcattaagccattcttaatatgaatgttaatactaaatattctcttgctggaaaagagagtccccctagggcctcaggtacacttacgttttgttggatgtgccaagaccactctttaacctatttcttagagttatttatttagctgggaaccttgagagataaggtttgttctcccaggacaaagaccaggctcacttactatctgctgtaaaaatggtgtattcccgaaggattttatcagctgcaatgcaaacacaccatgtgtgcagcatccatcctgttgcgcccatcataagactggaggccagagagaatagatgtaaataagctggtgctcatgctgcctactgtgccatcagtaataaagtctttgactctgatccaggaatttcatgtcttctgccagtgtctgtgaaacagtaacaggctaacttattagcttgtaagtggaatccaatcaaatcccagacctgacatctctatgttctgaaaatatgaatttctgacagttatttttactgaggaagtagttacaagacattttgtaagtatacctaccagttggtctccatctcaacgatggtcccatcattggtttttggcctcttaaagatggtgagtctctacaatattgtacttcatatacactctttatatctttagtgtgactccttcttgctaacttttttttgtgtggcttttacttatgtgtgtgtgtgtgtttaagtgaagaaatacatcatctcaggtcgattctatatggttgtgcagattggtgactacacacacttgcccagctaaggtgtgatttgtggctgagatacataccaaaccatgtatcttagtgtgggattacctccacctgaaagaagcagcactttttttctagtttgcatgaatttacaatatctcagtaagccatggggatcctgggtgtgtatgcctctcattttcttaaaggcatcctataaacaaaggccccgatgatttcctgcttatttatctgtctttacccactgtgtctgtattcagccgtctaacagaggcaatgagttgtgctgatgaaagaactaatcaattacacatcagcttcttgggtgtgcagacagtatcttagcctctgtagtttctgaggccaaagacaattcataaatgtttccacactggagatgtggaatacttgatcaggggtggtataatataggcttaggggtcaagggtaattcgctcggcctggtcttgtcattttctattattcttgggaatttgatctatgtatgaacaaacttttggaaacctaaatgcctcaaaagttttgactcaatgttgactgaaaacagtaagtttctgattcttacattgaaggtcatgtaacaaaaaccaatatggaatgtcttatctggaaagataagtatcgaaatgcctttgattatctctaagtctttttttttcaatttatatatacccaaggataagattttcttgaactatgaaaacttcaactttttgcaggactgtagactttacatgtctactattctgcttgaaattatgtttttcacttaattttctctttccgaacttttgctcttaactgcatttctttttctgtcaaaccagtgttgctcctaattacaaatttaaattacatctggtgcagtttgtacacaccaggggatattgttatgtaatacttttagccagccaagatatttttgataacttcaacataacattttttcagagtacttattgataaaaagttataaaaattgtgcaagaatgtacacacaagatgcagttgtgtaactcgagagacctcgcaaggaaaacttttttttttttttttgagacggagtcttgctctgtcgcccaggcgggagtgcagtggcgcaatctcggctcactgcaagctccgcctccctggttcacgccattctcctgcctcagcctcccaagtagctggaactataggcgcccaccaccacgcccggctaattttttttgtatttttagtagagacggggtttcaccgtgttagccaggatggtctcaatctcctgacctcgtgatccgcccgccctggcctcccaaagtgctgggattacaggcgtgagccaccgcgcccggccaggaaaacatttcttttctttttctttttctttttttttgagacagagtttcactgttatcggccaggctggagtgcagtggcatgatcgcagctcactgcaacctctgccccctgggatcaagcgattctcctgcctcagcatcccgagtagctgggattacaggcgtgtgctatcacacccggctaatttttgtatttttagtagagacagggttttaccatgttggccaggctggtcttgaactcctgacctcaagtgatccacccgcctcagccccccaaagtgctgagattacaggcatgagccaccgcgcttggccaaacatttcttgaatatctttttattttatgtttcttatggtgcagaaaaacattttatcttgtctgttctttcatatattctccctcagtatatctcacggatgtgcgctgttggaaagtgaaaataatcttacaaattgagatctttcattaaatttcaatgaggtaattaaggagactcattttcaaatatatatatttatttcagtggcttgaatgttgcttaatcaggaaatgacaagaatgcgaaatgttggttgttgggcttgtctagattagcaactttgagagtcaggctgttggaagagatagcacataggttaaaacagcaaaggcctttgctgtgggtacaaactaattggctgaaaacattaataaattatacttgctcttcatgtcaagagaaagctaagaaagaagggatgaatatttgtatctactaaggcattacactctgacacatgatattaaaaaataaaaagcatatcctttgacttaagctcttcttcttatattaagaaatagaaatagaagctaagttccttaccatttacttggcaatgctttcttgggactattataacatgtttcagatttggcattttcagtcaataaaatattgctgagaaggttgctgagcaattcacataaaatttacataaaacgtttattactgggaccactgcctgggtttatgctaaaatgctttcagtaaaaaccctctaaattcagagctaattctttccctttattttatgtttctctattaggtacctgtaagctacacacattggccatagattgactgaagtcctattcttaagatggaagattctagtatgatgtcggacttaaaaacttaaccagattagatattgtagaatacaatcttttacaaatgagttgatttttctctccaaaccttttgcaaaatttccgtaagagagactcatggacttggaaaattctctgtgaagctgcttttggcaaagtcctggcaaagaaacacttttgctatttcagatcctattctttaagcctcaacttactattcttatttcgtgctattcagttttttactcttctgaggtctctatgaatctccactgttttggatctctgagtacttacatcattcccactttaagacttgtttgggtattcttttttaatttattttttatttatttatttttgtttttttccccatccagaactcatgttgagtggttggatattctcgtggggtgcttttgtggtttcttgacttgttcctaactaaagtgtaagttctgttaaagtgattagtatccctgttctggaatctcccctcactctctacaagcccctaatacaataaatccataataagtgcccagttaagtaggttgcattgtttggaagtctatcaagggactaaagttaaaggatggtcatattttatgctttgcacattgagttgaaaagttagctgcagacagaaaactgatctaagtcaaaagtcttagactggagtctcatcagtgttgctcaattgacctggtgatctttggcctgagattcaacctctgtgtctttaccagtgatttatgaatacctaagttttcttttatcccaaatgttctaagatagcttgattgctctatagtagtggttttccaagtgtggtacctagatcaagaacagcatcatcttggaacttgttaaaaatgtaagttatttgacccagtcgcaggctactgaattagaaactctcaagctcgcggacaagccctcctggtgattatgatgcacgataaaggctgagaactactgatctggagtatagtcaaatttgtggtatagagagaagctctataccacaatgttagcagacattgaagattgtgtagcaatttcatgattggcatttacgtctcgtatctgatgtttcagctttcagtctctgtagcatggctcaccattgcatcatattcaagtttccagggactacccacgggattgtagcttccaagctcctaaaaagtactggcaattcagaagtgaaaaatgtttcttagggtgtacaaagaatgtgcaatggacaagggattaattgccagtggcagtctcctaattttgtattcataacgttgtatgcatgctaggctacacatgcaacgtctgctgatatacattaagtaattgggcatccagcagccccatttgcatgcaaaggctgttgcacacctcacatttacaagtctaaaattaaagcccagtttgaagctggctgaaggctagctgctagaaaaataatgagataaggaaggaaatggcttctgttgatcagtgcttttggcctctacagttcaatctttgctaatttgccctttgaaattgtgtattcaggtagaagagagagacttccaagagtatctgggtggggttttttccctccctcttaaatcctacagttagaagctggttgtgtttatccacagcatttctcttaaaactgtacctacatgtatgctgcagtctgttgctgtgctatattattgcttaatggagtattcatgttcttgtgggatcacgtgcatcatctcaaaaaagagccacccccacacagactcacaggctgggtctgtagcatcattttgttttaattcagcccacatttatcaagcagccaatgtctttgtgccagacactgtgccaggggcttggaatacacatcaatcaagcacactctctgccctcaaaagctcacaatattttaacagcttcctagtgtcacagaggtgaatatttttcttaaaaagtcttccctgatccgcctggttgaaatgactccttgcttctccgagcccctgattatgctcaacctgtgtccctaggagaagaagagaccagtggacataggcctagaaaagtcaaagcctaaaagccagttagttactcagatcatcaagaggaggtggctgcattgcaaatggcctctaggatcagtctgtgggaacagaaaatgtaccaatgtttcctgtaccccggtgtggtcacacagaagagaatgccaatctaaagccatcttaaaggaatttactcacaagcaccacctagaggaacggtggagccctacaaggacagtacaccaactagtcacttgtcactcatcgaatgctttatattttcatatttggccatgtcctttgttttactttgacatcaagattgtgaggtcccagagaacagatcagggtcttaagaagattatctttcatagtgcctatttgatggtaatgatcataaatacagtataatagaaggaaaaatatctggtggcttatatgcattggtagtttctcatggtaataagcatttttttttctcttccttttagcacaagtgcatacaccttgatagcaccaaatataaaccggagaaatgagatacaaagaagtatgtatagtcattcatttaacattcagaatgcttctctctttttacaattggtttgttttggtgtgaagtatttttattttctcatttatatagactcaccaaatctcatcaaggttttttgttttttttagttttgattatacctttaaaaatattctactattaacacttctaagtttgtttctctacgttagtaacagaactcatgacatgatggtagatcctggatttctgttggcttgaacaactttacacttattgccaataaacctccttgagggtagggaccacatcttactcgtttttgtgctctctgtacttaatgcgtacataacatgtttaattgatgtacagtaaatataaatgctgccatttaaagttatagcattatcctttagaggtggaagagaactaaagttcatttagttcacaaagaaattgtaggcttgctcaagtccagctgtggggctatgctgaaattcgatggtctcctttattacatgattggtaggaaatttaacttcatgactaatgatggacagaaaggcacaaaagggaaaaagctctctaaagagtctccaccggacatgtagctccgggtgggacagcgggtcagtgcagaatatgacaatcacagccatgcagggactatgggaactgccagcagttctggtatcttacaagcttttgatttaaatacttaataggagattaagtctcaatgtggtctggatttcgaaatgtttcagaatttgtttttctagtaatggacatttgaaacaggtctcatgaggagataaggggaggcgctggagtgacagaactaatttctctctggcgccccctgctgtcgtgcagagtgaacatttaggaaatgagccctgctccccaggaagccgactctgcacagtggtctggagtgcctgaaaccagagcaagggtctccacctgtagcaccgagccctcattccctagagtcgcagtaagcttgggagcattgaagataaagcgagtatgggcatcagaattctctggggatatgtttacctatgtgtggaaagttcttattgacgtgaaaatattctagttttgcacacattttctataggtaactttaaaaattaacttgatatagagttttaaaaatgccagaatggtaggaaaatctatacttcttttagtaggagcccaggtggtttttcaaattcgaaccctctgtgctgactcttggtgagaatgtgccacagggccgggcccaggatgacctgtacgggtcagggctgaatattgtgtttctaacctggaagccttgttcactcatgctcacatatagttaattgccttctaatagttgtttcttatgctttgaagggactggttttcttttagaagtctaataattgacgatttgatatttctcgcctggcttagttgcggagcaggagctggccaacctggagaagtggaaggagcagaacagagctaaaccggttcacctggtgcccagacggctaggtaagcaagcacagccgctgccggaatgagggagggcggggccacctatggatcctgtaagcagcttgcatatgtctgtctgtgaatgtccattgtagtttgtttggtcattgtgctgcttgggtggaatgcatttaattgtgtgtgtgtgtgtgtgtgtgtgtgtgtgtgtatttttttttttttctgattttctgcaagtagcaaacctgtaatgccagagttctatgggaacacagtgatggcttaattgccaaataatttagagcctcttagatgattgactctgaaaaagcttacctggggcgctgcatatgccctgtcatagcactagtcaggatgggagtaaatgctggcacaagcatattaatcatggcagttaaatgttaatctgaagaaaaggagtggagagtcagttccaagagggagatgagagtgagctggaaacccggtggtgggtataagagaaacatcacctgtgtttttattctacagatagagacctctgggcctctggagcaggtgctgccagtgtgatgaattgtctgggccgcctttgccggtgtttgaatcattcagaagggatgccacctaatgggaatcattcacatcttttctttgctttttctcttctatcagcagccgaaaatttaaagggttggacacacagtgtccacagatttagttaatacaagcatgtcttgtgtcaggggccacttacggttgtgatagttttagagaagttccctccccacaccctgcccccccaccaagaacataggtaaaaataatctaatttggaaattatttaatgggaggaagtaatagtaatattatcatcatcccactgtatttcgtgaaaagggctaatctcaagtgcctcctttgtgcaaatgagccagactcgaagggtacaatcagaaaacagctttaatctttcctagcttggcccctgagattggctatgtgagaacagtctttctcaggctttttggatgatgtaagaaattaaagctttttggtctctttcaaacagtagagtgacctagctaattctaggcctaaaacagtctcatttcagtaattaatgttcagtcttaggtactgatcaaaattctgttactaatggagatgagagcttctcccctgctctaacccaggcctgtttcaggtaggaatccagcaagtagaacagggtgtggctggacttttctctattcatggctctgttcccagattctgacctttctgggattgaagggggaagtggagggagataagagagttcggggttcgtaatgcagtgatccttgtttctttgagcctaggtttacactgactgctcgttcttcttcctgggaatcttcgagtttttcagcatcccccactctctgctacccatctcccacctggatttccctgatacagacgatttcctctcctgtcggcagggcttggcctcactgttggctcttggtagactccttttagggttccattgttcttgacatggccctcataggcaagtccctttagatggctttaggttggcattctctttcatgagaatcacattaaaagtacaggaaatacttgtgcattctttcttttcataaactgtgaatgtgggccatttgtaatgtagctacctcttcttgaggactcatctcagtggccaatggacaacagccttatacctttaggctctaactgttctaggcatgaatccaataagaccctcagactcttaaaaatgcaggttgaggtctccagctgattttcttttttttttttttttttttttaatttatttttttattgataattcttgggtgtttctcacagagggggatttggcagggtcatgggacaatagtggagggaaggtcagcagataaacaagtgaacaaaggtctctggttttcctaggcagaggaccctgcggccttccgcagtgtttgtgtccctgattacttgagattagggattggtgatgactcttaacgagcatgctgccttcaagcatctgtttaacaaagcacatcttgcaccgcccttaatccatttaaccctgagtggacacagcacatgtttcagggagcacagggttgggggtaaggtcacagatcaacaggattcccaaggcagaggaatttttcttagtgcagaacaaaatgaaaagtctcccatgtctacttctttctacacagacacggcaaccatccgatttctcaatcttttccccacctttcccgcctttctattccacaaagccgccattgtcatcctggcccgttctcaatgagctgttgggcacacctcccagacggggtggtggccgggcggaggcgcccctcacctcccggacggggcggctggccgggcggggggctgacccccccacctccctcccggccggggtggctgccgggcggagacgctccttacttcccagatggggtggctgccgggcggagaggctcctcacttctcagacggggcagctgccgggcggaggggctcctcacttctcagacggggcggttgccaggcagagggtctcctcacttctcagacggggcggccgggcagagacgctcctcacctcccagacggggtctcggccgggcagaggcgctcctcacatcccagatggggcggcggggcagaggcgctccccacatttcagacgatgggcggccgggcagagacgctcctcacttcctaaatgtgatggcggctgggaagaggcgctcctcacttcctagatgggatggcggccgggcggagatgctcctcactttccagactgggcagccaggcagaggggctcctcacatcccagacgatgggcggccaggcagagacactcctcacttcccagacggggtggcggccgggcagaggctgcaatctcggcactttgggaggccaaggcaggcggctgggaggcgtaggttgtagcgagccgagatcacgccactgcactccagcctgggcaccattgagcactgagtgaacgagactccgtctgcaatcccggcacctcgggaggccgaggttggcggatcactcgcggttaggggctggagaccggcccggccaacacagcgaaaccccgtctccaccaaaaccagtcaggcgtggcggcgcgtgcctgcaattgcaggcattcggcagactgaggcaggagaatcaggcagggaggttgcagtgagccgagatggcagcagtacagtccagcttcggctccgcatgagagggagaccgtggggagagggagacgagggagagggagagggagagggagagggagagggagaggagggagagggagagggagacgagggagagggagacgagggagagggagagggagagggagagggagagggagagggagagggagagggacagggactccagctgattttcattaaacttctcctgctcatctggtgtgaagatttctccttcctcaaaacacagaagacatagaattcagaatgacatctttcctcagatttctgcctccctttgacctaaccaacctcttttataggctgaagttagttaaggttccccaaggtaggtttcagttacctccttgcagatcctgctttgaggggccattacctccctttggaatttgaagcgctcggcatctgttgtcttgaagccttagcagaaaatgagcaggattctcattttgacttcctgttatatgcattatctagggttagtcaggtatgtgtgtgtgggagggacttgggggtagaaaagaaaattctagaatgtattaaactttgagatgagttttgaacaaaacttgtaaatgcttagacatctggctctctccatttcttctaattttcaactcctcctctatttctctaccccttacaatattggaatggttgcaggagatactaaaagttgctgtaacattagagaaaaatgtcaacattccttactgttttgaaagaaacatcccccatcccccacaatagcagtcaaagggccaacaccaaacaggccttatatatctttcagatctcagaagaaaagtccctatggtatctttctcagttcaattataagatttatagtgaacacaaattgttttaatgcatcttctgtgagagtgaatctttcagagagctgacacttttagtgaccaaagcaccagagaattatttcaaaggaatctttataatacgcacaccaagcttgcataaacactgagaattccctaaatggtaattcttagatgattgtcaagctgccaggatttctggccccaaattcttttaggtttaagagagagcaagtaaataatctaacatccatatttttattttgactatataaggaaagaacaataaatagtatggattgatgatcagttactaactagaatattcccattgtatttttagaaactgggttataaagactacatgcttgtctagtggcaagacctctgagagcctcctgagccttgctgcttgaatataaggcaatagagttagaagaagaaaagcaatagaagcacctttgatcaccatctttactaggttcgggcatggtcatattcaagcaggaggaatattctacagtttccaagacaggcactatttcttctgtttagcacagacctttaggtatgatttcaatccaagtgaaaactttaatacctacatgattgaaaaaccttagtaaaagtgctcttttgttttaaaaatatggtctcctctttctatccagctctttcttctaagtgattccccttctttaaggtcttcttggaaaactggttatgttcttatttgcaagagcatgagaatgttaagggaactcatgttatagatttattatatattaattagtcctcgatggctgacatttcagcttaatatttatgtttcaccttcatggatttttttttcctaaggtggaagccagtcagaaactgaagtcagacagaaacaacaactccagctgatgcaatctaaatacaagcaaaaggtcagaattcatctcttttagttgaattttggtaaggaatatgagtaccagctcttacaagtaactgtgaaataacacagtaactttaccaaaagtataaaaccttccaaccagttgcaaaaggcagctttcagaatcaaagctctcaggaagtgagaagtgaagagatggataccttcaattcctacctaagccctttatcactcagcatgaccctcgattaagggaattatttttttcatttaagttaactatgtttaactatagtttaaagtctactatgtttggaatgttttggttctaagaatatggatttgtttactgcatggcagtcatggaagtagtacaaaaaatatttaagattcccagcgatttttacaatgaacactgagttttgtaatcaggaaaaattattttcccttttccctccccaatacacacacacaccacacacacatacacacagagagagacagagatagacaaagacagagacgttgaaaaagagacagaccaaggaagaaacacaaagacagaaatttcacgggcagaagacgtagcccggccattctctgtgatctaagtagcttgaagtaacaacctataatcatggtgaggtatagcacaaacaatactgtaatttgcctttcatcataattttgtgttccagagttcagactgaaaaatggtaactgtttttgttctctgtaatttcaatacaatttagctaaaaagagaagaatctgtaagaatcaagaaggaagctgaagaagctgaactccaaaaaatgaaggcaattcagagagagaaggtaaggaggaggaggattagttcacatttgctgatcaacaattatagtttcgttgtagaagatttttattatagtaactttaaaaatttatccatctttctctctctctctctttctattccccactcttcttttcctcatccagtttttttccttccattttatccttcaaaggaagattcatgcttaggtcttgtgattctagaggaggcactctctttacggagcatagcctgtatttcaggtagaacaaagacaattgttaagtcatcaccaggaacagggtgaagaggcttgcagacccttaataattattgtattgcaacctcttgtcctaaagatcatttattcgttgtcatttaatacccatcattggctggcgtgtgggtcatttacagctaatttcttcatgggtcaataatgtacgctattcataaatgtttgtggttgaaactgtttcctttcttttttttttgagacggggtctcactctgttgcacaggctggagtgcagtggtgtgatcacagctcactgcagcctcagtctcctggggtcaggcagtcctcccacctcagcctcctgagtagctgggactacaggttaacaccactatagctattttttttttttttttgtattttttgtagagacagggagggtttcaccatgttgccaaggctggtctcgaactcttgggctcaagggatccacctgccttggcctcccaaagtgctgggattacaggaatgagccaccatgcctggcctaaactgtttaaacattgtctaaaagtagtgtttttccctttcctaatatgataactgtaattctgttggcataaatttgccaggatgtgagagatggggagagagagttgatctgtagacccttcccattgaaaatatggcccttgaacaagcaccattggcatcatctgggagtttgttagaagagcagaatcttgagccctacctcagacctaccgaatcagaatctgcattttaacaagctccccaggtaattcctgtgcacataaaagctcgaggagcataaatttaaatgaccttgcaaaagaaggggtgacccatccttgttcttccacagatgtgatttctctggctgattggcctgcactgtcaccatgatcctagccttccctgttgtagataaatctgtagcttttcatgttaaatgtgagcctagttagtagcttgtgtcagataagaaaaatgaacattagccatctagaaatgacatatttcacattgccagtgtggaaatggccgagggaagtgataatggctgtgcttatggagcacttatattttaaaatgcacagcaaacacacacatggacatcagcctgcaaacacgctgccctcctccccaggcaaatggctgctgcccagtaaactctgagccaagtagaatccaagcagcctattgccacccaagagcctctagccttgtctctggtcttcccccactggctgctggtccccttctgcccttcatttccttctctcccaaaagaagtcaggggacactgggtctcattctgattggtcgtcatctctgtgtgcagcatttagtgagggaagaatagactggattccttgccagcatttgtgcatgttctttgatccttaatagacagacaggtgtgaaagtcaaccagctctttagtatccagtcatgtcagtggggcccaggaagagttaatcctatgggtacaaagggaaatttggagacagcactggtatacttgagttgtattcagttcaggaatgtaacttgcattccctagactagagtctgtcacagtatatatacttctagtgatgttctgtagcttccttgtactgccttgtactgtgggaattgtcacattttcaggatttttttgagctacttggcttcatcattgtcagtttgaaaccgactgtggtggaaaatatttacgatgtggaaatcagtaaatgctacagattaatttcccctcctgctcctacctgctagacctgattaaatgttgaccagcacaccactgcttagcactaaatgaaaaaggtattttcttaccctcccctaccacccatattctaaagccaaacctcagagggctagggagagtaaagatttggggaaatagctggcctattgtgtgtatgatatttattgatttaaaaatagattataattcatgtagtgggcagaataatgctccaccccaagatgtccacgttttatccctggaacctaggaacatgtttccttacatgggtaaggggattaaggtcacaggtggaattagggttgctaatcaactgaccttaaaatagagagcgtatcctgcaatatccaggtgcccaatataatcacagaggtccttaaaattgggagagggagatagagaatgaagagatgataccaggagaaagactcagcccaccactgctggctttgaagatgtaggaaggggccattagcccaggaatgtgggtagcctctagaagctggaaaagaccaggaaactgattatttccctttgagcctccagaaggaacacagcctttctggcaccttgattttagcccattgatacccgttttgtacttctgacctccagagctgtaagataataaatttgtattgttttaagctgttaactttgtggtaatttattataccagcaataggaaactaatactactcatgtggttttataatgatgcattaatttcttttccaagaaatctataaagcagagacaacgtctctaagacattagagcattagagtaaaaaagcagtctaccagatgcaagtgttttgccactggttctttcagtataaatagacaggttttcctaactccccacagcaagcatttcacccaaatttagtgctatgggagtaaatcacattttccccccataatcacatgataaataataattttattttcccagactttcataatacccacaaacctaaaatatgaaaatcttctaactccattttaaagactctctcaatttcctgggttcatcttattctgccttcgatctacatatgtttgagataatatacggtattatatagtttccagatacagccatcctttagatatgggagattggttgctgcctccccctccccccacaacacaatggataccaaaatcctatataaaatggagtagtatttgcaatagcatatgtacatcctttgtatgctttaagtcatctctagattatttataatacctaatatgatgtaaatgttgtgtaaatagttgttatactatattgtttagggaataatgacaagaaaatagtcttacatattcagtatagatgcaaccgtctattcctcatcccctgaatattttccatcggaagttggttgagtcagcagatatggaactcacagataaggaggaccaactatacttcatttgattccccaacctcttggtatcataacctcagagaattcaggaaaccagctaaagatctgagtggcttccaacacctttccttgctctttccagtaagccatggctgtgaaagtcatttgaagcactggaagtcacagtgtttcatgcagacactgagaagcacagttagttttaatgctatacggtgaagtaggaactaactggtagaaaataagttatgcatattagatgcagagctgcatacaggtacatgttaagggatcacacttgttgctttcttatttctaggaagcaagtagtagcaagggctaacagtttaagaacaattttaggggtaaactcaacattgaggaagttatttcaatgttgtttatataaattgggaaacatttccatttctgaaaactttcagggaacatcagtgtttccaagaaatgtggctcctacatcatgcatttctttgtggatgacttggtggaagcattaagcctttggttattgaaatgtaataggatctcgctaattaaccccataatgtggtaatgttagtatctctaaaataaacatgtggtactaagagtgtaggctgatagcttttctgtgcttcacttaccttatttgtaaaatgggtataataatgtaatagtgagactggtaggactagaggatgcaatatatacacagcccttagtacaatacctagcacttggtaagcactcagtaaagtaccctaacctaattataaatgtaaagaagtgctttaacactatctcgttggaatctattatatcaacctcttggaaggggggcgtagagagtattattatttttatgcatgaattggatgggttcaattatttcatttctactaaacccacatgaatgaagttgctggagagaaaaacatatgtgacttttgttttttcttttgccacactacatttctgagatttgatctcagctgggtctttcacaatgcccaatgcccagcattttttttctttgcattgtaactgggaaccaaacccaattaccaaaatccttgctggctttatgttcttatgctctcctttcatttgcagcacgtgaccttgtctctcacttcataggaaataaaggttgccagccttaagtatctttatttttctcttttcttactctccctttgctgcacctacccccatcctatctcaggaggaatcagaaagtccttttcctcattggtaccatggattcttccatatgtgttcaccatttcatcttccctccggtctccccagggaccttgcttctctatcagttaagctccctttctcctctcactttcttgttttgttgtttgttttgtttttgtttttctttctcaggatttaatcttactcaaatctctcaccttaaaaacaaattttccatatagtggtctgctttcaactcctctgtcccaagcattatggttcgaacttcttgaaagactcctctaccatatttggttcccaaatgtcagtctgtggacaatcacctgaaccaaagaatctctatttaaaaaaaaaaatgttccccaggagatgtgtggatcagctagcttaagaacttaccttctctgattcctttccttctctgattcctcatttgttggtgggctgaatttggcttttgtttctaatgcttctctggttctaatctacctaagatcaccaacggtgttcttaactgaaaaatccagctgggcggagtgattcatgcctgtaatcccaggacactgggaggccaagaaggaaagattgcttgagcccagggctttgagaccagtctgggcaagatggtgaaaccccagctcttaaaaagaaagaaagaaaagatcccagtaaagattcttaaattcctcacttatttttgctctgtgtaaaattaaatattaaggctgggtatggtggctcatgcctgcaatcccagcactttgggagctaaggcgggccaattgcttgatcccaggagttcaagagcagcctgggaaacatggtgagaccccatctctacaaaaacacatatattagccaggtgtggtggtacgtacctgtaatcccagttactcaggaggctgaggcatgaggatcacttgaacctgggaggcagaggttgcagtgagcccagatggcaccactgcactgcagcctgggtgacagagcaagaccttgtctcaaataaataaatacataaataaaattaaaatttaaaattaactattaagtactctgtccttcaaattccacctcctgaatgtctctgggatcctttccttgtacttgtttttccactattgatgcttaccagatcccatcccgtggtctcctctgatactgctgggcctaggccccctctccttagatgaaaaattccacatttaaggatctagttattgtttgtactgatttctgcagtccatatcttcaggccagaccatatttctaaattccagaaccatatattttgctgcatgcttgatatttctccctaaatattccacaagtatacctcaaatccaataaattcaaaattgaactcatatgttcattctggtgctcttaaatgatagtaatcttagactcttcctccttttcttactcatcccatatccctatcatcatgcttcctattatttctgtcctttaagtttttctgaagactgtcctttcttctttcttccctgtacctgctgacttaacttggggcttgtaatttatggcctagattactgtgagaatcaccccaggggttctcgtgtatttgtggcccttgctgcagtttaacctccatgttgctataagagtgagccacttcctttcctgcttaatataatggcttactgttgggtttcataaagtccaaactcctttacttggcacatacattcctatataattattccttcttactttctcatccttatcttctactcctttctctataaacgttgttcaatttatccatgagcttcttgggtttccttgagctaacatattctcttgtacctttgtatattaaaaacgttaagttctgggaatgcccctttcctgtccagggttactaccagcccatggttgcctttgtgcaaattagagaccaattctccatccaggcggtcaattctgtgggtgctcagactggtgatagatagtgcctttgtgagacacagaaaaagacacctcctctgcgctaaagcagccacaagctgcagtacaaatcttggtgagctgaacactggctctatttttcctttcctactcccctcctgcctgctgggaccccatgggctgaacaacccatataatggagtgtagtaaccctgttcctaccttctcctcctcctgaaacactcttgcttaagattgggttggatatagaatttctctctctcattagagccatggtatttatccttttatttggtcatcagctctttggggaatatgaagaaagctgtgagtccactctccatagaaagaagcaccctcataacatgcagcttacccaaagttagaaaccacattcccagtgttattccgcttcttggctctcgtgctcaggatggagtctaacattaagtaggcattgagttactgtggaacttttgagagcatttcctgacaatccatataagtgctttttctgcattcttactgttatttgcaaactgctgtcccctaatgtgtttagcatactgccatcatttcttttttgtctgtgtccccaacgaggctgtaacattttccagaatgggcacttctctgttcgtagctgtattcccagcatctaacatggtaccgagcatataacaggcatttgatatgaatagggattgaatacaatttttcaactactccagaaatactactactactacttccccccccccccaaatacttcttcatcaactatcaacttctgctgaggcataaacaaacattttttgtttttttttgtttttcttctgagatggagtttcactcttgtcgcccaggctggagtgcaatggcacgatcttgactcattgcaacctctgcctcccgagttcaagcgattctcctacctcagcctcccgagtagcttggactacaggtgcctgccaccaccactggctaatttttaaatttttagtagagatgagatttcaccatgttggccagactggtcttgaactcctgacctcagatgatccgcccgcctcggcctcccaaagatctgggattacaggcgtgagtcaccgcgtcctgccataaacagacttttgttggataaaatttagctactgtatgactgtttgtgagttggaatctattagtgaaaaggttaaaatcagtggtctcaatttctaaccttgctaaagggatccagccttttgtctctagctgtttttggctttctcactgttctctgagtagcattctgaatactggtttaatcaacacttactgctcgcttgctgtctttcacccttttagatccaccacgaccccccagtccccaccctggagggcagggaactcatcacaattgaacacttttgtgctcatcagtcaggattttttcctagactagaatcatgtttatttggttttacaattttccattagtttgcctcctagaattctgtgtttcattaataatccagttgcttgccttataattgattttctttgactgtagtaaatttcctttagtttttttctgaaactgaaatcatcatccattttgcctttcaaaatgggactagtaattagttttgagtgaatgaagactttcatggaaatgaacaatacaagcagtttcttcatttctttgaaagatggaaccagacttatgtttgggcttgaaagtgatgatttccaatattctcctttcactggtcctcttctgggcaaatccaatttttattaaagcaaccccagctccttactgtctctcttggattcatttaaaacttcatgatcctcctggatagtagaatgtgtttcaactctccattaaatttgttgtctaggaattttacttgtttttcataggtcatagcaagttaaaaaatgacagtgtgtcatggtgagcaaaaagcaaacattcctgggttatttaaattggattaaaatatgccagagccatggtgacagtaatatcaaatatgaaggcctttatctccaggctctccaaacagctaattaaaaaaaagaactattttctattcaagtggatggctttttttatgacatgtgctattcagtccctcaacagctttaagtatctgatactaagtcagaagggagttgggttgtcttactgaaaatctcttctcaaatactttagtagaatttgagtgtatgtataaattttgtatgagctgtttaaccatttattataattttaatttaacatacttggtatggaaatttcatgttttcattaaaacattttgaaagcactgcttaaaaaataaatgttgctatcatttgaactaaagaataaaaacgcaaaatgctggttctgtgattataccaatcaagttgggagaggggagctgtggaaagaacttggagctcctggctttcagtgcagtgcccatgggtctgacagggagtaccatcttggagcctctagcaggatactgtattagactatcaaggccagttgaaccttaggattttggaccttgggtaactttaacatcatgactctgcttaaagcatctttaataagttatgttttgatatttgcaatttcagagcaataaactggaggagaaaaaaagacttcaagaaaaccttagaagagaagcatttagagagcatcagcaatagtaagttaatgttttcagaacttcgtgcctttataggcagattgttcatagaggttttaaattcaggtgatgctaacttgtcaaaacacctggtattggattattggctgttgtattaattatgtaattgaactctttcaccatgtaagtaaggtgggagagacatgtctactcaccaaagtatcctttagtagtcaataacactaaatttgagaaattccccattataaataacttggaagacttgatcctttggtgatccaaggtacttctgctcatgttgacgtccaggataccaatataaggaatagggtgtttgcactgaagtgcctaagcagcgtctaaactgaccagggatttatctgatggactgaggaccactatacacttgtgtttttttctagacaagaattgagaaatcatttagtagttattggcaaaagtctcaactggtggtcatacaccaaggtaatttgcagtatgatttgtgaacaacagcagctaacagatacagggcaactactacatgctttataacgtaatctactttgttatgtaggctttaaggataagctcatgtcctttctggccctacattaattctaaatgtggtagaaatagaaccaagcagatctgggttcaaagtcctagctctcactaaaactctttgaatgtcagtgttttttttttttttttcttaaatacagataatatctatcttataggccatttgcaagaattaaataaaatatgtaaatgacataaaagtgcctgactattacaggcacttgaaatgatccttcttacagagatccttattgaataggatcatataacttttattttatggaggctgtacacaaatttctggtcccaccagaaccagtaatgggccctccactttcatatgaaatattcactgcctgccgcctgttctctcactccattgttgttccttgtttgcagaatttaagatcactcagatgttggggtgagcatatttgtgacagcctccaacatattccccctctaagcacagtatcttctgatttctcatgccactaaaattatcctgcctctatcataagcagctccttcttgctttaagattcagaggcaggaatggaagagacgtttctcaaccctctgctttgctccttagcaagttaggtactgtgtttctgctacccaggccagaaaatagatgggagatggtatggggtaggatgaaagtgttggtaagtgatgtcatcctccttagctaaaaggagcatcactctcattttcatcacagaatccttagcctgtctgtcccaactcttcttctaaagaaggcatttgagtgaggagctggtgggaagctaaggagctaagtaccaggagaaactgtctgtcttgcagagagatatggtgggagggaggcaccagatgaagactgtgaatgtatcattgcctctcctttcatgggtagagaatgaatgagaatttattttgaggctcagccggaagagttgagagagattaggggctgggctggtggctttgtgtctggagttggttccttctggtgggctcttggactcgctcacttcaagaatgaagccatggacctttgcggtgagtgttacagctcttaaaggtggcacagacccaaagagtgagcagcagcaagatttattgtggagagcgaaagaacaaagctttcacagcatggaaggggacccaaacaggttgccgctgctggctggggtggccagcttttattgccttatttgtctgcgcccacatcccgttgatcggtccattttatagagtgctgattggtccattttacagagtgctgattggtccattttacaaacctctagctagtcacagagcgctgattggtgcatttttacagagcactgattggtgcattttacaaacctcttgctagccacagagcactgattggtgcgttttacaatcctagctacggagtgctgattggtgcattttacaatcctcttgtaagacagaaaagttctccaagtccccacctggcccagaagtccagctggcttcacctctcaactttagtagcctagagtcacaaatgagaacaaatgtcattgtcttgtggcatactagttttacattggaagagggaagacctacttaacagtgaggggccttgggcacaggactggatagttgaatgggttcattctctggagagttctaaatatggcaaagtaaagggtaagagattcttgaagttttaaaagacattagaagctgtgcgtccaacctcctttcttttatagttccagcttcttgagtttgtgttttactaaatacagaagatcaatcaccctttttctataaagaaaaaagaagtttgccctcagccacctggcctgctatcagtggagctgaattcaattacacacacatttcactcttgctctttcttctgcttattgtaaaagtcccagttaaccaggaaaaacagagtttggctaaaattgagaagtatctcaaattgatttttaaagcctattgagaaacacaagaagaggtatatgtgtgaggttcttctttgaaagagtattatgttttgaattacttttgaaattaaaagaccaataactcatgaaataagcagtgagtatgtagttagaaatataaaagagacttataaaagatggatcgtctatatgacaagtttttgtcatacctccttagaatcagtgtatggtggaaaaaatgtctaggaaagtgctttggattttttttcttttttttggaaatggagtcttgctctgttgctcaggctggagtgcaatggcttggtcttggctcactgtaacctccgcctcctgggttcaagcgattctccagcctcagcctcccaagtagctgggattacaggtgaatgccaccacacccaatgaatttttatatttttagtagagatagggtttcaccatgttggccagggtagtctcaaactcctgacctccagtgatccacccgccttgacctcccaaagctctgggattacaagtgtgagccactgcacccagccacctctttggatttttaacagcacaaaggttttgccagaccaaccagactgcctacccccacctcccaaattagattctcctgaaactgttaaatgaaggaacataaaatagaaacgtacataagaaattctttcaaaccagtcaatactttgctagtttcaccatgctgcaatgtgtgattcatacagcaaaccaggaatggtattttttttctgtagagaggacaaccatggacttgagcggactataaatccaagttgctggagaaaaagctcatgatagcaacctggggcaccaccatgagaatcttaatgtgctctttcttaacaccttgttcttgacttcgttcatttgcttctgattatttttagtgttgtcaattatttagctaacaggcagaaaactaggcttttattgacatccaaagggactctcctgagtgtaataatgaaggcagtttattgaatgcctgtgaggttgctttctaattgtacgcattaatctgcccgtgcaagctggctgaaaatacacaagcagattgcacatgcagatggagcacacaggatggtttttatgaaaagacctctggaatgtacttttgcagtactgtcttttccctaaaaattgaatgactgtgactgtttcaatgagcggctgagagcagaacagattaatggtgcattaagtctgctactctggctagggacagactccaatttcataatttagaattcgttttaggattcttgagcctgaaaacagagggtagaaatcggcagttagccttggtctaactttcaaggttatttttagtctctgtaattatttactacttataaaaattcatgtgtgatacctttgggtggacttttctattagatggaagacgtgaagtaacagttgataagccttttttaaaaaacaatgataggattttatgatttaggttgtttaaaacattgggtaaaataaatctcagcatttaaaattttaattggtaatttgttggtggtgggggcggggtgtagtcatctttccaattgtgtttttttggatgagtgttaagagaggtttgaatttcagctagggtaggaatgtgagtgaagcaggacagattcattttgtgtgcgggtattaggaaaaagtgttcttttaagaattttctcgagatataagaattggctacattttaaacattaacaatttaaaattcatgtctaacagccacttgatgaccaaaaaagaaaagtctctcttttcttttctttttttttttttttttgacatggagtcttgttctgttgcccaggctggagtgcagtggctcaatctcagctcactgcaactgctgcctcctgggttcaggcgatttctcccgcctcagcctccccagtagctggggctataggcatgcaacaccatgcccagctaatgttttgtacttttagtagaggtggggtttcaccatattggccaggctggtcttgaactcctgacctcatgtgatccacctgcctcggcctcccaaagtgctgggattacaggcgtgagccacgtgcctgggccaaagcctctcttttcaacccttaaagataacagattctcacttatctctccttgatctggggaagacctggaaggggtaagagtgtctctacatatgcaaattttccccacaaaagacagctttacagggccatttcaaaatatgccaaagaaatatattttggggtaaaaaatttttatttccttcagggtctgctatctgtcgtgtgatgctgtactggagtcaggttggaatttgttatcttattgccacaaagagtctgttagtgttagggcagtctatgacgtctattttaatgtgctggttagttgtgcctaaactccaaaagggagggggcatttagaatttggaatttagtttttctttctggaatccacttggctacaagggaatccattaagtctgttggggggcttgggattttatctcctgtttacacattaaatgtaacagattatatattcatatggttttaaaatacaaagtgctttgttcttttaatcaaataaagtaataagaagctgctatgagactgggtgctgtggctcacacctgtaatcccagcactttgggaggccaaggtaggtggattacctgaggtcagcagttcaagaccagcttgggcaacatagggagacctcatctctacaaaaaatacaaaaatttgctgggagtggtggtgcatgcctgtagtcccagctccttgggaagctgaggtgggaggatctcttaagcccaggaatttgaggttacagtgagctatggtcatgccgccactgcactctagcctgagcaacagaacgagaccttgtctcaccgaaaaaaacaaaaacaaaaaaaaaaacacaaaaaacaaacaaacagcaaaaaaaaaaaaaaaacaacaagccactctggagttcctgcagagagcttggtgagaagtgaagcatggccacttcccctatggccctcccaggaaagctggggtccaaggacaagcaagcctctgctctgcaggcacctggagcccttgccatggctgtgcactggcagggcccaggccttgatgcagaggagggcccctctctccactccacctctttgaccatcaggcagctgcctctctgagcccagacccagctggctgctgggcctcccggcctaaccctgcctggcctagatgaagccttcaggatgcagccgctttgggtggcgccggtgtgcagggtgggaagcctggcagctgcgggaacaccgtggagagcgctgtggggtgaggcctggaaggtgggtctgcagacggacccaactccgccacctctgttggcctgaaacccagcaggaccggggcctggggtgaccactctgtcccagttgggtgaggcctgcctcgttattgatgacaatggaccaaggccttaacggtccagaaggtgagcagagccctgacggatgaaactgctagaagccaccaggcggggttgatctcccatctatcataccttcatatcagaagagaaacagtaggagataagccacatttgggcaacagaaaggcccactggtctttggaaaaatgtacaggccctgtgtagaagatctgtgtacgtcataggaaaaactgctctcaactgacctccccaaggttttaaaagagcacttgctacatctagcccttctagatgtagataggttttgccaaattatgataaaagagtcataaaatcacacatcttgcaaatgctcacctcttaaaaaaaatcatataaaatgtcttctgggatgactttttgaaatggatttgtgagaccacctctggaagtgacatcagggatgacatgtccacaattgttcagtggataagaggacttggggtggaagacctgagaaggaggagaagaaggctccatgctagactgatcatatttaggagacattttcatattttaaccatcgctttgtgtgtgtattttattcctcactactgtatacatggttggcaatactaagtactttttttttgaaatgtctgggctttcttctagatgttctgaagtgcctgatatgtgttaaaagtacaggtagtaaaataacacattttgtgaatatctttttgttgaaattcatatgaaatgttgtttttagtggggactggccaaaccacctcttgagtaatacaacattgtgtttcaggggaggagggaggagggggaagtggaaagagtctatgcccgtgtgcctgtagtgaggcaagagtaactattgtcccttacatctgtgagtagtgttttacttatctgtgtttatagtgtatataaagcagtggtccccaacctttttggcacagggaactggctttgtggaaggcaatttttccatgaatggggcaagggggatggttttgggatgaaactgttccacctcagatcatcaggcattagttggattctcataaggagcatgtaacccagatccttcacatgtgcagttcacaatagggtttgttctcctatgagattctaataccgctgctgttctgacaggagacggtgctcagatattcctgaccttcaaaatacataggggtggtgagcactgtagaaacacaggctacctgtggagaggactattggagagggtgggacagacagctcagagagaaagacttgggcagttgacttctatttcttcctaccaatatctggattttgctagaataggcaaaagtaaagagaggaaatgtgtctgctttctctgggatcagcatatatgaatgacctcctcttcccagacccaacatggattagtaccgtaattaaacttactgtagggtaggtgggcttttgtgacctctcctggctgcactctattcctacgtacaatttccaacattgtttctaggggacaaggggctcagttctaaaaacctcagttggaaaagctcttggaaccaagcgcattccaaaatagggtcttcctatttctaaattgccttgcaccaccttgagctcagcctgccgattgtaatattggaaagttttcttcatttttgccattgaaaccatgcatcttctttacttgcatttgaataatagtgtgattagttcctatggggcacatcttcatctattttagtctcctagagctgagaatccaggcaagtcagctgaatatgcacacataggcaccaagtttgccttccaatatgctcacaaaacttctaatgcccttcatgggagcttctgaaagacacttaagggctcagttgatcccttacccatatggtaggcttaaatccagccttgaattttataatccaggtaaggtgaatagaaagtcatcctattcataactttctatcttatgctaataaagtgaacttatagatacaaaaatctcatatctattttgttcagaataagactgaacagcttatgaaaaatctggtcagaggaattcctacctattgaatgtaaaattatgttgatggttagaaccatatcacaatctctacccactatcaattctccctgcagatatcctggtgtatgctacctcattttcattcccactgccactgccctgatgtcagtattatcacatgccacttgaatcatggcctgtgtcttttgtgatttcttgtcaccccctggactactgcagtgagtttgttactatctttgcaaccagtctcttcattgtcttacatgttttgtcaagtttagttttctaaaacatagctttagtcatgtcactctactggtcaaacagatttgattatctcctattcctactgcctataaaatgaattccagactccttagccacaccgtggggaaccatgggccatcttagatgtcagaaaggacttatagcatttgggtctgtgtcaggttgatgtggtttggctgtgtccccatccaaatctcatcttgaattgtagctcccataattcccatgtgttgtgggagggacctggccggaggtaattgaatcatgggggtgggtctttcccattgctgttcttgtgatactgaatacatctcatgagatctggtgattttataaagggcggttcccctgcacccactgtttcttgcctgccgccgtgtaagatgtgtctttgctcctccttcacttttcgccacgattgtgaggcctccccagccatgtggaactgtgagtcaattaaacctctttttctttgtaagttacccagtcttgggcatgtctttattagcagtgtgagaacagactaatacgtaggtgatttaggggaagatttaaggaagcagagctttgctctgaattggatcttatcaggaagcaggggtaggtctatgatgaggtgtcttaatcaattctatctagaaggaaggaagaccagagtgagactcatgctgtaattgataaagaagcagaagtcactcatattagccataattttgggatctttggtcactattatagtttctacaaggtccatgtatttttctgtgttcagacatgttatagagtgatcttgtttttgttatgagctattatagtcacagtgacctcttctgatattgacattatgtaacattggttactttcaacaggagaacaccaaggcctagctgtgagtgccaggccagttttttatttttattttttatcatactttaatttctgggatacatgtgaagaacgcgcagctttgttacataggtatacacgtgccacggtggtttgctgcacccatcaattcatcatctacattaggtatttctcctaatgctatccctcccctagccccccaccccattacaggccctggtgtgtgatgttcccctccctgtgtccatgtgttctcgttgttcaactcccacttatgaatgagaacatgcagtgtttggttttctgttcctgtgttagttttctgagaacgatggtttccagcttcatccatgtctctgcaaaggacatgaactcatccttttttatgtctgcatagtattccatggtgtatatgtgccacattttctttatccagcccaacattgatgggcatttgggttggttccaagtctttgctattgtgaacaatgctgcaataaatatacgtgtgcatgtgcctttatagtagaatgatttataatcctttgggtatatacccgataatgggactgctgggtcaaatgatattgctgtttctagatccttgaggaattgccacactgtcttccacaatggttgaaccaatttacactcccaccaacagtgtaaaagtgttcctatttctccacatcctctccagcaactgttttttcctgactttttaatgatcgccattctaactggcatgagatggtatctcattgtgattttgatttgcatttctctaatgaccagtgatagtgagctttttttcatatgtttgttggctgcataaatgtcttcttttgagaagtgtctgttcatatgctttgcccactttttgatgaggttgtttttttctggtaaatttgtttaaattctttgtagattctggttattagccctttgtcaggtggatagattgcaacatttttctcccattctgtaggttggccaggccagtttttgtctttctctgtatgcaattaataattggtaaaaaaataaaagttgactagttccttttttacaaaatagtttcacttggttttcttatcactggaacctagtaccatccatgttctccttttgggagggcaggggatctgggggttagactgcctgagtttaaattataacatttttcctcattaataggacattatttaacctcttggggcctcgtttcctcacatatagcctggggtagggggtaacaataactgctaactcagaagaagattaactgatacaatccacataagagatccaggatagtgtttggaaagagacgctgaatacagtgtaactccaacaaggacagcagaggaagaagtgaaggaaagtgagcagccaactccagcctttacccccaacaatagagcctgagaactcttcttgatgcataagattcactaagaaggccctggggcccagaaagtgcttctggtaaacatgctatacctgggggaatatgtggtccccattctggagacaagccatctgcatagccaacttcatcacttctatgtgagctctaagagccgtattttaaaaattacatgaaaatgaatgctagtcaaacaagtagtaaatccaagaaagaggaaggcatagataccagaacaattgtgaacaaagaagacagtgacatttttggtcaaatatgtgcttgtttttctgtttaaataagaatcagggctgggcgcggtggctcacgcctgtaatcccagcactttgggaggccgaggtgggtggatcatgaggtcaggagatcgagaccatcctggctaacaaggtgaaaccccgtctctactaaaaatacaaaaaattagccgggcgcggtggcgggcgcctgtagtcccagctactcgggaggctgaggcaggagaatggcgtgaacccgggaagcggagcttgcagtgagccgagattgcgccactgcagtctgcagtccggcctgggcgacagagcaagactccgtctcaaaaaaaaaaaaaaaaaaaaaaaaaaaaaaaaaaaaaaaaagaatcaacaggatctaattaaaatcatggaggattttagcactagaagaggcacaaggaagagacagggatatgaactacaataagtttttttcctttgttgtatgagtgaatgttggatattgatatcaattccagagattgatagaaaaataaatgtgcttattatatgtttaattatatgctaattatatgtacaaattaggataaataacacaaaaacatataagtataatacaacaaataaaaatttgatcgtcaatttctgcctttacaataaaaggcagaaaagaagggggaatttttcaataaaaagtaacaagcaaaatattaagtccaataagtcagcattcacaaaaaatgtatacaggctaaattatcttattagaataaaagctcttggattgcctagaaaaatacaaatctagctatatttgattacaaagaatatctataaatcgagttgaaaacaaagttatacacgtaaatgttaacaaaagcagcaatattagtatgagacaaattgaattcaaggtgaaaaacattcaacacaataaaagatatttatgcagataaaatatataatccaaaggaaaatgcaagtcacaaatctttatcaaaataggtttgaaatacatatgacaaaaactatttgtctctaatatagactatggatttgccaaattttccttttatttaactaattctccatagaaattaacagaccaagtgaaccaaaaaactctgtaaagaaaggaggatttgaataacaatgctaagcataattgtatagacataaaatgtacccaatatatgaaaacacatattctttataaatactgactttaagaagactgactaaaatctactacaaaattggccatgttcaaggcctcaaagactcttggtaacctccaaaaaaaaaacaccccaaatcctagaaagccacagtccttgagaaaaatggagtaaaattagaaattaagcaatatgaaattatagtctgtttacttaaaaaattttttttctgtttttttttttttccagtgtcttgctctgtcacccaggctagagtacagtggcatgaccatggtttgctgtagccttgacctcctgggcttgagcaatcatcccacctcagcctcccacgtagggggactacacgtgtgcaccactaggcccagctaattttttaattaaaaaatttaaactatctttaaaaatgactattggggaaaaattaaaaccaaaactgaaattactttgagataaaagactaaaaactttaaagctggttggaataacaaactgttattggcattgtaatcaatctatgaattgaattattgaatgctatagagaatctaaagtagacccatgtttatataaaaattcagtatttaggacttcaactatgaatgaaagtatttctttcaaaccaatgtcaaaagaatagacaatttgacaatttgtattgaatcaacacaataaaaatgtagtgaaggatgattttatactttgagggtagaaactcctttttaagcaatatacaaatctcagaagccataaagagagaccatagctttaagtacgtaaaaattttaaaatctatgatagaagatataatgaagaatgttttaagtaaataataatctaggaaaaaatatttgcctcaaacataatggataaaggcttaatttcacaaagaatgtttataggataataagaaaataacaactcaaaaattggcaaattacttgaacaagcagttaaaagaggaaataggaatcaaaatattcagtttcactaatgattagataaacacaaatatagattttattatttcagtggcaaaaatatcaatggattgataatacttcacattaggaaaggagctttcatttattcaacaatgagcatgattcaggtgtggtagcacgtgcctgtagtcctggctacttgggaggctgaggcaggtggatcacttgagccaggagttagaggctgcagtgagttatgatcacaccactgcactccaggctgggtgacacaggggagaccctgtctcttaaaaaccccaaacagaaaaatcctctagactgataagcaccgataaatgtgtgtcaagcactatactaggttctaggcatctattatgaataaagcaaatatggctccatgagcaaatgtggaaaatagacaagctgacaaagaactgtgtaggataactgtgtaggattcgaacaattcctatgaaggaacatagtgttagaggtagggtaagagaacataatggtactaggaaggcaacacctccttagcatgataggtaggacccgactttccaagaaaatgacatttgaactgaagataaaaggatgagaaggaaccagccatactgagaaccagaaagaaagttctaggctgaggcaatggcatatagggtactcagcaacctgaaaggaagctggtatgttcgggctgaagtgaaaaaaagagatgacgaagttgacaagacaggcaggagctaggcaggtcaagtggaccacacaggccatggcacagagtctgcatgtttttcaagccacagggataacctgtagaaaatttttatttttcaaaaagaaatgactactctagttgctgtgttgtgaatagatttgagaaggcaagagaataaatggagaaactactaaagatgttactgcagtagtccagataagagttggtggtggctcagcttaagtgatgtcagtgcagagaaaagtacaggcgtgccttgttttattgcactttgctttattgcacctcacagatatttcattttttaaaattttataaattatcagtttgtggcaatcctgtgttgagcaagcctattggtgccattttcccactttgtgtcatagtgtcacattttggtaatctgtacaatatttcagacttttcgttataattacatctgatttggtgatccatgatcagtgatctttgttgttactattgtaattgttttggggacccacaaaccctgcccacaaatgacagtgaatttaatcaataaatgttgtgtgtgttctaactgttcccctgactggctattcccctgtctatctctctctcctctttggattttcctattacctgagacacaacaatactgaaattaggccaattaataaccctacaatggcccataagcattcaagtaaaaggaaatatcacatgtctctcattttaaatcaaaagctaaaaatgactaagctctgtgcggaggcatgttgaaaaccaagataggacaaaagctagacctcttgcattagttagccaagttgtgaagcaaaagaaaagttctcaaaggaaattaaaaatgctactccagtgaacatgtgaatgatacgaaggcaaaatagctgtattgctaatatgaagaaagttcaagtggtctggatagaagatcagaccagccaaaacattcccttaagccaaagcctaagctagagcaaggccctaacactgtttaattctatgaaagctgagagagatgaggaagctgtagaagaaaagttagaaactagcagaggttggttcatgaggtttaagggaagaagccagctccataatataaacatgcaatgtgaagtagaaagtgctgatgtagaaactgcaagatatccagaagatctagttaagatcattgatgaaggtgtgtatactaaacaacagattttttttttttttttttgagacagagtcttgctctgtctcccaggctggagtgcagtggcgcaatctcagctcactgcaacctcctcctcccaggttcgagtgattctcctgcctcagcctcctgagtagctgggattacaggcacccaccaccatgcctggccaatttcttgtatttttagtagagatggtgtttcaccatgttggccaggcttgtcttgaactcctgacctcaggtgatccgcccacctcagcctcccaaagtgctgagattacaggggtgagccgctgcacccagcctaacaacagatttttaatgtagatgaaacggccttctattggaagaaaatgccatctaggactttcatagctagacaggagaagtcaatacctacttctaaggacaggctaacttttgttaggggctaatgcagatggtgactttaagttgaagccaatgttcatttgccattctgaaaatcctagggcccttaaaaaaatatgctaaattgtgtgtatgctctatgaatggaacaacaaagcctagatgacagcacctctgtttacatcatggtttactgaatattttaagcccactaataagacctgcttagaagaaaagattcctttcaaaatattgctgctcattgacaatgcacctaatcacccatgaaaacaacactaatctccttgtatatttcccaggcatctcaaagttagcatatttcaacttaaacttttgatatttttcttcccaaaccttggttctaatacctattaggatatttggcagtatttctaaaccaaatatcaaaaccaagaaccaaggtttgggaagaaaaatatcaaaagttcaaggtcaaacatgctaactttgagatgcctggaagatatacaaggaaattaatgttttcatgcttgctaacgcagtctccattctgcagcctatggatcaaggaataaatctgatgttcacatcttattatttaagaaatagatttttaaaggctatagatggtgattcttctgattgatctgggcaaactaaattaaaaaccttctagaagggatttaccattctagatgccatcaagaacacttgtgattcatgggaggaggtcaaaatatcaacattaacaggaatatggaagaggatgatcccagccctcatggatgacattgatggactcaagacttcagtggaggaagtcttgcagatgtggaaatagcaagagaactagaattagaagtggagcctgaagatgtgactgaattgttgcaatcttatgatcaaacttcaacggatgaggagttgctttttatggatgagcaaagaaagggatttcttaagatgggaactactcctgctgaagttgctgtgaacattgattaaatgacttgaaatttagaatattgtataaacctagctgataaagtggtggcagggtttaagagattgacttccattctgaatgaagttctactatgggtaaaaggctgtcaaacggcattgcatgctacacacaaatctttcatgaaagaaagagtcaattgatgtggcaaacttcactgtcttattttaagaaattgccacagcaactctggcctttagcaactaccaccctgattagtcagcaggttatcaacaagagcctccagcagcaaaaagattacaactcaccaaaggctcagatgttagcattttttttagcaacaacgtgtatttttaaattaaagtgtacatttttcaagacataatgctattgcacacctaagagactacaatctagtgtaaacccaacttttatatgaatggaaaacaaaaaaatttatgtgactcactttattgcaatatttcatttgctttttttgcagtggtctggaaccaaactcacaatatctctgacgtatgactataactacatattgtatgtaagttcaataggacatattgatattggggatgaagaaggaggaagaatcaaggatgactcccaagtttctgacttgaagtactggaggtgtagtgatgccatgtactgagatgggggctactaggtgaaaaccaaggtttgggaagaaaaatatcaagagtttaagttaagtttaagtttacatatttagaaaaatatcaagagtttaagtttgagatggtttggatatatcaaatgggcagttgtacacacgaatttggtctcactgagcagatatgtgggaaatataaatttaggaattatattagcatgtaaatataaagccataaaagtggacaaagtcacttaagatgaaattgcaggtttgagaagagggcccaggaccaaatacagaggagctctatcatgtagagttcgggtagatacgaaaggacatccgagaagtcgggcaaattaagagtgtggtatcatggaaaacaggacagacatatttccgaaaggagaaattagtcaattccttactagtgttgaaagttcaaatgagagaaggaccagtgacagtggctgtgatcttgacataaatgatttgggtatgatgatggggctggagcttgattgaattggacttacgagtaaatggagatatgggaatagatttggcatttatcagtaactcttgaataatttgaaaatgagaacaatgaaatgaggcagtaactggatgaggctgcggaatcaaaagttttcttaaattgatcatgtttgtatgctgatagaaatgatccaggagaggaggggaagactagacacaaggggatgacagaagaaataaacttgagaaagaatatatgaataagttcctgagtatacataaccaatgcttaatgattagtcaatgattaaaaggagagtacttctccttttataattgaggaagcagtctttacatttttgttaaaggaagataggtacagatataggaagacttaaaagatttcgtgttgagaagatgaaagacttatttctctattctcaatgaagtatgaggagattgtcagctgagaactgagaacaaacaaaaggtacaggagaagaattcatgagtgggccgggcatggtggctcacacctctaatcccagcactttgggaggctgaggcaggtggatcactgaggtcaggagtctgagaccaacctgggcaacatggtgaaaccctgtctctactaaaaatacaaaaaattagccagatatgatggcaggtgcctgtaatcccagctactcaggaggctaaggcaagagaatcacttgaacctgggagatggagtttgcagtgagccgagatcacgccgttacactccagcctgggcaacaagagcaaaactctgcctcaaaaaaataaaaaataaaaaaaagaatttatgagtgaaatggagtagaagaattcggtaggatgaagctagagttaatggacttcatttgaagccagtctactttaccactccctcctccttcatacctcccatccccaaacaccagatgtattatttttcccaagtttgatttacttgttctggtgcagactcagagaaagcagatggttgacttgatctaggtttgagatttttacagacatatatgatggaagcagggagaagaggaagaaaggcatttgtaagggaaagatttaaaaaatggactatgggctctaagctgcgcaagaattaaaatagatgggagctgatggttagaaagaggtggggaatcagtggtttagaaatcccagagagactggaatgttgttatattgatagtacttgaaagaagaacatggaatgacagaaagctgtattcaggaatggaatttgtcagataatttggagagaggacatttattcatgacaacaatgtccagggtatggccctggcagtgtggctgaggtggagtgaagaagagctactggagaccaagaaatcaagaaacacagcctgtgggggggcagcacataggatatccatgttgacagtagtcaagatagggaggaaggctgaaggttttttcttaaataataaatgcatactatatttaaaaggcagtgacacttcttccattcttgtttcttctttctctcattatttggaatggcaggtagaaagatctctcaaagtttgctccagagcccatgggagtgaatgttctggtagatttggagctttcctgatgggggccaggccatgagggggcaatgctggcatggggcccagtcacctctgtaccactcattagtagtctggttgatggcaaccaggtacagagcaaagcacaggtagctacccaggagaaagctcaggaccattacaacgtccccccaaccacaaccccagcatgaagacaattgttagaaaggtcaggaacaggtactaaataagaaaaatcaagtctataaactggaagtgtccaaggtcatcagtgtaagtctagtacaaatccaacaataccaccaaatcgaccagaaacgcagtgctcacaatggccatggcagcagccaaagccgtcaacatcaagaggtagatgagaaagtattaataactggcgttccaagcccagatgcagttgttcacccaaacctaacgatggtcaaaacggtgcacacactgcagtcagtgctttgatcgagctggtgttcgtaactcataagtagagcacctcacctctttagaaacatcactgaattcataaacttgaagaaataattcatttgcttttcttataatgccagaatcagttacacaagttagggtggaaataaacgggtttacaatcagaagcagacagggcagaagaaggtaatacaggagaactagcttttgacggtagcccagtatttcccaggtatattcagtatttaccattccttgcaagaccaggtgaaggataatgaaggtatggtttcatgtatggaagaggtagtgaagcaatctttacatggctttctgaagacattctggaattatacaggaaaatatctgtgcccctgccctgaccaggcatttcaaatcatgagttttctagcaaaaacaggtcataacataaccaactagcaccaaagccagtagagcaggaagagaaccaggaagtccatgcaggggggtattcctcttgtttggacaattttcagccagcagctctggtgttcctcctcccagcattcacagagaattcaaagagcagctccgcttgggcagcagtgtgtgcctgacatgacgagtggcacccaaagctgcaggacatggttccttcaggaggctgggtctggcaccagctttgaccaactgccaattacatgatacccacacctcctgggtgcaccaaaggctgaaatcttaaacaaatgagagatggttgaccagaaggttgaaggatgacaatggcaaagaggatggtgtattctgtgttgtgggtactacagaagcaaacatgttttgcaaatgatgggggaagtaatggtctggaagtagattgggagcaaacaggatgtctgcttcattttcaggcaccaaggaatatgtatatggaagtaaaatagttccatttcggggggttgtgggaagtactgttctcaagaggtggtcaggtttcagacaatgtgggaaaatgaggcagactcttttttttttttttttttttactttttatgttgaaataatttccaacttagagagaagatacaaaaatagtagaaaaatagtttccaataaaatcttcatctagctaacattaatatcttatacaaccatagtacaatgatcaaaatcagaaaattaacattggtacaatactattaatataaactacagaccttattcatattccatcagtttccctccagtgctccttttctatttcaggatccaattcaggatcacataaaacatccagtcattatgattccttaatttcctccaatatgtgacagtacctcattttttcccttctctttcatgaccttaacacattcagtgggtaatggatagttactttgtagacttcccccagtttgggtttgtttgatgttttctcatgaatagcttgaagttataatttccaacaagaaaattacagaagtgatgccatgtccttctcagtgcatcgcatcagagggtacatgatgatcagtatccttatcactggtgatatttacttggatcatttggtaaggtggtctccactgttaagttattgtttttctctttataattgatgaatgttttgggggagatattttaagactatactaatatcctgttatctgcaaacttttgcccagtgattttagcctatgtaaattaatcttgccaacatttttttttttttttacctggatgtttgcctaatggtgattttgtatttgagggagactttctgatatgaggttaagaatcctgagttgttaactcttggataaagatcgagagacttttgcccccttggaaaggtttggaaggctagagggaggtgtgggggcttaagtggtagatatatggggcagtgtgggattgagagactgagtcatattgagtgataggtgagactggaacactcggtggtgaccgagataaataggaatgtgtaagacaggatagaattagtacttacaggaggttagccatggttctgaattgccactttcataaagttaacttttggtgaaaatataaatttgtgtagatcagcttggcactattaagcatggtttaatcgtgaatagactgagcacagtggctcgtgcctgtaatcccaatgctttgggaggctgaggtgggaggatcacttgaggccagaagtttgagatcagcccgggcaacacagcaagaccccacctctaaaaaaatattagctgagcattgtggtgtgctcctgtagtcccaactacttgggaggttgatgtaggaggatcacttgaacccaggaggtcaaggctgctgtccagcctgggcaacaatgtgagaccctgtctcaagaaacaaaaacaaaaaattgcatatctatttatgggaacctatattagaataaaattctacttctaggtgtatatcttagaaaaaatatttatgtatttgcacaagatgtatataccaggatgctcactggaaaaaactataaatatccatccataagaatgttaaatgtattatatccatatcataaaatgctattcagctgccaaaaggaataagatatatatttataaatatggaaaaatctcaaagatgtggttagatgacaaaaatctattttcagaacaaaatatagtatcccacttaaagaaaaaagtctgttagtttagggtaggaaaagctgtagttaaaaaacataaacaccaaaatttcagtgacttaaagaacaagaagtttatatctttcttgtggaatgatccagggctgatgtttgagtcaggttagctttcgccccctggcattaaaagctgcaggcaaggccgggcgcggtggctcacgcctgtaatcccagcactttgggaagccgaggcgggtggatcatgaggtcaggagatcgagaccatcctggctaacaaggtgaaaccccgtctctactaaaaatacaaaaaattagccgggcgcggtggcgggcgcctgtagtcccagctactcgggaggctgaggcaggagaatggcgtgaacccgggaagcggagcttgcagtgagccgagattgcgccactgcagtccgcagtccggcctgggcgacagagcgagactccgtctcaaaaaaaaaaaaaaaaaaaaaaaaagctgtaggcaaaaggtagctctactctcctttgcaaatgccttgcaggctcacttaagataccatcatcagatagaaggaggaaagagtattaagaatgctgtgagaggttattgatgtggatcacttcagcctggcccatacatttactcacatttcattggccagaatgcagatgtatgctcctatgtcacatctaattgcgtgggagctgggaaacgtagtctagctatatatgcaggaagcagagaaacacattttagagaacagctggccttctctgccttatcctaattatcctcccccaaagtaaaccactattcatttgtatgtaattttaaatagatatttatcaattaatagaaaatcaggatacatacctgacaattcatgatgttgtcctttggggaaaggagtcaggttgagagaggtattaagtaggaccttcactttttttctttatatttttatctaatttctattctattttctgactcgtatttatgtattgcttttgcaattaaaaattaaatcattaaagaccagataaatgaagggaaagaattctgtaaagtgtatgcaatagtttgattactttgattaagcacaaagttctcccagcattactactcactttcatgttttgttttgtaaatcttgttcttgtgatttcttaaatgggttttgtgtatcccaatagattatctctcactctcttacttacataggctctgtgagtgcttataggtgtgtgaatgtcatttgctcatacccagttatgtgaaactgacttaagcaaaataatacttctttagattgtcctataacccatattgctaaacacatggcagagactcaggaaatatttgttgcctgcatgaatgcatgcatgcatgtacgaatgattacttacctaaacctcatggtggcaaagttcaggtttgtgaagctattgcaaaatacatgtagaatgcattattagattgtacttatacagacagttcctaagacacgctgaggttttatttccaaatgtgttgtataacatgaattattcataagtcagagtcatgtagacttaagataattatgcatattgaatatccatctgtactactgtagtagttcttaacatcaccaggggtgcttttaagaaacgcagattcccagatcccactccagacatgctcaattagagtcagaggcctgagtccagtaatttctaggaagcaccacagatgattctcatatagccagccccacactggtcttcccactggcattctggaaactattgttctatgaaatctggaatggtatctgccaagtctttccctagtaaacaccaccatagtctgtgtggggttttttatcccctttttatttaagaaacatttcaaacacacagaaaatatgcatcaaccactaagctcatattgttaagatattacttatatttggttaattaaaaaagataaatattacagagacagctagctgtccctccaccctcatcccttccttctctgtctttctctagcagtaaccactgtcctggtatgtaatatttgtcaatgtgcgttaaccaaaaactaccaggaatatacctgtagttgaacaagttgggtttattactcattgcagcaaaggaaaatgcataccatagggaatggtgagttatctcagggagaaagtgttagaaagaccctactacaggatttgtgctttggttgggtaattttggggagggtctacggaggcagggagttgctctggattgagtgccatcagaatgtggggacagttttatgattgggtatctcaataaatcttacctataggaaggacctagagtgactacgaagctgtaattagtgaagaagtagtggtcattcacttagaggagatgatgtttggtactttgtagattgcatgatgaccttgtgtgaagtagatattctgtgtgactatttacatccaacagtggaacaaggcttaacttcagtgtcagatcaaatcagtttataataacactgagatttagacgtgagcatcagatcagttcctggatgccaggagctgctcttctcacttggcaagtgtttctaattttactacatataagtgaattcacaaaaagcatagactgctttttaaaataccattgtgtcataatttgaaaggcagcctcctccactcaggtatttaggaaccaaaactgatagagactccaccaccttcaatgcacaacttccagcatttccttgagggctgtctctgttccagccaggagaacaatgtatggaggcacatgcatgggaattttctaataagttagtactggatgtggcattcaacacttctcacattccattggtcaagactcaatcatatagccaaccttagctgcaagggaggctaggaaatgtagccaagttgtgtggccagaagaggagaatgtaaattttcatgaccatttagcagtctgctacaactgtattctgttgaggcgagattttcctgaagggacctttcaggatatgccatagaaatcaacctaagaatgagcaggaaggacccttaaagatcctaagttggacataagtaaattttattttgttctatggagaatagaggaagaaatctttcatgcttggatcagagtgacaaagtggaagaggaccacccctctccaacaggcagtagagtcacggtagtgataataccaagaacccccaagggcaaggtgaaaacagtgctagagtccagggttcttagtccagttggacttcccacgaggatgttttccttcgtttgcccctcaaacaggttctacatcttatttttgttaaatataaccagagttacctacagggatcccacttcagttcagccaatatatggaaattttatataccagggactaatgctaatagtagaaaaatatgagttagtgtcgtaacatgggacttcctttgtatagttgatcacttggcagtaatccgcatactctgcaggcccctacctgtattcctctggcagtcctgtgaccctgtcactctgctttatatcctgcggcatgagtggggcagtgataattggcacaaggaccacagatagaggctggctctgcaggcagctttgtgcttggcgttggcaggtaagaagcggcagtcagtaaactgaagggctgcctgtcaacttggtctgaagtttcttccttgcttgtcacagtgtttctttttcactgctttctcctatggcctgcacttggcttaggatattcagagatctcatccaaacttctggcatcactcttctttttatacttttgactgatgacttcataaagccccagacaatggggcagcttccacactctgtgacttcattagtctccttgtctattctgggcaagataagtaatctaagacaaatggaaaggctgctcgtctcaactgctgaatgtttctcagggttctgtatgttgcttcacttttatttcttccttccccagatcaagcttctgacctttttcaaatgccatgttctacctaagtaatatttgaagtgatgctggcacctgtttagtttctaattccttgttttgctcctacactggatgccatttgttctaccagatactttgtgtttcctttgatgcccatgtcctaagtacttgatgaatcagatcttagcattgggcttaaaatattagggggaagcagagggctagcaggaggagggagggagatgggaacaggctgcgcaagtctggtgcaaagtaagtcagtgctcaatgaggtatgtggctgtgaatgtgcaatgaagagataaaaatcacacaaattacatgagaaaaggacaaaggcgtagaaattaatcaagggtaggcagaatgggccaggcactgaggtaaggactaggaaacaattccagtgttctatgcttggcataagtgagaggggaaattggggtggtggtttggatttttaaggtaaaaacagagaacttcttatttaaactgaggacatttctaggtcaatttttcagagctaaaaagagatattagaaatgcagtctagaatcagcagcactttttaacctctatagataaaccctatggagggtttatcctctctctgaaacaaaatgcaaaggactgtgtgtgtgtgtgtgtgtgtgtgtgtgtgtgtgtgtgtctgttaacagagggttcacttttgctttcagagtccaaaagggctccatgatccataaatggaaaagagctactggattagagggtctctgtgtcctaacagtggtcaaagccatgaggcagatgagagggtaaagggcttaatgtaaaactggtgtgaagcaggatgttgtagggcgtgaatgttccacagctccaccctgaagtctgagtgttaagcattaaatgttcagataggaaattagggctgcatgctgtggaatgtgctctgggagaggacttgtatttatgtcagtaatataaagtggaaaaaatgaggtcataagctcacatttcataaagctagttttataattttgtaatattgttcttgaagaatgcaatcttgcaatagcattttgttttgatttctgctacaccttgttctcaacgtaactttctgttctgctgaagataattttaatcatcacccaaataagtctaggttagtatccaaaggaaaaataaagaattatgttcatatttttgtgaaggcactaacacctgtttgtgtttctggtagcaaaaccgctgagttcttgagcaaactgaacacagaatcgccagacagaagtgcctgtcaaagtgctgtttgtggcccacaatcctcaacatgggtaagtgaattactttgcagggtgctgcctggcacattttatagaggtatttagtgactgaagatgagggatatagagtgacttgtacatcatagaatgctggaactaaagacagatgacctgatccgaaactttgacctcaactgttgcctgagctataaaataatgcttgtattattttatgggcacctggactaaaacagcctcagagaagtttttcctctcacccaaccattcattcacccacccatccacccatccattcttccatccttccatccttcctaccttccttccttccttccttccatccatgcatccatccatccttccttccattctttaaattcataggtctatataaggcctactaagtgcctacagtttctgcccaatgaaccttagtaaaggagaacactaatggttttaaagcaaactgctgagcacagagcatatcacaataagaaagcactactgccttatcaggaagaagcatctaagtcagaccatgtgcgttagatgcttcttgggaaatgacaccagagcagaagcttaaactatgaatcagtaaagtgatgagtctttccaggtatcagaattaataaagacacatagagcaagaattaaggtataaatgcaagaaataagcatggcttgtgttgcggaagaagagttatgtagctgcagtgcagaaaagtgagctagaaggatatagaaatgagcaggaacggtgaggaccctttcccaatggtgttacctctggaaattcaggtgggacagttcattgtgtgagttgtcttgattactgcaggatgcttagtatccctaggccctgggcatgaagggccagtagcgccacccagacactgagacatctagaaatgcccccacacagtgcttaccaatgagacatgtagaaatgccccgcatactgcgtgctcatggtgctcctggtagaaaaccaccacagaaatttgcatgccaccttggaaaacctaaaccccattctgtgagcactgagggtattggaaatgtttaaacagggaaaactcaaggttagatttgtgttttcattctggatcacattggcaacattgtgaaggagggctctaaaggaatagagaagcagagaggccccccaaggcttctgtatcagtctgggtaaagaatgatgaagacttcagctaggacagcgggggagaggatggagaagagagtgcaggtcagaaaactgcttagaaggtgaaagcggcagggcttgtttattgacttgctaactggggacaagaaagtaagtgtaattaaggatgactctggataagggttgtagctgaaagaaaagatgaatttaagtttcttaaagtctcaggtttctcagagtttgggtagctaaatgagttgttaaagaaccctcatcttcatctccccttacccctttctcaatagagaccatgtttttaaatgtcaggaagatattatgacactccttaggaagaggtcattatactcctacttagaaatctttagttgtttcctaatttttttctttctgcttctaatgtgatgttctaaagtctaaattcatcagtgtgggccctacaacttatattaaaggaaattcatcatctctcttccctcactgctgggctctgggggaaagagttgagaagctgtaggcagtggagttaaatcatgtgtagatgacagccctaaacacctgtctggatatccttgtggctgtcagggagggagagggagaacaggagttggatagctttaccagctggagtttcgcctaccaggctggtcttcctttccgttcgagggctccctgtatcctgcaatgtggaacacctggcagaactgcgtgtgctgctctattgattttggctcatttcttcaatttaacaagatcgtcctgaattttaatattgtcatccaaagcattagcaatgtttcccagagctgcattttctgtggattgattagtgcatttgtcataggatcctcagagctattaatagaaaatatggagggagattggacccaggacggttccttataaactccacgcaatagctgctccgattttgaccccaaactattaatacggtttcagtgttcaatatatttaattgactttttacccatattatactcttctcattctgtctcatccatatgcatagaattcttctgagaatgctttgcagaatcatttctaatggtgtaggaaaatcaaatatgtacattgcacttctgtgaagaacatttctttgtaaaaagaggacacctgcagtttactttagctatggtcaacttatagaatgtgaacactatgtgattgccatctatatgggatgtgatgagctggaagaatttatatataatttttaatactttaattttactacctaatgtaactttcctgaaaagatttttcctcttgtacttttctcctttaaaagtggatctgccattggcagatggggatttaataaatactagaaaattatgtcaatgtaaaagattacaagaaaaatcctttagtggttacaagaaaattccttttggcttaggacttcagacaagagatatttacagggttcacttttacatgtggattaatatagttctctgtattgtgtgtgtaggcagaagtaccagcatcatcagaccttcctcagcgaccatcgctgcatatttctagtcaaatatgaaatggtttctagtctctggtttgctgcccccattttttatttatttatttatttttagacagggtctcactctgtcacccaggctggagtgcagcagcatgatcttggctcactgcaacctccacctcccaggttcaagccatcctgccacctcagcctcctaagtggctgggaccacaggcacgcacccccacgcccagctaacttttgtagtttttgtagagacagggttttgccacattgcgcagggtgatctcaaactcctgggctgaaatgatccacccaccttggcctcccaaagtgctgggattacaggtgtgagccaccgcacccggccttatgcccctacttcctcaacgaagaataacgatgtgaaaaaatcttatcctggtgtttcacttccccaaatcattcagtggtcccccatatcttcaaggataaaatcaaaatgtcttagcttaggcacaaagtcctttcctctctctgtccctccgtctctcctttaattctagattctgtctctttctttagaatggcccctttctagtcctctggggtctggaggactggcctcgagtctaaatctttgcttctgcaaaggggtgaggggaagcaaagcttttgcaagcaaggtaaggggaagcaaagcttttgaaatcaggagcaaagatttagatgcagatcaatctcaggccccactgcagacctcctgaatcagagcttgtatttaatacagtccatggaagatgtgtgtgcacgttaatgtctgaggggccaagctctatagctcatgcctctccagctctcctctctcacactactgtgagcactcagtgcaggttgattattgtaatttttatctacgtgtcacatgctcattcattaagaagtcaaataaagtacttaacatgtgtccctttgcgccgcttgaatcccacttccaccgcaacatttgaacacttccctttgctgctgtaacaaattaccacgaatgtagtgacctaatagaacaaaaatttattctcttaacacttctggaggtcagcaataaaaatgggttttaaaatgctaaaatgagggtatcaacaggaatggttccttttgaagcttccggggggcatctgtcccctgtccccgcaaacccttggcacacggctgcatggctccagtttagcttccatctcacccaaccttctgcaccctccctgacctttctgccttcctcttataatgacccttttgattacaatgggcccacctggactatccaggctaatctctccacttccagatccttaatttctgcaaagtcccttttgtcacataaagaaacattcacagattccagggattgggacgtctttggggggccattatgcaacccaccacctgtttcttttcttagttagctccgaatatctgttaatatgtgttggtatctcttgactaatcaattttagaccttattaactcatttcttcctctcattcttataattattcagtaatttgagctttccctattatgactatatacacgttttctcactgccaagccagtcggtatactctggttatatcttctgtacaactctttaaacattttattttagcgttttcttagtttcctttgaacatttgactgtcttctgacagcttttgtgactgttctacaaaatgcctcttgacgcaaatttctaaacaattttccaacttatgcctgtcagataacttgtggatttttttttttctctccctcctggatccctctttcctcctgctttaacctgtcctgggtgtttgtaagcctggcgcacagctgttgttctgggactttcctttaacacagtagttctcagcctcctctgcacactggattcacctagggagctttaaaaatcacagatacctgggttgcacctccagagagcctgctgtattgtgacctgggcttcagggtttaaaaaagctccccgggccattctaatgtgcagccaaggttgagaatccctgttttaaagtcatcttgggaattgcttttattgccttcccatgttgggttctctgatttctgggcctcatttcttctattttcttgctttatttctttgttttggtggagcatattacttagtggcttcccaagagaagacacatggaaggtaaacatgttcaggtccttccatgtctgaaactatctttattcagctctcatactttgcttgcatttttattgatgactattccaaactggaaataattttcctccagaattttgaggcattgctcttctaactttgaatactggttcctgagaaatccaaggccatttgaatttcaggctttatatgaaggattttctctgtttcccctgaaaatattttaatatcatcttttctttttctggcattctgtaatgatgtgatttagtgtgaaagtctttttttaattcattttcggtctggaaattcatctctagttctagatgattttcttgtgttatctctgacttatatcctttcattttctctttatggaatttctattattcaaattgtagacctcccggatttatcttctaactttagagattttctcctgtaagttatctgtgactaccttttttctatattttggcatattttcttgactttatcttctaaatattttactgatttggtttttttggggggaagaaggggagatttaaaaaaatgtctccaaactcctccttttttctttgttactttaaaaatatatatatcacttcttacttctcagaagaaacagtacaggaagcagaaaaaaacttcaaagagagggactcagaggctcactggtcagtatgcaggactttatagagtcatttcattctcagcctggcatttgtccactgctgctgtctttacacatatgcctggtttagtttatccagaaaatacacttttcatttcctgttggtgtttggtgaattagcacctgcattttcaaagcaggagcaggtatatgggggtgaagggcttctactgagactatctagtaattccttcctttttacctgcctattatccatctgtcttcctcaatagctggtgcatccatttcttgggccctcatgttgctctgtggagagaactggctccccataggtgtcctctagccccttccagcaagtcttcaggtttgctcttttcctctgtaagtcacttactgtttctttatctacttggtcttcatagatttccctctgtgaatatggatctcttggttttggaagatagagcttgtgtgtatttcattttctgctttgtttagggtaattttggggagaatggaacaggaacatctttactccaccatcttgaaaggagaacttaatgcttgtcatgggttgagacccacacttctcaaaatttatgtggaagccctgacccctagcacctcagaatgtgaccttattcagagatagcatctttacagaggaaataagttaaaatgaggctcctagagtgggttcaaattcattatgaaaagtgtctttataaaaaggggaaatcgggacacagaagcatgcatacaagggagatgatgtgaagagatgcatgatgaagatggagtctgcaggccaaaaagagaagcctggaaaagatatttctcacatagccctcagaaggaaccaaccctgaagacaccttgattttggacttctagcctccagaactataagatagtaaatttctgttctttaagccaccagtatcacaatactttgttatggaagccctagcaaactcatgcactgctattttccatttgctcatgtgatgctcttctcccggtatagtctgattcctactcactctttgaaatataacttagccttacttgatttggaaagtctcctcaatctagtttaattaaatatccttctttttggcttcctctatcatatcacctatcatgctgtactgtaaccattagtcttctcgtttgactttcacactaagctgtaaatgcttgaggcctgggatcgtgtcctgacacagtgcttgcacagaggagccttaaacactgttaatagaatgagtacattataagcatagcttttggggaggataaataaaggtgtattttggttgaatgataaaatatagcattggtattgtattaaatgaatatttcaatgttagacaaattatgtgaatacagtgacttagaaatttctggtgtttagagctaagaaaaatagtgatcaatttattcccttctattatttttgaacagaaacttcctatcctgcctagggatcacagctgggtaagcaaacattaggattgcaagtaactgaacttttcataagtttggatgccatgtgacttcccagtttctgtggacctttataaggcaccttatttaataataaggtatttaataaccacttttttctgagtcaaaaactaagacatgtattctaataaaagaacaacaaaatgacaagtttaaagggaggctattcaaatagaatttagatactctcattcaagttgtaattttgctttaactaaatattttattctaccttttaatatcttgagtagaagctgtcttctttcctttcttcttctctcctttccttccttcctgtcctctcttctcaccctccttccctccctcccttcttcccttcctcactaggtcttatatggaatatttgtgataaaggctagccttctctaatataaaaagaaggggttgtcagagataaaaagaaaggcttgtcagagaatcacttttccccttctatgtcttagcacagtccccttgagtttaggatgcaaataagagaaagtcatatgatgtatgtttacctgcccaatgcagcagggtttggataaaccagggatttctgaacacaggaagctccagttttctaactggcactgccatagatgataccattttgaaagcttctctctttttctgggaagtggttcttattatttgatgggatatgggtttttatagtgacagaaatgccagaatgaactaagaagtgcttgagaaaagttacataaaagttcacgtaggctggaaaaagggggaaccagcctacctgaactttatggattattagtcctgagaactaggtctgaaatatgtaacctgctgccatgaagctgctgatagttttttatgagatccatgtaatttcctaagcattagctctttgccttacagaagctggggctgcaaatcaatgtgaaggagagaaagcatatgacaaataaacagaacacttgaaatgccataaatgtcagaacacatggtcactatgccagggtgtggaactctggtgtggtgggtcagagacaccgaagggcattctccctcatgtgctggcttgccaaaggctttgttgtcatgtgttcctgaataggctttgttttccttttcagaggtagaaataaaacttcatccagattagggatgcaagtgcttagaaaatatgcatccttgaaattatatggtatcaaccactagttgacaagctgcttaatcagatatcattaatgagcagtagacatgcccgttcttctaaagacagtgccactattgcttgtctttaatattgactgatcagctagtcggaatattcttgaaaatgtcctaaactttccactagaaggaataaactatgttgattatctctgaggggatatttttaaagcttaattaaacatttagatcatcctttcaaatgtgcaggatgattgtgcttacactagttttctttttatatgttccaagggacgttttcagacatatgcataaatcacttaataaccaagtgtgtatggagagcttactatatgctcagtacggaggttgagttattagcaccgggcctatagtaggcagcttggtgtactgtgacaaccctttatcctatcaagttgtttttttttttttttttctctttgtacctttacaggccagaagctgggcttacagagattctctaaaggcagaagaaaacagaaaattgcaaaagatgaaggatgaacaacatcaaaaggtacttacaagcccctactagttattgctaactgtttatttgaggtactagataattttgaagaatttctgaacagaaatatttagacacatgaaaatcctgaaaacaagaatacaagcattgaaaataaaaggtgagtttctggatgtgttttaagagtatggtggtggctccttctggtcaaaactttcatggtacctagcctcatggatgcacagtggatctgctgtagttggtgccagtaggtcaccaagaagatgatagagcactggtgaacttctcatctgcaaaacaaaacaccaccaccatcactgctatttttaaaccgaagatatatgaaattagagatggtatccagagaatgtgataatgcataagaaagtaggcatgcaaagttatgaaactggcataaatgttcactaaaaatagttatacacatacagtaaaaccaagttacactacatgggtataaaaatatgtgaggcattccatatgttttgagcaatggaaatcagtgaagtgaatgcagagccttctaagaaaagtgcttaaagaataatcttcattacaatgtgaaatttctggtatggtaactgaaaatagtcagtggcatacttgatgttcatacctgcttttaataggccagaagctgctcagcatgaaatgagaatgatgagaaagacccatggttagctccaaagtgccactttatttcagatcctttaaacgagaagaaaagggagtggggtggggctccagctaactaaatgatttatctttcccatcattattattttccaacttttcctcttgtcatactagtggttgacaaatcctgtcactatttcttatagaacatttctcaaatctgtatattcagttctataattaactagaattctaactcccattttgatttccttgatttggtttaatttatgttttctttgtctttccccaacaaggtaatttattacaacaattgtgtgtaaaaattccattgaaaaatgaactatttgtattcattagtgttgctataatttgacccttttgagtgctatcttcttcccaacagtgtggaacccctttctcattcatagtttcgcccagcatatggtataaatgtgtccctaggctgttttgggcaccataggttgtcattaaatcattgaaagaaatcatgcgagttgtaaatttacttatttagctcctgtgtaagaaagacgaatcatgaaacatttttatcccttagtgttttttttttttttaaataaatatctttttgtcttggcaagatcctaatcttgaaatctacaatcaaataggcaatgttatggtaagattctagtagttaacaagtagaagctaaatctggtacatagtcatgttgtacttttaatgatgtctgctaaatgacgtaaaagtgttcatttgcttctatgagcttttaacttaacataaaattgtgaggtacttagcatactaaggtgaatgttgcaaagtcagttgtagatatgatttatttttaaataacttctagtggattttaaatagtgtttttaaaagtttgacatatatatttggaacataaaaactgttaaaagtagaacatttgacaaacagaatgcttaacaaattaggatactagatctgggatttaattttcaggttgagcagttattttaaacagtgaaaattaaactttttatttcttaatcttgtttttattctagacttagataaatattgatatacacatattttctggttactgattgaacatatttttattatatatccttttacataaattatttcgtttaacttactgtagctttcagtaaaattaatagctttaatatacaaataattccatccttagggatttcagtaacagtagactacacaaggatacttatccatctattctaccttacttttgcttctctctttttttgcctgacgtgttgttgttgggaaacgttcattgaaggcatttctctttttttgagaccaggtctcactctgtcacccatattggagtgcagtggcatgatcttggctcactgcaacctccgcctcccaggctcaagtgattctcctgcctcagcccccaagtagctgggattacaggtgcatgccactatcacccagctaatttttgtatttttagtagagatggggtttcaccatgttggccaggctggtctcgaactcctgacctcaaatgatccacctgccttggcctcccaaagtgctgggattacaggcatgagccaccgcacctggccaaaggcatttctttatttgtagaacctttcattccttatcacttgaatgatttaccttaagaaaacaggaggatcatgtttactgtaaaaagatacaaaacacaacacattttaatcattgcatccatttatgtgtttgtttattccattcattccgcaaatatttattggatacctactatggaataattcttaggtaaataatctaggttaagtttaggtgacagcacataagttttgttctatgtgtctctctgactttcacatttttaattactcttggctctggggacaaaaggagcctcctcaagtttaaactctaaatattttacctgtgattcacttccttcttctagaaacttatttgtaattcctcttttttctatatcttcaatacattcttctccattggatgcttcctttttttgtcagaaatatgccacagttggtgacagtaggtcatgaagaagatgatagagcacacgtgaacttctcatctcatcttaccattctaaaataaaccagctaaccccttccttgattttgctatcctcagagatattaccttttctgcttctagcaaatttaaaaaaagacaaaggtaattttactgtaaccacttctttattacccacctcatccttaattccttatgatctggtttatattcacaaatgctgtcactgaaattgcttcctaaatgtaaaatcccttctgaacatacagtttggtggtctttttgtaattcctatcttctccctgaactctgtaacactaacaccactttaaagctttccttctctggcttttatttttttttttaactgtattattctggttgatctgtctcagagtaatctctcccagcactcattcattcattctattggcaaacatgtattgagttcctattatatactgagccttgtgcaagttgatgaagctataattaagatcaggatagacaaggttccagctctccagaagtttacattttaagggaggagtaaacaattaaaaggagacttagaaatacaacattatacttttaaattttatagtgattcatcaccttgtagtaatctgtagtaactaattgtattagtcagttatctcattactataaataactatctgagactgggtaatttataaagaaaagaggtttaattggctcacagttctacaggctatacagaaaacatggctggggaggcctcaggaaacttagaatcgtggtagaagccaaaggggaagcaagcacatcttcacatggccaacaggagagagagcaaagggggatgtgctatatacttttaaacaaccatatttcctgagaactcactgtcatgagaacagcagggaggcaatccgcctccacaatctaatcaccttgcatcatgtcccttccccaagattggggattacaattcaacatgaggtttggctggggacacagagccaaaccataatactaatgctgcaaggaaataaattaggcgttgtgataatttcagagtgatgtgtcaaatatttttgattgcctgcttctctacagctctgatttttcttcaagtatccatcctactttgcatgaactgtgtttcagaaaaggcaggtgctaccccagctccagggatttattcccaaagtggtctaactcttcatgagaattccattctccttgactgtgattggtttctctgtggacatgtgatacagttttgaccaatgagactaagggaagcctacattttaggatagattttatcaatatgaagtatactactttttgtatttaatgattttttagcttgatttcttttttgactatcttgtctgattctagtaattcctctaccagttttttttggttagtatttacatgacatttctttaatcatttaattttaacatctctgtgtcattgtttaaagtagattttgagtggaaagaaatgtctggttttccttttacctagtttcagaatctcttaatgggtagatttgatgtgttctcatttattatgattagtagcatatttgcatgtatttgtattcttactgcatgatttactttttattagttttctttttttttactgacactgaattctctgttttatttatttactgttttttttcttctctccactcccccttcctgtactataagaaatttcacagtgtttctatttttgtttctaatcttgcatagcctttggttgtctcttttaatctgaaaatacatgtctctcttcacttttccttttttcttcctaattttcttttatgtctctttacccttattgtctttgctctccatttctgggacatctatcaaatggactttggacatttcagatctgttctgtatataacttcattgttttcttgtacttcttatccctttggccttttttttttaattggattctggatgaaagctttagctagatcatcctgctcactaaattttttcttgacttttcattctgcttatttggcacatattgaatatgtttatttaccaagattgctgatttggtaagtagcagtgttctgctttgtaagtgcaatattctttctcatctcatcttatttaatgtttgtatatttgtaactatacaaacataagttttctatttaccatattaactgtttttttctttccattttaatctttatctcccatggaattctttctcaaatgtttgattattcttatatgtatttggatatgctgctgaatgaggtatgtaggagcttgtcttctgtgtggagtagactcgtgttctcttatagtcagtaggtacttgggacgttgccctgtttccctgagcccagccatgcctctctcattcacttcttaccttatgggccatgatagtgctgcctactatgtagtgcaagtgtgggagggaaaagaacccaccaccaagctgctcttagtgcagttttctaactgatcatctaaatgactgtcccagtattccctcctggagctccttcagaagcaggtggacttagctccaatttatcctgcacattggttttccctggtaatgtaacctgtctcctttctctctttcagaaacttcttaaaatatgtgataagctgattgcatttattgattgtgcatggttattggttttatagtcatttagaaagtcattgattttacagtcaaaatatatacaagaatcagtaaaatactgaaagtcagaaaataaactattgggtgacagagaaaattattattatagaacacatacaaaattatagtgagagacttttatagggaagtcatgtaaagctgtactcaaaattacaacattttaatccattcaatactaaaaaaagaaatgaattaagcatctgatctacgaatttagaacaaaaacaataaatgatcctgaagaaagtaattaagataagaacagaaattaataataaaactctaagaaacagctgttataaaaatctaacagcttgttctttgataaggtcaacaaatgcacacatctttggtaagtctaatcaagaagagattagtaaaaatgcaaatacacggcattagaaatgagggactagaaccatagatttggaaaagtttaaaattatgttactataaacaatgctatgctaatgaattaaaaatttggattaagtgaatgattttctaggaaaatatataactctaatgactcacataattaaaactcataaagaccaatgaaaatgcaagtgatttctgaagttttctgagaattacttcccccaggaggctgaacttggataattttagaagcaagttccttcaaattttcaaggaacagattttttttccctatgctttacaaattatttcagagtaagaaaaaagatgaaacattttagaagtttatttcactatccccatgatgtcacaatctgataaaggaagcatgtgcacactcacacacgtgtgcgcgcgtgcgcgcgcacacacacacacacacacactctctctctctccctccctctctctctcacagatagaccaatcttataaagacagagattaacatctgaaggaaaattctagctgatgaaatttttctcttaatagcaatttaccaaaggaaagtagagtttattccaggaatgcaaagataagtagctatatattaaaactttttatatcttatcactgcaataggataggtcatgtgacaagaatatttggctctttagttacacaaaaagacattgataaattttaatctttactatcaattaaaaaacacttcagtgaactaaaaataatattttcttaacatacttgtagtcttctaaaccaataaccaacattatattcagtggtgaaatactaaaactatgaacaacataaggatgtttgcaacccctaccaaacttggttgttacccagtattattctgggaattccaacctcatgctactcaaagttatttgatagaaaacttatttttttaactaaaaaaaaattccctgtttttactgaatggaacaaggtttggatattttttaaccaacttgataaaactaaaaataaaagagcttttctaattattggaagtaggttgttatttatgcatgggagcaatttgcctgtgcaaactaagagaatcaactgaaaaataatgagaacaaatggagtttaataagagagttggaccaggcgcggtggctcacttctgtaatcccagaactttgggaggccgaggcaggaggatcacctgaggtcaggagttcgagaccagcctggccaacatggtgaaaccccatctctactaaaacttagccaggtgtggtggcaggtgcctgtaattctagttactcgggaggctgaggcatgcaaatcacttgaacccaggagccggaggttgcagtaagccaagactgcaccattgcaccctaccctgggcaacaagagcgaaactctgttccaaaaaaaaaaaaaaaaaaaaagatttggttaaaaaatatatacaagaatcaacaactttctcaaatacaagcaaaacttaattagaaaatacgttatgggacaaaaagatctaatcaaaaagcagctatataaataattgttcaacaactaaaaaaaattaaaaactttcctggaatccacaaaatccaattttaattgacagaaaacattatttgtgtttataatgttcaatatgatattttgaagtatataaacattgtgaaatggctaagtctagctaattaacaaatgcattacctcacagttactatttttgtggtgagagcacttaacattctttgcattttcaagaatataataaatgatcattatttattgtcattaattacaactgtcattaaccttgctgtacaatagatctcttgaatttattccctatatctaactgtaattacatatcctttgaccaatatctccctgtacttcaccatttcctcctaacccccccagcctctggtaaccatgattctactctatttctatgagatcagctttttaaagtccatatataaatgatatcatgtggtatttgtctttctgtgcctggcttatttcatttaacataatgtcctctgggttcatccatgttgttgcaaatgacaagatttccttctttttatggtggaataatattccattgtgtgtatatcccacattttctttatccattgatggacacttaggttgattccatatcttggctattgtgaacagtactgcaataaacatgggggtgcagatatctctttgacatacttgttttatttcctttggatagacacccagtagtgggattgctggatcatatggtacttctatttttaattttttgagagaacttacacctcttttcataatggctgtactaatttacaccccccacaagcagcgtgtaagggttcccttttctccatattcttgccatcgcttgttatcttttgtcctttttgatgatagccttgtaatgggggtgagataatagctcatcgtggttttagtttgcattttcctgatggttagtcatgttgagcattttttcatatacctgttggccatttgcatgttttctttcaagaaatagctacacaggccttttgcctattttttaaattgttattatttttgagatggagtttcgctcttgttgcccaggctggagtgcaatggcatgatcttggcacactgcaaactctgcctcttgttttcaagagattctcctgcctcagcctcctgagtagctgggattacaggcgcccaccaccacacccagctattttttttttttttttgtatttttagtcgagacagggtttcaccatgttgatcaggctgatcttgaactcctgacctcaggtgatccacctgcctaggcctcccaaagtgctgggattataggcatgagccactgcgcctggccctttttgctaattttaaaaattaggttatttgttctcttgctattgagttgtttgagtaccttatgtgttttggatactgaccccctattagatgtatagtttacagatattttctcccattctgtagattgtctctttagtctgctgattgtttcctttgatgtggagaagctttttagtttgatgtaatctcatttgtctgtttttgcttttgttgcttgtccttttaaagtcttatccaaaaaatccttgcccagaccaatgtcatggagcttttccactacattttcttttcctttttttttttttttttttcataacagagtctctctgtcacccaggctggagtgcagtggcaccatctcggctcactgcggcctctgcctttgggattcaaacaattctcatgactcagcctcccaagtatctgggattacaggtgtgtgccaccgtgcctggctaatttttgtattttcagtagagacggggctttgccatattggccaggctggtctcaaactcctagcctgcagtgatctgcctgcctcggcctcccaaagggtggggattacaggcatgaaccactgtgcccagcttcccccatattctcttctagtactttcctagtttcaggttttacatttaaagtctttaatccattttgagttgattattttttaacgccttttgtgaaaactgtcaaattgagttgttttttgtatgtgatgagagaaaagggtttaatttcatccttctgcatgtggatattcagttttcccactactgtttattgaggagactgtcctttcccctatgttcttggcccttttgccaaaaatcagttggctctgcatgtgtggatgtatttttggactctctattctgttccattggtttgtatgccagtaccacgctgttttggttattatacataaaagtcaattcgaataaagcagagatggctaatgttcccgaatgctaaaactcaatatttcagtaactatagttctatccaagtttacttgtaagtttaatgaaattctagtaataaatttcaatggaatttgaggtaatttgaaaatactgtttctaaatttcaactgagagaaaaataatgaaatttaaactttagaaaaatatgaataataatttgtgtatttgttggggtaaggagaacttccactagtagacgtcaatatataccacaaacactgaagtactattactggtgagaggataaactgagaggcactttggcaacatcaaattctgaagagtttcctaaaagtaaaaatattagatctaaaggtatacatttattctgaggaaataatgagagatacagacaagatatttgtacaaggttgtttatttttaacataagattaatgggaaatttgaaacagtttgttcagtgatacaggatttgaaggttttggagtttggaataaataccatgcagcaattactaccacattttaataacataatagaaatatgctcacatatatgaaaatgaaaacaaagatcataaaatagagtgcagataagttttgaaacctacgtctaccttgcattttgtgtaggaaatatttttaggtgggagacatagagctgtgattccatgattgttgtagctggaagtttatttctctctctgttaaaatgatagaactagcaacagcaaatacaaagttacaattagataagaggaatatgttttgatgttctgttatacagtggagtgactgtggttgacagtaagatgatagtgtaccttacaaaatagctagataagaggctttggaatattctcactacaaataaatgataaatgcatgagatcatggacacactaagtgccctgatttgatcattttacaacatacatatgtatcaaaatatcaaattgtatcctataaatatgtacaaactgtcaattaaaaaattaaaaattaaaaacaatagtaaggggagagtgtacattacttgtgttatttttaaactctacttcacccattagtatttatttcctttgatttggttggtgctctgaaaattttgggtggtagcttctgccttttctccccattcttgatagccaaggccatctttctccttcaaggcaaaggtattactgtggatgccggagaaccaggacttctttaaactctcctccttcccccgaaagcttttctgtattaaaccttcaaaggaaggcattcttgaacttcatgacttcatggtctcaactctcctgcttccactatccctttcctcttgttgtgttgagagaacaggctctcctgggagaagtttgttttgccaggcgatggcattttcatgtttacataaagcagtcaagctgaaccatgtcggaacatgctctgttgggattcagacatggttttaaaatgaccccatgttcatcttcaattaccacactgaaactttgctttggagcatgttttccctctaaccttgtcacatttcttaagcatccagctttacacacacctgtctgttgtatagttgacccttctgtagaacagggcaccatcagacaattggagcccagagaaatgatgtttgcaacctcttgctggaaatggcaacccctcttcttattattgacctgggctcgaagcagagctattggtgccatcctgcagctccccagcagagcagccctcctgggtgagcactgcatcgggtggccacaggcagtggcgctatttgcagtgttgtcctcatttaccacataccacttggccaatgtttgtaggaagttccatactttcaatctctaggatggtattttgtttatcatatcaccaacctaccctcgtttgtatgcagctctgtatgaatgtagagatttgcatagcacagtgataagatgtgcacaaacacaaagtgttgaacacccttctcctgtttgcattccttccttgtattcccatgtcatgtagcttaattttgtgtttagcaactcatttctttttgccctgtgtcagagttgtttctgggtgtgtctgcctcattatactgtgatttatttcagggtggagctgtgctgatatctgtacctttagcatgaacctaggtatctggaaaatggttggcgtgtgacaatatgcattgagtaggccaggccttaacaatgcctcagatgttgcatgtcattgtcctcctgcttagagcactttgatgcttttcatgtcccgagcttggtccttgaaacaagaacaacttattttttatttgcttaactctagatattgaacttctctgtgggatctcagtaaatgaaccaagaatatgcttataaggcatgcagacacatcctcggtggctgtcagttcagcagaacaaattaattagctgaaattatccttcttagtacggaagaaaaaccagcctctccttagtaaatatgctttgctagttataggataataatcctgagtgcagcgatgccagcaccttcccttcggccatctggagcaatgttcttgcatggtgatgcctcatcagctcccgtccgcgtttccctcctggtctttatctcttctcccctttccttgcctccgtaataggatgatgtatgttgctctcttcccgtcttttcttcctccctaacagttcttagcttcatgtgtggtgtttcgctcttttatatctctctgtgttaaaaattacatatttattgggatttttaaataaaggaaagcataagaaaacagaaatggcctctcacactgataataaattcctactgatggtatgaggaaataatatatacacatggttcagaagttaaaaaacaaaaactatgtaagatagtaaagcatccttttcttgcccattcacacttcaagcgccgctacccagtgttaattacagttaacattttcttgtgtagtttttcattaaatgttttggatacacatcagcatataaaagtcaaaatgaatgtatgtatatattttctatttatatagaagcgtcctaagaaaacggctctgaacctatcttttatcacttaatgtatcttagagatctctccataggcccctgctctaccttacaaaacatccatcttagtctttgtaactgttccattgtattccattgcgctgatggtctcacttatggtacaagtgttttgttggtgggcattaacatgtttccctgaacttttacagtttcaataatataactgtgaatattcatatacatacatctttgaacacttctgcaagagatgtatacgtcttacgttttgatgcttattgctaaattgacttccaaaaactaaattaggtttcactaatttagatgctataccagagtgttttctgtcaaacttttctgattttcgtcaatacaatagaaacactttatctcatcgttttaatatttctttgattttgagtgaagataatgaccattttgaactgacaggcaacctgtagtttatctgtgaactgcctgttcctatcccttggccctttttctttttggttgttttttccttattggtttatgtgaagtccttacccactttctgggacatttcctgagtctcagcctaaaatagtcactgaaccactgaatctcacatcagtgtgttttaatcctctgcctgggattattgttggatatttttctcacttgtttatgggtttcctttctctagaatataaactctaaaggagcaaagatctcatctatcttgttcactactatagcctatcatgtagatgcaagcctggctcataatagacactcagatatttaatgaatgaataaatgaaaattgaattagcctatgcatatcctaaacattcattaacagttaattttttaattttatggtattttttccaaatgaaaagtttgaattttcatgcagctaaatttattaatctttttctttttctaacttctggaacttcctcactccaagtttataaataaattcacctgtgccacctttgaaaacttctattcccatcttctaggctcaaatcttagacttctataaaatttatttaatcgaaattaagggtctagttttgatctttcttacagtagtcggctagtccatcatcattcatgaaactctgtcacctgcattggtttagcacaaccttatggtaaactacatttccatatgtatcatgtctcttcctagactcaaattgttttaattactatagttttattttcttcaacttttaagctcagggattcatgtacaggatgtgcaggtttgttacataggtaaacatgtgccatggtggtttgctgcacagatcaacccagtacctaggtaataagcccagcatccattagctctccctccccctgcatcctccactccaacaggccccagtgtgtgttgtccccatccatgtgttctcatatgatatctttcaatgtttgatgaagctggttctttctcattttttgttttcttttccagtatttttgtatggctgtgattgtattttttttctcagacaagttgcatgatcattttgccaagtctgaaaaaattatcttaaaaattttaaagtaacatgtcatagtatgcatatatatatatgtatgtattttatactttttttgtctttgtgtcatactccagaactaatgagagttagtttgttcagaatgcattgtattaaactcacaatgggccagataccagaagttgctccttggagaaataggattaatgaaagtgaaaataatcagcatcctttggcaagaaggatttagatttgtgcttaggttatatatattctgctaaaacttttgaatgtgaatgggtcctgtagttctggacatgactgtgtatactttatgatgagccaccgtgaggatatccttaattccaaccatttattttgaatgcatcctgcagaagattattagatacgagaaaatgtaagccctggtctttattttgctactaataagctatttagctcttgacaagttactaaaactgtgtctctgatcccatttccttatctgtaaggtgaggatgatattgctcattcatttatcacataatactttgtttgcctgcctacctttgcaattgttgttaggatcaaataatacaattctggtaaaacttgtatttgaaaatattaaggttttctggttaaacattgcatatcaaaagcatttcatttgcttatgttttatcactctctccccatataccactaaaaatacaggaatttttttaaaaagccataagccaacaagagcaaaagaacagactagtagactgcagcaaagatataagccaaaattttaaatctggaactagatggtcagtggtaactgatttagtggagcagggaaagccagtactcatctgaaagaagcagtaagacagagaagttggttaagttgaggaatcagaggcacctggtacctttgaagcctagagttgaaaacaggaggatgaattagaaacttgaatgaggagctacaggatttctagatccctctcctaccacattgaatgttaaaaaaaaaaaagttgtaagagaatgacgatggggctgtactatgagaggaagttgggattggggtgaaggtagtaatagagacatcaatcttttttccattgtaggtagtcaaaagataatacagttttttaaaaattaagaaatgagttcatgtcctttgtagggacatggatgaaattggaaatcatcattctcagtaaactatcgcaagaacaaaaaaccaaacaccgcatattctcactcataggtgggaattgaacaatgagaacacatggacacaggaaggggaacatcacactctggggactgttgtggggtggggggaaggggggagggatagcattgggagatatacctaatgctagatgacgagttagtgggtgcagcgcaccagcatggcacatgtatacatatgtaactaacctgcacattgtgcacatgtaccctaaaacttaaagtataataataaaaaaaaattaagaaatgaataaacatgcatactattaagaagaagataattacttatgaaaccacatgcaggaattgaaaatgattgtggagacgagggagaggacaggagcttctttcacattggtatacttggtagtactaataaagagtactaatatttggtagactaaaaaatgatcctattgtgcaagagtgagacttgagcataaagcttggcagcaaggtgtataacaaatgcttattgagtggacaaatattattcattgatttcaaaaactcaaatattattcaatgatttccccttattagtgttatataggaattagggttaagtaatgtgctttagggattgatgagcaatgtatttggaatatcacagtataagaaataagtctttttattttgggggactgtggaatattagagggtctttgaacaaagttaataaaatgtcagcctgaactttgagtttttttgtatacttttcatcaaggaagtttggggttaaaacaacaatagcaaccttttattggtatgtgttaagacgtgacagtattttctctaccagaaaatctctctgactcaggcactggtatatgacttgggcctaataattttcttctctttgcattttttttgtctttgaaatgggattaaaatttattctgccttagggtagacagttggaaattagagaaatcctgggattggttcttcggtataatactgtaaacatagtaactaggtctggaagttaagttgcctcttccaagaagataagcagactgttggaagctaaagatttagttataataatgtgatttatatgaagcaaagtatctcctccagagatctcaaagttctgctggtattagaagtaactaatcaataataggtgagtgcttactctccaggatggagaatgttttattaacagaattacactataagattgagtccaatatttatttgtaagttgctctgaatttatcaggaaagaaatgctagagaaataccaagaaatagtattgtgtgatattcctgaaggaactaatttgatttgttgttctctgtaagacatagatgagtttgacttacattgtatttttttctgtttgtgttgtacctattgatctagtatcttgaccatgcacactggcttttaatctagcaattttacactcacagagctattctgtttgactaagccacagttatttgctacctacgtatataagaaaataatttcacatccaaatagtacttaagtaaaagtttcaaaaatgaaatattgtaccagttgaggtttaaatatgtaattgatttgggtatcttctgtacaactgtgttaattgaaaaccatattttaaaacttttattgttcctagagtgaattactggaactgaaacggcagcagcaagagcaagaaagagccaaaatccaccagactgaacacaggaggtaaaactggctaataaaataagcatccttggttaaatcaattacctagaaagtttgtacagtgttttaggaaagcattacgataacattattaatatggttttggaatgcgtgttacctttaaatctgttattgggacgtgatatatgtagaggtatgccaactgctacatatataagtacacacgtgtgtacatatgtgcatgcacaattttcttggataggtggcattataaactcacattagaaaactgactcatgttcttgtgtgttcaattaaggtatatttaatttgcctaccgtaggacaaaacatcctagtttgagacgatagtctaccatttatagacttagttataacacttagatcaatatagatggtcagatacccatacttgagtgcaaaagctcagacaaaaactcactaacattatttaatattgacacattagagaaaaaaaatcttagaaccattaagtaattttcaaatagtctaagcactctccatcttaatcctaatatcagacttaagaatacctagtaaaatatcatgttactgttgggacagtgctaataagcaccatattgtatgccattattatgctaagatttctagggggacacgagttgagttcattaggggtgtacttgagtatcttggagaagaatgtaagggttttcacaatttaaagggacaaattcttttgatagtgaatggctttttttgaacgtatttaaccttcccactgtcactaaactgtatttttaagttatgttggtttcattttctaaatgagagactttaaaaagcattcagtggaagctccctgttctgatggtgcctctaactgtgggcggggagctcacttttatttgactgaactatgttgtccccagagtccagtcaaaatagttttgaaactacaaatgtgaattatatgttttttctcttatttaaggaaatatcaaaactctgatatgtcggttaggctatattgttgggtaagatggtggtggggaagcatgctaactacttatttattataaagtaggccataatttagccattttattgctgtttattattttctctcttttttctttttttttttttgagacagagtctcactcttttgcccaggtgggagtgcggtggcaggatctcggctcactgcaaactctgcctcccgggttcaagtgactctcctgcctcagcctcctgagtagttgggattacaggcacgtgccaccatgcccagctaatttttgtatttttagtggagacggggtttcactgtgttggccaggctggtcttgaactcctgacctcaggtgatctgcctgcctcagcctcccaaagtactgggattacaggagtgagccaccgcacctgccctattttctctttaaaatacttcctgtttaaaaaacacttgatattgtatttataaactgattgctagtagtagccagttatttctctggatttctgaggattaattgaattgtaagactttaagcatcttaaacacagtgatgtgtcacattaataggctccattgctgaaatatttatctttgatgggcacctaataaacacccaagctatttgattagaggtggaaaagataacttttttgttataggaatcttggctttcattctttatttccatactactgaatacctaaatattggtggggctgtttaatttctatacgttattttttctttcttttgattctacttaaatagatccaataaatgtatagctccaaatttaatccaagaagagatttttctagataataaactcagtaattagttttgaagtatctgatcaagtcattaaatatatattttatgctcttcatcaatttttgaaaagagcttacgtttgtattgcctttaaagtgtgccatgagctttcccatgttatcatgtgagaatacatactcaatgaactcttaataaaatagccgtgtccattcttactcaaggcaacaacacaagctatatagtgtgtgtgtaggggatgtaaattaggttttctccaaaggcacaattttattggcatcaaaaggacaacgtgctttctacagtttaaaagttcacattgcagaaaactcaactctgagtattataatagaaagcactgagattcctgacaagcttttcaatgaacctgtaatgagcttgagtgcacctgcacctaacccgttgtaactatttgagtaggagaagacaagtagaaattccagagagaaacgacagagcatgggggtcaaggacttgaaaggatttgggccatgaagtgaaaactggatgaactgaattgatttattcaaacttgaaccatccctgaataatagtttttatccaaattaaccctcagaagaaaacccagagcacaattttgactgcagtagcatgtatgtactttctaaaactattaaacaaaaatagaaattggttcttttccctcccatttagattcttgataggaattgagagaaacaaactctttcccacccattatctctggttgactcacactgctgtggacataggcaagttgaggacactcctatagtatcaaagagtgctcaaccactctgatgtcctcttagtaactgatgctcaaaagtgaatcacattaccttatgtcttcatgacaaggcatcagtcttcgcagggtttgagtgaattgagagcaattgccagtgagctgttttgcagtctgcactcatcatccatgttgttttcaggggtgaagaacgtgtgccaggaagatttgtttcattcagtaactacattatcaggctacactccataaaggctgtgtcctaggctccgggaatagggcaaaacacggcagaaggggtgcctcaccatgtggaaattataatctggaggagagaaatggaagtcaacaatcaaaggcactgttatttcagatggtgatgtgtactgtgaggacaatatcacaaggtgacgttaaagaagaaattggagatgataggttacttaggaaggcctcactgcagaggtgacatccaaggacaaggaagaaccagccacatagagactaggggcagatgcatggacttagatggcctacgaagaggggaagagcaagtgcagaggctctaaagtacaaatgagcttggactgtttgagtcccaagtgatgggattttttttttttttttttgagacagagttttgctctgtcgcccaggctggagtgcagtgacatcatctccactcactgcaaactccacctcccaggttcaagcgattctcctgcctcagcctcctgagtagctgggactataggtgcccaccaccatgccgggctaatttttgtgtttttagtagagatgaggttttgccaggttggccaggctggtctcccgacctcaagtgatgcaccagcctcagccttccaaagcactgggattacaggcatgagccaccacacctcaccccatgtgatgggattatagtgagtgaagaagagaatgatactcagtgggggaggaaaggtaggcaggagcaagataacacaaccttttataagccagttttattctaagaccaatgggaagctgtgggagaattttaagcaaaaggaagacatttctttcataatctagtaaggttgttgtatggggactagattacggaaggtgggagtgaaagcactagcaaggtgaagatatagtaatttgaactagaatggtatccatggaaagaaatgagtgaatttaggttgtgttcaggaggtagagcaaacaagccttgtagcggtttgggtgtggggtggaggatgctgagtgaaagcccatctttgttaatgacaaaaagactggataagaacagctccaggcatgcaggcagtccaggataccagtggttgtgttgtttactggggagcagggtcactttccttttcttgatagttgagtctccagcgaagtaggatactattctatctgcatgctgagagattcagagaaggtgacttaaacatggagcttggcagtgaagcaggctgactagaatatggcacttgggtagattttatggtaagacaggaaagaagctttataatagctgaggtggaaccgcagcccgatgggacctaaagttgttgagagacagcaactgagcccacacacgcctggcatcttagctagcactgagcaagcgcagacagccagaaaccccctccagcctttcactttgctacccagcctttatttgcctcaaagttccctaatctcccacagtcactggcctgtagccactcaccatgaccacattctgctaatcttcatgactgaacaagaggctcatgtgactggttcctgcctcccttccttccataaatgtatatttgctgctatgcaccaggcattgtgtttctgcttcccagaagcttatagtcttatttctgcacttcctaaataatctgttgatgtcatagggtacctattgcagtgccatttcttcagcttccaagtccctgactctactcagccatacgtgggcaactcagagcacgacgttacctgtgatttattattttaaatttaaaaactgtaatatgaaacacagaaaggtccacaaaacagatatttatagtgattaattataaagtgaacaaccaggtagcaagctccagaaatagaataatataagctcaccttccatttctgcttttcatgtatggggtttactttagcaagactggcagtggagtgcagggaatataggaaggacatctatcttgcaacaataatgccatagagctatctttggttcttcttcatgttttggttcatgctgaggcttctttctctctccagcctctgaggttcatacctggcatgattctgagggctgtagtttctttcttgaactagggtcttgctgaactggcaggagatgagtgcctgaaactctcaggttaagaattcgtatcccctttggcttgagccaagattggcaccagctccagtaaagaggggttaacagcatgtcatatggttagtgtgaagagaagtttctgtggatttcttctaagctgaagccaggaagctatccccatggtcagttcatacaacacattagattctcagaaatctctcagccctgcagcaagttttctactcacacacatttttcattgttttaaagggtaaataatgcttttctggaccgactccaaggcaaaagtcaaccaggtggcctcgagcaatctggaggctgttggaatatgaatagcggtaacagctgggtgagttttttcttttctcttaaatcatctttcaatgttgaagaataaaaacaatgagaatttttaatatatgttttggccttctccccagatattacgtttttgttgttgtgctgtttggcagtgtgatgggcagtcagccagggggattactgtaaattccacaatagcttctgctagagggagaaagtcctgatttcagctctggccaatcacagtaaaaaatgacacctgccctttgttctcagcatgattgcctggactttaagggtttttatcatcccttgcccagacctacaaaaaaacaaatgaacgttttttttttttttttttcagaaatatggttataaaaataataagcattctctagtaatatattctttcagtcaaactaacacatcaaagaaaccagtagttaatttttcactatgaaatgattttttagaaaccctatagcaaaaggcacttttaaaaaatgaaatgtccttacctatttctgtgatgaaaaccttgcaactgtgttgcaatatgtgtttaatgtattttgtgtgcatgatatattattgaacgagcaccaaagctttggaacatatataattgtgaggtttgcaatgtgtacaaaatcaaaactaaagaccataggtcttacagtttaattgaagcccaagtgtataactaccttctctctctctcactcactccctttatatacacacatcagatagaaatctgtaaattggtcacaatacaacaaaataatcaagtgcttgctgacctagaaaatctagagaagatcttcctttaataaatacttgacagacaaaagatcatgtttgagaagtcaatctgttagaaatcttacagcatgtacctttgaaagacatctagtaatctagtagtttacattgatgagtggattttataaatgtatacatatttaagataattgaacagaagcaaatttgcagagaacactgcctggatgtgtctatttatccgtaatatatgctcatttgttacactctggcattcagaatagggacagtatggaacagagaaaataattgaaacgcaggatctttgcattgtgtgatacaaagtacacatagtgtcttgtaacagtatgtgagtaggagtcatgtggaaaatgggccattgtgagttgaagacattatccaagcttgtataacttagttgtgaaacacaattggaatttagattttggtcagggcttggaaacacactgtatggttgtcatttcttctctatggaaccgctcttaaaacttagaaagcacctatctgggactgaggggaagatgatgggagagcataaatggatattgcataggcttctgctgaggatgtgaggatgtggcaatctggctcaccaatgactattggcaggccttagtgagccataaatctctgcttagactcctcacagatcaaagagaggagcattgtttcctcatgatgtaatagtgaggctgattgggtgaaatttttagtaggatgggcatatccaagtccaaatgggttatcagtgctttccttacttaaaagaagcagcaagagaaacctgggaagttcctcaggctcccaccttcacctctgttgacctccagacatctgcacttctgtgcttgctttgctttatgatttatcttcttctccacctcctgggggactttgttctaataatactctctcctctctactgaattgctgaatgttccatctcgactagaacacttccatcagcataaaacataaatcaacataaattctgttgatagcacatttccttcttgctactgccctgtttctctgtcctccttcagagtaaaacatcaaaaggtgcctctccttgctatctctaatttctttatttttttcttaaacccactgttacaaggttttagaatctacccatcaaaaagaatgttcttttcatggtcactaaaaatgttcacattgcaaaatccaacgattatttctcaatcttcctcttttgactgatcgccattctttgtcatggtgaatcactccctcttctttgaaactgtttctttacttagcttctgtgacactgtactctctcctgggttttcatatacctcagtgataacccgttttcatccctctttgctgaattccttgcatctgcctgtcctttcaacagtgaagtgcctcagggatctaccttggaccactttctgaactgatgttcacttaatacattctttcttatgaaattagatactcattcattcttatgaaattagatactatctatatgttcatgactcccaagtttctatttccagcccagaccccttcctccaaactccagacttgtgtacccagttgcctacccaacacatctctacttatccaagatatgtaatagacatttcagccttaacatgtctaaaacctaacctttgatcccctttaccctagtgctctgtctgcacattttcctgtttccataacggtgcaatccctctctcacacccacacagctagccatcaacaaatcctcttgactcttccttcccaatacatccaatccaacagcttctcaccacccttatcatcattatcctgcttccagcctctctcagtgctcatccagatgcttgcagtagtctcctagatggtttccttactcccacaattacttacctacagtctgttctcgatacaagactgacagaagtcagattctgactctgcatacccctccaatggctttcgccacccccaaatcacttggagtaaaagccgaagtccttccagcagcttaccaggtgctgcatgatccagactccttcttagccctctggctctcctgctgctctccttcttcatttctctctagccacaccagctttcttgctgagagcactgggtgctctgtctacactattctccaaaatatccatatggtttgtcctccttcatttactttcttgaattccacggtctcagtgagattaccttggcatcctagttaaagctgctgcctgtcctctcaccctggctcctgcagtcccctttctaggctcccctccctttttctatagcactcttcaacttctaacatacttttaaaacataatttccttgtatgttttgttgactgtttactcttcgcctctccctgtggtgatgtatgttccacattctacaagggtggggccattggattgttgtgttcagtggtgtatcccaggcataaaacaataactggaacttaccacacacacaaggaaacaagtggttgtgattcaacatcacaaacacaatagaaagacttagagccagatgatttcacatgctaaaatgattagatactgaatttaaaatcacgatgtataaaacgtttgatgaaataaaaattggatttgaaataatgaggaaaaaataggagataatgaaagacaaccaagcagacttcaaaaagaattaaaccaaaatgccatttcttatcaattatttggcaaaaaaaaccctcctaaaatattgacaatatactctgttggcaaggctgtggggaagtgggtactttacacattattggtgggcatgcaaaatgatacaaacactatcaacatctatgtcttactgtcttcccattaaacgaagaccaggcctatacatattagagccaaattctattaaactttcaaggaacagattatttcaaatgtctagaaagtttttctgattaaaaagaaggaagtattatccaaaatgattaagcaggtaaacatgactttgaattaaaattagacaaagaccgtatagaaaaaaaatagactatcactcataaacatagattcaaaacaatcacaagattttgacagaataaatatgaaaaagcataacatatcctgatgagatagaatttgttccagaattgcaagcttggcttattgcagacaaaacaaaaaacctactgagataattcacctcataaattataaaagaaactccatacgatcatctcaattagtacagaaaaagcatttgctaaattacaatactcacttgtggtaaaatcttctaggaaactaggaatagaagggaaatttctttgcctcataaagggatcaaaactgtataataataataaaaatacattaaaaacatttccgttaagatataaggattgaaaagggggaaaaaaagcctttataaatcacagatgatacaattatttacgtagaaaatccaaaagaatttacattcaaattattagaagaaaaaaaggcttggcactgttagtagatataagatcaatatgtaaaaactacatttctacacattaggaataaataaaaaatctaataaaaagatccaaccaaaaatatgaatgaccctttttaaaaaattctaaaattagccgggagcggtagctcacgcctgtaatcccaccacattgggaggccgaggtgggcggatcacgaggtcaggagatcgagaccatcctggctaacaagatgaaaccccgtctctactaaaaacacaaaaatattagccgggcgtggtggcgggctcctgtagtcccagctacttgggaggctgaggcgggagaatggcgtgaacctgggaggcggagcttgcggtgagcagggattgcgccaccacagtccagcctgggtgacagagcgagactctttctcaaaaaaaaaaaaaaaaaaagaaaagaaaaaaaattcttaaattttgtagaaagatgctgtggaataaataaatggagagttataccttgttaatagataggaatgagctctcaaataagctatagattcacataaattggaatcaaagcaaagaactgagagtaaccaattcactcctaaagataaagaagtatatatggggacttaattgtgtatttaatgcggtatgcagttggcccagcacacccaacatttctgaattttttagttttttgtatgacagacggggcagagcacatcactggggggaaacagactctggcaaatgctgtggggacaattgagtacttacatgaaattaggtcccgacataattcataaaaaaattctaactggattaaagcttataagtaggaaggaagacttttacattttagaaaataaaagaggctgtttataaaatagagctgagaaaggattttgtaagacccaaggtataaacaacaataacaaaaaagataactatatctacattaaattttaaaacatctgttcataaaagaatatcatacaaaagtaagaggagaggccataaattaaacttttatttaggacatgttctgcaaataacaagtggacaaaattaatatatagaattagcaacttaaattatatcaatatatttgaattactattaaattaaggatatgtcaccatttaaagactgatagatgaggactgagcttctccaaagaatgaaagaggaaagctatgcctcaattcacagaggcttggaggaaatatcggaaccagtaaaaagccagagacagagtaaacaaggaggaaggcagaaattatgataaaaccaagccatggaaagaagcagtggtttcttgaaatgtcatatagacacttaagcagtaggcccccaataagtgtgtatgttaggtggattgatttttattttttaatcattgttaatttaaatcagtcttctcatatttcttaacatatacatttattcttcaataattgcttttatatgtaaaaaatatatttttttatttttctagggttctctattagttttttcgaggcacctaaggtgggtcacttaaaaacatccctttaaataatatttcctctgatacaataggtgaggctctttgggatgctgtggaaactctaaatcctatgtcttcaggggcagttaagcatttcctatgaccaatgaggcaacctgagattttaatttctcaaagtgttagaagaaacagcaatggtgtgtattccatacgtagcgtggcccagcactgcagaaggcttgatggaggtttcttgaccctttgcacatggtaggagtggagactcaccaatctatctccctacatcaaggtcctcttagaagtcacctttctgctgtataatacagcgtaaccctacttgagacatttccatttaaattgctctgttccacatgtgttcatcctgtccttgctgtaactgtgtaggtgggtgacaacattttcgaactgtatatttgtcacctctgttagtctatctctaagaacacagccaataagacatcacttgacaagccattaccttattgaccaagactattttgtgaatcaaatgcaatgtgacttgaaaatcaaatcgtttcaatggtcatttaagttgttaattttaaaaaatggtcatttcagcttgatgcataagagcgttctttgcaggaacttcatttttgactacaaaggctttgaattttattttgctgcttgcagtaatttttgttttctttttcttccagggtatatgagaaaatattgactcctatctggccttcatcaactgacctcgaaaagcctcatgagatgctttttcttaatgtgattttgttcagcctcactgtttttaccttaatttcaactgcccacacacttgaccgtgcagtcaggagtgactggcttctccttgtcctcatttatgcatgtttggaggagctgattcctgaactcatatttaatctctactgccagggaaatgctacattatttttctaattggaagtataattagagtgatgttggtagggtagaaaaagagggagtcacttgatgctttcaggttaatcagagctatgggtgctacaggcttgtctttctaagtgacatattcttatctaattctcagatcaggttttgaaagctttgggggtctttttagattttaatccctactttctttatggtacaaatatgtacaaaagaaaaaggtcttatattcttttacacaaatttataaataaattttgaactccttctgtataaatgggtcatttttatttttaatgaaaagttattggggttttctctcttgaagggtctcattttaattcccttttccaggccgtatagatcaaatatagtactgtcattactgttggctcttgttttggtcttgacttactaatagtgttaccctgattttcagagggggacagtttatctccagaaaggccaatgtttgtatacacatcagctagacacaaatatagacatcatatgtagtttgtacatgtttcagaaacttgttttttctttgctctgtgtaacctatttcctattgctagttcagttggctttcttattcacttctgtgaccctgaaccagttctcagaccctagagtgtaagagcattgattttctacgctgtgtaatctagctcaatccctctgtcccctccgcctcaccgtcccccagccaccacattgtatagcaaaagcattacattcaatcctagaataaaggtaaatacaacaaatcatctttgcagctggacaactaataatactttgcagcattaagagatcttctgtgttaccagtcactctgttgaaatgaactttccgaatctctttattcaggaaaacatggggttttgaaattcttgggccaagagacataactgaggggttcgcagagctaggcaagggtgcactaggaaagggccacattggtgggtggggggtaacagagaacagatggtgtcaggaagtttctctggagtaaataatgtggatattcttggtttccctctcctccgccagctgaagctgtgttagtgctgttgacactaatataaaatgtttggtccatttgaaatccttgtcattgccttatatgggggaaactcaatcccccagcctgtgttggaaatatcaccaaactgattgtaaatgtgcggctgtagcagacattttagtgtggtggtgtgcagccatttcggccctacacctgccagcctggctaccttacagttgtgttccgatttttgcgtctatgcttggtgtgcctcacttgctgcattttccagcatgcaaccaggagttgacgtaggaaaaagggatgctttcttactttggaagctctcagggaagttggtgtcaatttctcctccactgcctggcctaccctgcactcccaaagattttgtgcagatgggtagttccattttttaaaaattgtgcagatatggaaaattgtgacttacttcatgaccagaactatctagaatatgtgtgggggtataaacatcttgcttaaccaaatatctatgtaggcagaggtaaccaggagagaagcaagacttgctgcctaaaggagcccaccattttacttttcacatttaatctgccacgttgaatcaattggaataaaacctgactcgcaggtgactggacaggaaatcccaaagttccaccatttctatgcttaattttaatgtccccccgcttttttttttgtagaaaataaaaacaagaaaatcgttccaatgtaagatgtttgttatagaaactttaggcaatacaggtgtgtaataaaatgtttaataaacttctaaacacttttgtatttggattta

SEQ ID NO: 426 - DNA, 66355 bp, Homo sapiens
cggccgcggcgccctcggggcccacgatgatggcggagcaggtgaaatgcgcctcggcaggggtcagctctggagcgggctccgggccggtggtgaacgcggagctggaggtgaagaagctgcaggagctggtgcgcaagctggagaagcagaacgagcagctgcggagtcgagcggccagcgcggccgccgccccgcacctgctgctgctgccgccgccgccgcccgccgcgccgccccccgctggcctgcagcctttgggtcctcggagccccccggccgccacggccaccgccgcggcctcagggggcctggggctcgggctggcgctgggcgcggggggcggtggcggcagcggtagtggcagcggcggtggctccagccccgcgttcccgggcaccttctgcctgcctagccccgcgccctccctgctttgcagcctggcgcagccacccgaggcgcccttcgtctacttcaagccggcagcaggcttcttcggcgcgggcggtggcgggccggagccggggggcgcggggacgccgccaggggcagctgcagcgccgccctcgccgccccccacgctgctggacgaggtggaattgctggatctggagagcgtagccgcctggcgggacgaggacgactacacctggtactgcctggctccgctccttccccgagaccctggcctcgggggcttcgggcaccggggagcgggggcggggggcggacgggggtcccctcgcggcagccggggtgactccccgcggctcccggaggggccgacccagcaggtgttgagccaggcggtgacacttcccacgatgaggcttctcatgaaggcagaaacctgttttctaatcgctccgactgcggatgaaccggcccccccttccccccatctgccatgggttctgctatttgctgattgttgggtcccaagctcctcgttagcattaagtgcaaaatccatgtcatcttgtctttttgctcagtgctgctcttttccccagtgttttcggagggatgacgggggatggtaggggttggcctctgtctgcgactgttactgttctttcgttttaaacgaacgctggacaggatttgcgtgctcttcctcctcgggtggcatcggaagccgcgcagtgatggatctctctttatagagaggttcgttcttgctgtttgaattttgcagtcgtgtgcccttttgcgttgcattttcattgaaatcttattttcagagactgacttgctttttaaaatggggtgacctcactggctttcccataaatagtgccaataaagaggacttttcttggagtggaatgaacaggtgggagggacttttttatttatttatttatttttttacctaggaaccaacgaactgtctttaattttttaaattaaactgtagaagaaaagtgagattagagaagccttattttcttatttcttggaaactttttagcttggttatcagaaaacttgaggctgacagcatttattcagttgacatctggttagcactgtctactttccatgaatgagtaactttagggggaggcttgctgtagtccttctttactttaggtcctttttatgtaggaccctttctgtttttccaagctgtgttttcattactttctttgtgtctctgttgcatgattgcatggaagggattgggaaatggagatccttactggtttcctattgggaactgcagtgttccttttcccttacactctgtcatgtgagagctctaactgtaaagtacattagttaattggtttcattcaagaatcaaaatatatggagttacagtaagcctttcagaggtgtattcatcatccaccttaatactttttggcagctgtgcaggtagctcaaggtgtaaaaaaatcaaacaactcatcacttttgggaactttaagccattttttcaaagctgcacccttatttctgtaaagtaatctcagtttcagtctgaatgtggtactagaaaatgctctcatgatggtccttagatttcactaataactctcagcccttatgccactttcaaattattttaggttgatttagtccctacttagccttttctgatggtatgtatgtaaacagtggaaggaaacttgtttacatttttgatggggagatatatgggatcagttttatgcttaaaatatttgcattttaaaatttattgtgatattgtttgtaaatatgagattagtaatctattaataactttccttcttttgaatggatttctgtcatatttagttagcatcctattactagcattttggtacctaggctttctttttatagtttaattttgtccaaatagcattgaaataatcaactttaacagaaatcacccacttagtggtattagtatattagctcttcagatggtttgaagcaaatcaaagttgaagcaggttctatttcattcaacaagtacacaggtgaataaatcaaagccttgatgctttacaaatgtttctagagacaaatggcagagaatcttcctgaaaacaagcctgagattagaattccaggtggaaaaacaaggagggttcattaatcttagtgggatggtcttaaaaattttaaagttacctgatttacataattttattattacattttatgcatcaagattttgtttgcattgcaaatctttttgatgaagaaaatatcaacagggtttaatttttaaagtttaacccacttgttaatgcttgcaaagcactctgttcctttatcactgcagactatagtgtcccagtagtgtggtctcagaaataagagtgctgttcatttggttccctgatatgtttgcaggatggcaacttatttttatttcctgtgtttattaagaaacaactggagtgggtatatagtaccttattttaaaaatatttaaaactacaagttttacatgctcattgtaaaaaaactaaaacatagatgtaggtataaggtcacaaaaattatcttccttgtccccaatttattaccgtgactcagaattcaccctgttaatactctgcagctccttcaagataaaaaaatataattacaacaatcaatatacaaacatatacacatcagttttttttaacacttgcctttcattgaacatacattggacatttgtgtattcatgtgacatcacatctcccagtaacaaaggcatcattattagagtaacaatattaaggaacaagttactgttaactgtatcacctacagtttttcatgcattttttattgtgatttcatcctaatgggttgaacaaaatgtgtttgcttatttatttagaatagcacttcctgctaaaaatgtcataagttcaggaaagtttacaaatgtagattaatcactggatattttagctattcttttatgtaagtatatcttttctaataaaaccttagaatacattattttccttttattaacaacttggacaatatttgggttaagagttatgtgtgtaaggaaaatcatgactaacagaaccaatattttctttatgatagttcattagttaatgattaaccaggtctttgagatcatttttctgaataattatttaacctataagtagtatcttaaaaaaaacagctttaaagagaatggagtgttatgctctcccttttgacaaaaaagctttgatgaaacaattttcttatttctttgaatatttatcttaattgaattttaagtcttgaatgttgccttaatactacctgattatcttagcacagtattgctggaattaagtgtctcagaaagttaaagttgatggcaattccagaacctgaattctttctttctttctttctttctttacttatttatttattttttattattatactttaagttttagggtacatgtgcacattgtgcaggttagttacatatgtatacatgtgccatgctggtgcgctgcacccactaactcatcatctagcattaggtatatctcccaatgctatccctcccccctccccccaccccactacagtccccagaatgtgatattccccttcctgtgtccatgtgatctcattgttcaattcccacctatgagtgagaatatgcggtgtttggttttttgttcttgcgatagtttactgagaatgatgatttccaatttcatccatgtccctacaaaggacatgaactcatcattttttatggctgcatagtattccatggtgtatatgtgccacattttcttaatccagtctatcattgttggacatttgggttggttccaagtctttgctatcgtgaacctgaattcttaagtcatcttatagccctatagtaaaactctcatcctgctatactgattcctcagttatcttactaatttgataggcttagctctccagaaggccattggctagaaaggaaaagggaaaagtctgagtatcaggagcaaataaaaagctcaaagggactaaaatatccatgcatacatgggacacagtgtgattggatgctttttctatctttatggaagaaatgtttttaagatttatatttgtcctaatgtcaccaggctctgcagcaccagagtacaaacagagtaattcagattggtctgaagtggcaatgggagccattagctaactgcatactagaccttcctatgacctgtttcagccctcttatttcagtgttgagggacgggagctctgaggcaaaatggcttatgtaagctcttctagttactgatagagttcagactaaaaatcagattatttgtccagattcagaagtgtttacatcactgatatttttttttccccagagctagctgtgtaactcattagtaagtttataaagtcaatttagtggattgaccagcattttaaaaaagtgaagtgcagtagaatagaaaatcagagtttatcacatcttataatacaatgcttgctttgattaaatatgttttagttttatagatgtggaaatattaaacgtatttttgcattatgatcaaagttaacaaaactctatactgtttgaaagcaaaacggagaaagcaggtggaaaagcactgaagatagtatagtactctgaagggaagttaggtcttgcacacctcaaccaggaagatggttctatatgagaaaatgccacgataaaaataagtcagccaatataaaatgcagccatataaggaggctttattttagtagaatgacaattaacagaacattgagactatataaacaggatgtggcaaggatttttaactttcccaactgggaaagacaatggaaaagttgttaattatacaaggaaaaatggtgacttgtacaaattaagaaaaatttaatgaatgagatattcatcttccacatgtaataccaagaccccagacagctggctaacatcattgccaatttttcatcaaagctgttgaacaccttgtgctatacatatggcacaactaaattagaccacctaaactgttttttgcataattgattttcagtgaaaagaccagagggtgcttccctttttgacagtgctaattgaaaatgtacaatgttttctaggagcaaatggagttgactgaagtgtatgacgtgtgtttgaaataagtaacttttaaatgttgaagtgaggtgctgaagtagtttacctgcaactgggcgaggcagggttgggggtggagggaaagtttgttataggacagcttagtaagtaacgcttgaacttcatgtatccttttaagagcctgttggaactaagtattgtagtggctatctagtttgatcctagcaggtgccagtgactcaaacactgttacagagaactaaagattcgttgatcgtgcttattagtgttgatgtttcagctttccttaaaataaaacttgcagagattgaaggctcttaaaattatttgtctgaaaattaccacatattacttttcagtggcaggtctaaaaaaaaaaaattatatatatatatatacacacacacatatatatttttatatgtgtatatatacacatataaaatatatatacatatgttttatatgtatatatatacatagaaaatatatatacatgttttatatgtatatatatacatagaaaatatatatacatgttttatatgtatatatatacatagaaaatatatatacatatgttttatatgtatatatatacatagaaaatatatatacatatgttttatatgtatatatatacatagaaaatatatatacatatgttttatatgtatatatatacatagaaaatatatatacatatgttttatatgtatatatacatagaaaatatatgtacatatgttttatatgtatatatatagaaaatatatacataggttttatatgtatatatacatagaaactgtatatacagaggttttatatgtatatatacatagaaactgtatatacagaggttttatatgtatatatacatagaaactgtatatacagaggttttatatgtatatatacatagaaactgtatatacagaggttttatatgtatatatacatagaaactgtatatacagaggttttatatgtatatatacatagaaactgtatatacagaggttttatatgtatatatacatagaaactgtatatacagaggttttatatgtatatatacatagaaactgtatatacagaggttttatatgtatatatacatagaaactgtatatacagaggttttatatgtatatatacatagaaactgtatatacagaggttttatatgtatatatacatagaaactgtatatacagaggttttatatgtatatatacatagaaactgtatatacagaggttttatatgtatatatacatagaaactgtatatacagaggttttatatgtatatatacatagaaactgtatatacagaggttttatatgtatatatacatagaaactgtatatacagaggttttatatgtatatatacatagaaactgtatatacagaggttttatatgtatatatacatagaaactgtatatacagaggttttatatgtatatatacatagaaactgtatatacagaggttttatatgtatatatacatagaaactgtatatacagaggttttatatgtatatatacacacataaaatatatacttgtgtgtatacatatgtgactgtaccatttgttttttgtattatctgcaaaaagatgactttagaaccaaatattttgagaataactgagactttgttttccagacagttgtcatacttcattggaaacattcagggttatcatgggctttatattatttttgttctcccagcatagaatgtgatgtgtatggaaaagaaggggttctatgagaaggatagtagtttctggtgtgtgtggtttggaagcaatttaagaaaagttaaagaaaattagagtgacattccaaatagtagtttgaaatgtatatttcaaatataatttgaagaattctgaaaatttagattaagacttttcagatgctcttgccagaatccaatataccattaatgaaactactgaagttgaaaaaaatgtttataagtcactagaatgtatgatgtactaatgatggccagataggacattgtaaatgttacttgcattctaatgacattgaataaagtgatttttaaaatgactttttggagggttagagctatataggagaaatacagatttttttttttttttaaaaaccttgcctatctaattttggagctgtgttgtactcaaggagtttttagccacatgatctctataactagttttttgtattatctgcaaaaagatgactttagaaccaaatattttgagaataactgagactttttttttctagacaattgtcatacttcattggaaacattcagggttattgtgggctttttctttctttaaatccagctctaggccaagtcatagaaacactaggctcaaagctatcctgctcactgtcaggagactgactctgaaaatgatcacttctgtcttaatgccatacatttgtatagcacctcaacagttttatcaaaataatataataacatgttagtagttttcaaaactccccttgttaggcttattacaggaagcagtcctctactccctcctcctgctgagtccttcacataggcatcactttatactctactagctgtttctttttcctaaacagtctttatacttttatgatcttagacatctatggacttattatgaaagaagaaaacttagctctcttcctctcacccttgactaccatatctcttttcccttctcataatggtttttatggtttttcttttatatttaatgtctgcattatgattataatttactagctaagtcctgttaattgcatgttaaacatgtattttctctgacccctttgttcctccaagagttagtaatggcacttcttctctcctcttcactttctttaattacctatcagaaattatttccccaaacacgctaaaggagccataaaatccctcattaaggtcatacacatttggcagtctgttaaatctgcttttttaaaatttatattgtagtgctatcccctctgaaactcttaatctcattgctctagtttttactgtttgccccctaagctggatgcatactgctgttgccatgggaactctttcagtttcttggcaatgtggattcccttcttcttaaatccttttcgtttgtattttttttattctcttaggtggggcacagccttcaatagctttctgagaaaggagacctgcaggagaggcacactttgagatcctgcgtatttgaaaatgtcattgttctgcccttacataagattcatagttggactggctataaaagtctaagttaacctttccctcatgtttgaaggcactgttccattttgttctagcttctgttatgttctagctgttgagtgcactgtgtttggatatctaatcctttttgactttttcttttgcttcctttattcctagtattctaaaatgtcatgttgtaccttggtatgggttattttatttaatatactggacattcgtgcacactttcactctagaattgcatggcctgacttccactctggaaattttcttgctcttttttttttcttcaaaataactttccagtttctttcttttctttctttcttttttttaagaacttgtaacagacagatgtaggtcattccatctggcttaatcacttgattttcttatctgtcttatcccattgctaatctgtttttattttgttttcaggagacttcttcaacttgatattccaaactcatttactgactcttttgtttttgctatgatagtttcatttcccaagcatgaataaactgtttttttcaatatccatgtgtatgtgtgtgcttgtgtgtgtgtgtgaatgtaacattttcttttagatgatataaattatattcgtcttgacattttcatctgttccctgcattgtttttctctttggttctctttactccctctacttttagtctcagtgtttcatgtaaaaggaatatttcacatatttggtgtcactggttgtctgttcatacccaaaggaggtgccgaagccgatctaaagctcttaatggatggagctccttggtgcagtttactagtgattggatgggtagccaggccacattcaagcatctctaggtcttctcttggattcatctttttctctatgcataaaccttctatactcctaggagatgtaagcaaggcagtcatttctaggaatataaagaaagaaatgggaccagaattctaacgagtcagcatgtggacttccatttaatgtttggttaagtaaggtacctcatttatccttcagctaagtttggtgtgcctgaagtcagggcttctctggatcagcttattcacatagcaaagtctctgatctcaggttgagatgaagaggggtggtaggactggctgtattggaggggatttgggattccagttgtcccttaggtagactttcaactggattcactgcttttagtgccatgatcatccctaccttctatgaaatgcggagtgggaatgagatatagtaccagacaataggaattggactatggagtatgaaagagaaatctccataagtgaacatggcatagtgggtcacttagaaactgaatgtgcctgtagaaatgagcactgcttttgaatatgctgtgaggcagtgtggacaaatgaaatatttgtatcacataggccctaagtaattgaagacaccttactgtggtgttcccctacaaacaaaaaaaggactctatcaaaaaaagtgaatgggagtatctggaatccagagtcaagctggttggaggaagcttcctagcagcagaagagatcagcaattctcccattggatactggaggtaacaggcagagccgtgctttagatagcagtttcagatggtagctgagagggatttgaaaacaacaggcacaagctcagacagaaacatgaattctccagcaggggttgacagacacctcatacgggagagctctggctcgcatctggcaggtgcccctctggaacaaagcttccagaggaaggaacaggcagcaatctttgctgttctgcagctactgctggtgatacccagacatacagagtctggagtggacctcaggaaaaccccagcagacctgcagcagaggagtctgactgttagaaggaaaactaacaaacagaaaggaatagcatcagcatcaataaaaaggacgtccacacagaaaccccatccaaaggtcaccaacatcaaagaccaaaggtagataaatccacgaagatgaggaaaaaacagtgcaaaaaggctgaaaattccaaaaaccagaatgcctcttctcctccaaaggatcacaactccttgccagcaagggaacaaaactggacggagaatgagtttgatgaattgacagaaatagacttcagaaggtgggtaataacaaactcctccgagctaaaggagcatgttctaatacaatgcaaggaagctaagaactttgaaaaaaggttggaggaattgctaactagaacaaccagttcagggaagaacataaatgacctgatggagctgaaaaacacagcacgagaacttcatgaagcatacacaagtatcaatagccaaatcaatcaagcagaagaaggtatatcagagattgaagatcaccttaatgaaataaagcatgaagacaagattagagaaaaacaaatgaaaaggaattaacaaagcctccaagaaatatgggactatgtgaaaagaccaaacctacatttggtgtacctgaaagtgactgggagaatggaaccaagttggaaaacactcttcaggatattatccaggagacctttcccaacctagcaagacaggccaacattcaaatgcaggaaatacacagaacacaacaaagatactcctcgagaagaacaactccaagacacaaaattgtcagattcaccaaggtggaaatgaagggaataaagttaagagcagccaaagaggaattacccacaaagggaagcccattagactaacagcggatctctctgtagaaaccctacaagccagaagagagtgggggccaatattcaacattcttaaagaaaagaattttcaacccagaatttcatatccagccaaatgaagcttcaaaagcgaaggaaaaataaaatcctttacagacaagctaatgctgagagattttgtcacctccagtcctgccttacaagagctcctgaaggaagcactaaatatattgttgttgttgttgttgtttttgagacagagtctcactctgtcacccaggccggagtgcaatggcgcgatctcggctcactgcaacccccgcctcccaggttcaagtgattcctctgcctctgcctcctgagtagttgggattacaggcacccactaccaggcctgggtaattttttgtatttttagtagaggcggggttttgccacattggtcaggctggtcttgaactcctgacctcagatgatctgccaggctcagcctcccaaagtgctgggattacaggtgtgagccaccgcatctggccttggaagaactaacaatggaaaggaaaaaccagtaccagccactgcaaaaacataccaaattgtaaagaccagtgatactatgaagaaaccacatcaactaatgggcaaaataaccagctggcatcataatgacaggatcaaattcacacataacaatattaaccttaaacgtaaatgggataaataccccaattaaaagacacagattggcaaattgtataaagagtcaagacccattggtgtgctgtattcaggagacccatctcacatgcaaaggcacatataggctcaaaataaagggatggaggaatatttaccaagcaaatggaaaacaaaaaaaaacaaaacaaaaaaacatgggttgcaatcctagtctctgataaaacagactttaaaccaacaaagatcaaaagagacaaagaagggcatcacataatggtaaagggatcagtgcaacaagaagagctaactatcctaaatatatatccacccaatacaggaggacccagattcataaaacaagttcttagagacctacaaggagacttagactcccacacaataatagtgggagactctaacaccccactgtcaatattagatcaatgagacagaaaattagcaaggatattcaggacttgaactcagctgtggaccaagtgggcctaatagacatctacagaactctccaccccaaatcaacagaatatacattcttttcagcaccatgtcacacttattctaaaattgaccacataattggaagtaaaacactcctcagcaaaggcaaaagaatggaaatcataacagtctctcagaccacagtgcaatcaaattagaacgcaggattaagaaactgactgaaaaccgcacaattacatggaaactgaacaacctgctcctgaatgactactgggtaaataaagaaattaaggcagaaataagttctttaaaaccaatgagaacaaagacacaatgtcccagaatctatgggacacagctaaagcagtgttcagagggaaatttatagcactaaatgcccaccagagaaagcaggaaagatctcagatcaacaccctaatatcacaattaacagaactagagaagcaagagcaaacaaattcaaaagctagcagacaacaagaaataactaagcagaactgaaggagatagagacatgaaaaacccttttaaaaagttaatgaatccaggagctggttttttgaaaagaccaacaaaatagatagaccgctagccagactattaaagaagaaaagagagaagaatcaaatacacacaataaaaaatgataaaggggatatcaccactgatcccacagaaatacaaactaccatctgagaatactataaatacctctatgaaaataaactaggaaatctagaagaaatggatcaatttctggacacaaacaccctccccagactaaaccaggaagaagtcgaatccctgaatagaccagtaataaattctggaattaaggcagtaattaataacctatcaaccaaaaaaagcccaggatcagatggattcagagccagattctaccagaggtgcaaagaggagctggtaccattccttctgaaactattccaaacaatagaaagagaggggctcctccctaactcattttatgagaccagcatcatcctgataccaaaacctggcagagacacaaataaaaaagaaaatttcagcccaatatccctgatgaacatcgatgtgaaaatcctcagtaaaatactggcaaatcgaatccaacagcacatcaaaaagcttatccaccacggtcaagtcggcttcatccccgggatgcagggctggttcaacatatgcaaatcataaacataatcatcacataaacagaaccaatcacaaaaccacataattaataggtgcagaaaaaggcatcgataaaatttatcaccctttcatgcttaaaaactctcaataaactaggtattgatggaatgtatctcaaaataataagagctatttatgacaaacccacagccagtatcatactgaattggcaaaagctggaagcattccttttgaaaactggcacaagacaaagatgccctctctcaccactcctattcaacatagtattggaagttctggccagggcaatcagacaagagaaagaaagaaatggtattcaaataggaagagaggaagtcaaattgtctctgtttgcagatgacatgattgtatattgagaaaaccccatcatctcagcccaaaatcaccttaagctgataagcaacttcagcaaagtctcaggatacaaaatcaatgtgcaaaaaatcacaagtatttctatacactaataatgaacagccaaatcatgagtgaactcccattcacaattgctacaaagagaataaaatatctagaaatacaactcacaagaaatgtgaaggacgttttcaagtactacaaaccagtgctcaaggaaatcagagcggacacaaacaaatggaaatacattccatgctcatggataggaagaatcaatatcgtcaaaatggccatactgcccaaagtaatttatagattcagtgccatccccatcaagctaccattgactttcttcacataattagaaaaaactatttcaaatttcatatggaaccaaaaaagagcccatatagccaagacaatcctaagcaaaaagaacaaagctggaggtatcatgctacctgatttcaaactctactacaaagctactgtaaccaaaacagcatggtactggtaccaaaacagatatatagaccaatggaacagaacagaggcctcagaaataatgccacacatttacaaccatctgatctttgacaaacctgaccaaaacaagtaatggggaaaggattccctatttaataaatggtgctgggaaaactggctagccatatgcagaaaactgaaaccagaccccttccttacaccttatgcaaaaattaactcaagatagattaaagatttaaacgtaagacctaaaaccgtaaaaaccctagaagaaaacctgggcaataccattcaggacatgggcatgggcaaagacttcatgagtaaaacaccaagagcaatggcaacaaaagccaaaattgacaaatgggatctaattaaactaaagagcttatgcagcctactgaatgggagaaaatttttgcaatctatccacctgacaaagcgctaatatccagaatccacaaggaacttaaacaaatttacaagaaaaaaacaaccccatcaaaaagtgggcgaaggatatgaacagacacttctcaacagaagacatttatgcggccagcaaacatgaaaaaaagctcatcatcactggtcattagagaaatgtaaatcaaaaccacaatgagatagcatctcacaccagttagaatggcgatcattaaaaagtcaggaaacaacagatgctggagaggatgtggagaaataggaacacttttacactgttggtgggagtgtaaattagttcaaccattgtagaagacagtgtggcgattcctcaaggatctagaaccagaaatatcatttgacccagccatcccattactgggtatatacccaaaggattataaatcattctactataaagacacatgcacacgtatgtttattgtggcactgttcacaatagtaaagacttggaaccaacccaaatgcccatcaatagtagactggataaagaaaatgtggcacatacacaccatggaatactgttcagccataaaaaaaggatgagttcatgtcctttgcagggacatggatgaagctggaaaccatcattctcagcaaactaacacaggaacagaaaaccaaacactgcatgttctcactcataggtgggagttgaacaatgagaacacatggacacagggagtggaacatcacacaccagggcctgtcgaggggtggggggctaggggagggatagcattaggagaaatgcctaacgtagatgacagttgatgggtgcagcaaaccactatggcacgtgtatacctgtgtaaaaaatcctgcaccttctgcacatatatcccagaacttaaagtatagtaataaaaaaataaggaaaattggtgaaaaaagtattgagataaggaaactccacagttgactaactagtggctcatttctgtcagggctgtggtattcatggctttttacatacgtggtagatggcagctatgaatttctcatcttaagaacactgagtactggtcatggtgggtcacacctgtaatcccagcaccttgagaggctaaggcaggaagatcacttgagcccaggcttttgagaccagcctcgacaacataggaagaccacatctctacaaaaaaacttataaaatagctgggtgtggtggtgcatgcctatgatcctagcaactcaggaggctgaggtgggaggattacttgagctcagaaggtcaaagctgcagtgaggtgtgtttgtcccactgcactccagcctgggtgacagagcaagaccatgtctcaaaacagaacaaacaaaaccacaaagcagtgattccttatcttgtgactttttaaaaactgctttattggaatacaattaatatgtaaactgcacattcttgtaatgtacaatttgatagactttaacatgtatatatacccgggaaatcatgaccacagttaatgtgtagtgaacagatttcaacacttgaagtttcctgtggccccttgttttccttattctttccctcctgatccttgctacctccaacccaggcaacccctgatctgttttctgtcagtttagattagtcacccagactggagttcagtggcactatctcagctcactgcaacctccacctctcgggttcaaatgattctcttgcctcagcctcctgagtagctgggattacaggtgcatgccaccacatgcagctaattttcgtatttttagtagagacagggtttcaccatgttggccaggatggtctcgatctcctgaccttgtgatttgcccaccttggtctctaaaagtgctgggattacaggcagtttgcattttttatagttttatatcaataaagtcacagactatgtactcttccatttgtttgttttggtctggcttctttcaagctagatagttattttgaaatttgtgttattacatgaatcagtagttcatttttattgtgggagctgttagatttcatcattgtaaccatggcttgtttatccactcatcttttgatgggcacttgggttgtttttagttttgggttatgacaaataaaactgcagacatttatgtttaagtcttcatatgaacatgctttcatttctcttgggtaaatacttctgacttgagtgtctggaacagagagtaagtgtaggttaactttttaagaagctgccaaactcttttccaaagtggtttcaccatttttcattttcataaccagtgtatgaagttttcagtggcaccaaatctttcttaacacttgctatgggtagtatttttcattttagccattccaataggtatgtggtagaatctcattgtggttttagctatttttctaatgattaatgatgaacatcttttcatatagctgtttgccataataggtcttctttggtgaaatgtgtaatcgaaacttttgtctatttttaaaattgagttgtttgctatttgtagtttcttgttttctgcataaaagttctttggtagatatatgatttgcaaatatgtctttcccaatctgtggtttatcactcatccttttagcaatgtctttcaaaaagaaaagtttttaattttgatgaagtccaattgatgttttttcttttatggatcatattttcagtcttataaattgtatctaagaagcatttgccaactcaaggacacacatacttttacctttggtttcttataaaagtgttactgtttcaagttttacatttttgtctgtgctctattttgagttagttttggatagtgtttgtactgtggatcaaagttttgtttttttttttctcacatatagatacccattttgttccaacaccatttatttaaaagactatcctttaaattgtgttttactaaaaatcctccatatatgtgtggttttatttctgggctatttttttccactgatccgtttatttttatgctacactaaactgttttcattactgtcatgagcttcaatcagtggtatagctctccattttttttttttaacatttgtttggctattctaagatctttgcatttccatatgaattttagatcatctacatttctacaaaaaagcttgctggaatttctattgggattttgcaaattatgtggaccaatttaaggagaattgacatcttaatatttagttttcttactcacgaaaatggcatatctctccagttatgtcctctttaattctcagaatgttttgtagtcttcagtgttcaggtcctacacatcttttgtcagatttatccttaagcatctgatggttttttaaaaaatgctatagtaaatgaaaagtgaaattttaaaaatatgaattcgtttgttgttaatatatataagtatacaattgactttcctacatcaatctggtatcttacaatcttgctactaaactcacttatgctattatcatttttgtagattcttcagattttttttacatagatgatcatgtcatctgtgaataaagacagatttacttgtttctttccaatgtaaatgtttttaatgtaatgcctgattgcattggctaggatcttcagcagagtgttaaatagaagcgatgagagccaatgtctgtgtctgtttgatatcacaggcaaagcattcagccttttaccattaactatgctgtttttgtagatgccttcaatcaggttgaggatgtttctttctgtttccgatttgatgagaatttttatcaggagtggatgtcaaatgccttttttttctattgatattatatactttttctattttagttaatctgataagttatattgatgtttgaatttgtaccaactttttatttctgatataaaccccacttattaatggtgaaatatgctaatggtgaagttagactcaatttactgaaatatttagactttttacatctgtgttcatgtgtgatattggccgttagtttcttaatttgtaatgtctgattttggtgtcaaggtaacactgccctaataggatgtattaggatgtattccctcctcttctgtttttcggaagagtttgtgaagaactgatgttttctttaaatacttggtagagtttagcagtaaagtcttctgggcccaggtttttctttgtgggtagttttttattttttattttttgattacttttctggctatttacttttaacttatttgtttgcccatgtttaaggtgcgtttcctgtaggaagcatataattgagtcttttgtgacacttccacctccctttaaggaaaaacttgtccgcaagcttatcagatgattttctctcagtttctgttggctaggattgtgtctggggcgtgggcctaaaccagtcaggcaaaggggaacaatgaaaataccatgattggcttagctgagtgcctctcaagatgtggtctccagaccggtaatattagcatcacctggaagctgcttagaaatccagattctttgaccctatgcatcaaacttttaaggggtgtggtttagcaatttgtcttaacaagatgtttaagtaattttgaggcatgagacattgagaataactagcctggactaacctatacttgtgagtagggagaagtaccgtgtactgggcagtttaggctatgttgcaaggaagtggaagggattattacctacataggtaggtgataatcttgccatagtaggactgagctggggcccaagaatatgatttttaactatatatactcttgatggagtcacaactgtgcaacacactctaaggaaaaaaaaaaatatattggacttacaattaaatccattgagatctatattttagagtccttacctgtaactggagtgaacaaactgtctcaagggcaaatcagagccgttgcatgttttgtatggtgggtaagatacggttttatgtttttaaatgatgaaaaaaaatacaaagaatgtgaaaactatgggaaattcaactttcaatgtctataaatcaattttaaaggaacacagccacgtttattcgcttacatattgtctaggatgcctttggactggaatggcagggctgagtagttgtgacagagatcatgtggcttacaaagcctgaaatatttacttgccggtcctttacagaaaacatttggcaatccctgatctgtaagaataatttactgaagaatagtacattccccaaccatcttgtataactgataaattactctaataggtgaacgttttgtctagaacagtgaaagtatgaataatgaagtatgttatttcaagaatatgtgcttattagaattgtggtagctttgttggaaagaagattactttagatttgtaattaatgtaagcttatagtagtaaggtgtcacgtattagagccagcagttttggggaggtaattcaccctccccccttttttagttaactgctgtttattcctcaagataaacctttctgtatagccctatcactgaaaatattctaaaatctaccttaacatggcatattaatgagagaagcttttttataacttgcagtgcctccgggtagtcattttgaatactatccattactgtgtaattgtgtaggtgctgaaagtgaagtcttcgtaaaacatatcttttaaagctctttgtttggctttaatgaaaaagaaacatataccaaggttagtatagatttgagacaggagaaatatgtgattatgtaagggttcaaagaatcaagtgactggcttttacgggtgtttagacttatttttaaaaaatacacataagatttgccttgtttgtcacatcatgtttaccttcattagcccaagtttacaaaagattctgttgccaaagagaaagatgaaaatgttcatttcttgacatgtcaatagagatagtaagatcatgatagtgcctttttagggctagtttagttaaaaaaaaaaaaaaagcccttgatctctgatgctgaaacacacagttagggggaaaattgttagacctttttttggaagttctcaccaggctacaggaagtgtcatattctatttggggatatttgcctgttaaaaactatttctgatactttgaagtcatcaaatatgagttctgtttctatggaaattgttaaatacatgttgctttccccagagagaggtactctctgtatacctatatcatacctataatgtagatttctttttttaaggttatacattggctcttcaaagacgttcacctcatcagagaaatccctgactcctttgcagtggtgtagacatgtcctagataacccaactcctgagatggaagcagcgagacgttccctgtgctttagactggagcaaggtaattgtgagtgtgtgcatttacattctccaactcttgtcactctcagtgctgcttttgttgctggttttggaataaacatttcaattgaaaattcttaccctgaggtgcagctgttgcatgcaatttgcttcacatgtattacacatcaagctttctcaatgtaagatgtgtttagttttgtgcttgattttagccatatttttagtttgctttagttcatattgcaatgtaggaacacacaaatttatttcttttttttttctgtttgcaaatataccagtcaaaaaaattgtcagttatcagtgctctggggtcagtaacaaggttgtgtggctgttttctaaggcagaaaacaggatttcatggggatctgagtactgaccttactgagtgtctttaacatttagttggatgtataactggaagtgctaacctttaaaaactaagaaatcttcatattgtctgtaacattaattaacttatggagcctaacagaagtttaaatttaaaaaaagggcagttggaaaaacagcaaaaatgaatgagtggtactcagttccttgctatttgatgcagggaactacttgaagctgtaattatgtaggcttttggcttgtctcttaacctctgggcatctgtttgatcctctgggaacactgtttctattccatggaccacctgcatccaaatcatacatgagcttcaaagtacagattccggagcctccagattaaagaatgatactgtttgagggtagagtcaggggagtctgcattgagaagttcaccagtgtgattctcatgtacactgatatttgagaacgctgcccatgaagctctttgaggataatgaataacatgtttggacataagacaaagcattatagataatgcttcaagagctcttaattctatgacattcattacctttacattcttgacatccttcatcttattcagtgtaactgaactcatctttagaggtgagaaatacgaagtttagagaagttcccagggttacaaggcagaatgatactcagggacagagtcagagccagggtctctctgaaaccagagtctccatacttaattagtattctgtactgccgtattggcatggtcataagtaaatatcaacagaaatctgttaaatactcggaaggtgggatgaaagaatgtattttattaacattttaactgaaatgaaacaggtgacttaataatggaaagttgaagagcagtgtagggacaaaggcatgttagggttaaaactttggtgatagatgctcatctaacagagcagccatctcagagtcggaggctgtagtattcattctgttcccatttacctaagtgactcgaagaaaactgatacggtttggctctgtgttcccagccaaatctcatctccatttgtaatcctcacatgtagagggaggcacctggtgggaggtgactggatcatgggggcggtttcccccatgctgttctcatgatagggagttctcatgagagctgatggtgttaagtgtggcacttcctcgctctttcactttctctctctcctgccaccatgtaaggatgtgccttgcttcccctttaccttccactatgattgcaagttttctgaggcctccccagccatggggaactgtgaatcaattaagcctcctttctttataaattacccagtctcaggtagtatctttgtagcagtgtgagaacagactaatacacaaaccattaaatccctttggattaactctttgaagggttatatagaccattcctaagcctccttacttaatccttgactcagtgacttatatctacattttaacatacaaatttggctcaataatttgaagtaaaattcaaattgaattcagaattagtcctttatctcaggggtcaacaaacttttttttgaaaggagatagatagtcaatattttagattttgtgggctacataatctctgtcatgactgttcaacttagccatgcccagaaaacaatgatcaatgcagaaattaatgaatgaggatgcattccaatataactttatttacaagccctgacatttgaattttgtgtggtttttcacgtgtcacaaaatgtatatatttttcccaattattaaaaaaatatgaaaacatttcttagctggtgaattattacaaaagcaggagtgggctggatttggggtactctcggccacagtttacccaccccggcattaagtcatttgcacactagatagatttacatacatataagcattatgtcatttgcacactagatacatttacatataaggttaggtttttttttcttttctaaaaagtaatcctaattggtggttgctattgagatattagactaagtgcttcattatccgattttcctttcattgatgtggagctcaggcagaatcgtgaggtcatgaggataggaactggcatactgcagttttgttcatgatgtaatttatttaaacttcctgtaaaagtttagagaacgagtttttcaaaaccaaaattagtcttttacttaatttgtatataaactcaaaacttcttttgctgtgacactaaatgtttttattccagagatccataatccataatcctgttgagataagaagtaaccaattaggttgtttactggagaaaattcttttttaaaaaattcaacttatattttataaaatatagtttaaaaaatagtcttacaactgttataagacaaatatcaaattgctgccccaatctctcatgccctttttatttcccagatatacttaagaaaagctatttgttttggttttactgtttacctctctttttaaattccatgtttatatggccattgctttgaattttttcattttaaacattatccattggcttttgactttggatggtgaagatttaattcttttacacctcacttctatattttttctctgcatgtcctttctatgtaaccttttactacctttaggggacatcagtatatattatgatagaaagttatattcaagccatgcaatattttatcatttctttttccatctaacttttttgtttttgagacagattcttgctctgtgcccaggctggagtgcagtggtgtaatctcagcacactgcaacatctgcctcctgggttcaagggattctctggcctcagcctcctgagtagctgggattacaggtacacgcaaccacgcctggctaatttttgtattttttaatagagatgtggtttcaccatgttggccaggctggtcttgaatgcctgatctcaggtagtccacctaccttggcctcccaaagtgctgagattacaggcgtgagccactgtgcccagcccatctaacattttttttcagaattaattggaaaaagacacctagttttgttgttgttgttgctgttataatttataagacagggtccttgtcattaatttatccccaaactctcttgatgaaccatccgcagtatgagacacataaatccaagaattttgttttgttactgttccttcaggcagcgccctattctcttactctacttggaactagtcatctttagcctctgaagagccatcatggtgggactttcttttgcttatcctgggaatttctctggcccctcttcagtgctatattacctgcttctgagatacaagtactttcctttctattccattaaaagaaacgaatatttctgcatttgcttttttgggagagtagagggaaaaaggatatgtggcaggtaaattttgagaacctcctgtgtttcaaaacatctttattcctactttcactcttatgcaggattgttatttgggttaggtatagaattctaggttaaaaaccatttcccacagagtttagaaggcattattccattatattttagcttcggggttgctgttgaagttcagcaccgttcttatttctgattcttatttgtgacctttctacctaaaataacatgaatattttagaatattgtcttttattcttggtattctgaaatttcatttattttgtgtgtgctataaactttagttctgcaaaatttcttgcattatttctttgtattcgtagccctccgcccttgttttctctattctttctagatacttctgtgggtcagaatcgcctagattgatgttcaaattttatatttttctctctggctttctattcttgattttgttgctgttgttctacttttttggagattaaaaaaaaaaaaaaacacatcttctaaactctactgctgcatattgagtgacttctatgtaccaggtaccattgtaggtgatggagatgcatcagtgaacagcacaggtattaagtctctgccctcattgagctcaccttctggtattcagattttcacttagtcctccagatctgtaaggtatttttatttgtgtttgtaaaatctagtggctttctatttcagtttattcaggtaatgaagcctgtctttgatcaaagtaggagaggagcagttgcctgagcaggcggggtggggagctggagggtttaggtgctttcctatagattttcagtcacctggtttttttcacttcaccacaaaactccctaccctctgtggtacttcgcacctacgattccagaaccttgctaggtccttattagtttctttttgctgtaaggccatagaacagaggatgtcaaaacccaagtctcttccgcttttcatttctaagatgttgtgaccatcccgagtgtgataattgtctcctgtcccgttcagtcttcctatggctttataagagtttgagtttaactcttactgtagtgtggttttataagagaatagggaggaattcatagttaatcccccatattgaagaatacttactggcttccaattaagggggtcctttgtcaatgatggttaattgacagatatcaaaaattatggttttgacccacactttattcataacataaagatttaattggaataatgcgagctttccatatttttggtttcaataattctctaataaagcatttttcttttttttattatactttaagttttagggtacatgtgcatgatgggcaggtttgttacatatgtatacatgtgccatgttggtgtgctgcacccagtaactcgtcattttatttttctttttgcttagacttaatttctcccttgggcagtccgcatttttgagtaacagatattactgagtgttttctttgagactagagttgtttcttttcatttgaatataaattgcccaagggaatggactttgttttgttgagcaccagttctctaattcctagaagggtacctgacacaaaatagatgctgttgctaaagtaaatgaatgtttttttgagcccaatgtaactattactactgtttcagttttggtgttgaataatttaagatgggtcggggtccttgcaacattttccttattagccacctcttatattcagggcatagactagcatcagttgaagtatcagcttgcagtattgctttcccattcacaagcatgtttactctaaaacagtcactttctacttatcttacacactttgttgcaaagtgattaattgaagtccttaggagttatacatctccctctgtatacacagaaattaaagacacttcactaagaaattcacagccatgagtaggagtgatgagaggtaaacaaagggtaaagctaccctctccttttcaccctcttcctctctgcattatgcttttgtctctcatactcttaactctttcattgacagataggtaaaagttccttaatgtgagcctggagcttcagatgagatgctgctgcttatgtaatatttgagcaaatattttcgaaacttggttcctcttttttgaccttgatgttttgaaaagaaaattcttcaaaaagtaaagattaattcctttgtaggaaatgtggagaggggcatagctgtgaggagccagaatgtttctggtgggcagagctggtcttaaaccctcttctaccttatttcctctttaccctaggccgttagcccagtctgttttcttggctgcaagttagccacggtggtaagttagccgtccctccttgtttatggagtaagcatccccaggaagccatctgagtaagggtttgtcaaggttggtttctgtaggtccatctggctgcatttctcccaagattgtctctaactgcacaattgctaatgagcttatttgtactgtaacttcttgcagggcccaggcctatttctcttcttgctgcctacatttgtgatttcatagattcctcaaaaagctttcatgatgtatctgacaacttttgaccctggacctagataacaaaacttgctaagttatgagagaatgtatgggacacagttaagctttgtcttgagattgtgagaacaagcttattagaattctgcccttctgcagaaagtttttttttctgaagaaaatgaaggaaagggatttttataagatttaattttgtagggagacagcacctgcattatcactgtttttaaaatattgctaaaaaatacgttgtcttcacaaccacaattttgcaaatggttaaatattttttaaaagatataataagatagttatttttagtgcatatagtatattcctacagatgactaatatgtatctaatacccctaattcttatagggaatattaattgacttggatctaagaaacttttttttttaaagacagggtcttactctattgcctaggctggagtgcagtgacgcaaccacggctcactgcagccttgacctccctgggctcaggtgaccctcccaccttagcttcccaagtagctgggactgcagatgtatgccaccatacctggcaaattttttgcagggtcaggattttgccatgttgcccaggctgatattgaactcctgggctcaagcaatctgcccacctggcctccctgtgctgggattataggcatgagccactgtgcttggccctaagaaactttttattataaattgcaaaacttactatcctcttttccaagctgatcttttaatattcagattttacaatttataaagtcttgtgtatcatgtagtcagcacagtcaagttacttaagttttctcagcctcttttacatttgtatttattttgtagtgttgttataaggaaatagatatttgtaaattagatgagataatggctcaaatattaggtgtctcccccttatatgtgaatagtgtaaatggcttttttggataatttacagaaagtaatgttaaaagtgaaataacattgctggaaattaaaatctcctggcatctctaaatctgcagtctgttggtataaagttaactaataaagcctagaatagaataatctttctcttttttcccccagaacactggccacttatttgagtatgcagtcttcaacaaagctcagtatcttggttggttttcctcttttgaagatggtcctaacgatgtttgctttctatttcgaggcaccctgttttgtgaacttctttttatttagttgttaatgtatgtgactttttccaaatagattaagcatctgaagatggaggtctatacctaaaattgttttttgaattgccagtgcttaataaatttttcagcatgttttaagtactgaattttttttgtgtgattgactaatttgagtatgtttaaattttttaagttgggcaaaaaaaaaaacaaaacaattttcattgaacatttggtgttgtaaatggcatcctactagccaagccaaaaaaaaaaaacaaaaaccctcaaaaaaccaaaacagagtggtgttcattaaagtgttagttctgagcgtgggggtttcagtctgttttgttcattgctgtgaccctttctgtgcctggaataactcccatcgcactgtaggtgttgtatgctagttgttgaaggagtgaatatggtggaagttttcaccttaatagttatgcctcatccctgctccactgtgattgagatggttgtccttatttctagggccttgcctagtaagtggggacatttagcagatttcacagggctattttagaaagatttctggaaatattggatgtgaaattacttcagaaatgtggagtactacatatacagaaacattcctaatgtacagattttcatttagaaattgaacataaaatacagggaatcctctttgcctggctacttatacttcatagaaaactaagtgtgtttttggcagagggtgggtatctgttttctctacctacaaatacaggtatttgttagggatcttacactgaaaaattttgtaagtgtagtttattattcaacatagaaaatctacaacaatctctttagttggttgtttttattttattttttattagatctgtgtgtattccatttctaactcgcccatctttctaacccccctctacccctttagaataaaaataacaaaactgcatagaactttcatgggtaggattagctcacttgatatcctaaattgaaataaggctaatctagggtctttggtaaattcacgcatgaggctgggatgttaaataaccaaataatgatcaaaggcttatctaagtaatttgaaacgcccaaaatgtggctcagttaatttggggccagttaataaaagcttatcttggcttaaggtacttgaatgtctataactattgaatcaggacaggtcacatttgagcagagtaggtgtacttttcacaaatagtggaggcctacacaattatatccttggctcatgtttcgctatgaccatctgtcatttcctctgggattagatactaaggaaatgtgaatagaaattaccccattcattgagtttttcttttatcttcatatggtaccagttcccaatcttattttagttgttataaaggagtgttaatgtccaaatttagctgatgaagaagaaagttgtagactaatccacagttctgcgagtgaccctttcttttgttaaaatccacacagattgaactgagacattaagcttatcaaatgtctgtcttctggaacctgtccagtctctccttgcttggcccaagatgttatctccactagctcatatttctagtctcgagatgctctgtcaaacttggaacacaaaattaaaacttagtctgtgaggttcattttgggtaagctttgtaaagaatttcttttctcactggaaaaacaatctggaatcatattggaatttttgtgcagagacagggtctcctgatacatgctatcattcctgtgtgctgaaaatggaaaatgcattgtcatagctgtgggatttcatcacatctttatgttgctttgctcttatgttcagaatagccccagtgcatttacttcagtattggcaatgatttagtacagtaacagataataagggattgtgcttctatgaaatttgcagtttcagtccattataccctacaacctgatatgtgtttgccaaatttccttaagtaatccttttttcttttgctaatttgtacttgtgtttccatgtgtttttttttcctttggtttcactttgcatttctaccatgattcgaaaagtgtttttcaaaataaacaataatggttgttctggtgaatttattattgacatgctattttgttacctatctccaccaaggaaaaaataaaacaatagagattctcccaaagtagttgtctactgctttcatactactgtgacggttgattaaatttgactctatcatagtgaaattctttttttttttttggtaggtgttggtacctgtttcttgggacctctacagaatagtcaggtttaaagcaagactttctagactctcttttctgaaacactggggcttgatcagatgattacaatacatgaaatgtgttgagtacttattaggtacagtcagtgctaaatacagggtgcagtggcaagcaagatgagctcagtgcctggccttgggaacatgcattctgatgcaaaaaacagatgacaagatagcagttctttgttcttcctgtcccataaaagaagcataatgatgcgaatggcagcctgacccaggggtatgatcagaaaatgatttcccaaagacgtgaggcatcagctgggaccggagagtcagtgggagttaagccagtaactctgtgtgtgtgtgtgtgtgtccgtgtgtccatctgttcgtccatccaacgggaggaggaggtgaggaagagtgtcccaggccttttctgtcactaggataagccataactcaaagaagagtctttcagtctcagagacattggagaggaaggatagcaatagcatgtggaaaggccctgcagtgggacataatgtgaggaaacggcaggctgttgtggttggggtgtaatggagggaaatgactctaaatgaaactagaaactagacatgtgtgcagcgtcttcagggcagttaaagattctggattttatcttaaaatggttgaaaaacctttgaataatttttagtaaaggagtgatgtaactgaacagctaagctacaggatattacctgaattgtcttagaaggcagagccttttttggaaatctggtgaactgtggagagtgaaatggtggttttagaaattctttggaacatgggtaaggttaggctttagcaatttttaagggagagtcttagataaacttgggaatgttttcttctttttcattaatatcccaaatttcttatgtgactaatgtgagaaatggtagatgaaaatgtggccaagttctcgtgacacttaatttacttcggaaacataagggtttgatttgttgatgttctcaattatttataatatttgggagctttaaacttctatatagtaataagtttaatatatttgagttttggagctcttgtcaatttgtgagtttaatttttttctactgtcatagttgtaaggttgtatttcaagaaacagtgtatttaaatttactaggcttttgaaatgcagatttgctgtcatcgggtgtgtcctgtacttgtgtatatgtatttgcatatgcatgctcagtctggtcttccatttttatagcattttcagataaatgaagttggatcagtaaaaggatacctgctgggaaaacaagcaattaaatcataagttttttggtcatttttaatttcttagacatattgaaggaagaatggacagggctaagaaccaagctgcttctctgaaagttggccaaaggaatctaccaaaatgggatggaaaatatgagagaagtgaggggacaaaagaagacagacccagaacctctcatgttttaacaggagttctagaagcaggaacgtactgaacaaaggaaataatcagtaaataatagaagaaaatttctttgacagatcctcaggatgaactaagatagatgaaaaaaagccatgcacctagatctcctggttattgaatttcagattttccagaattaaagataaactattccttcatttgaacattattgggagtttatctatagtataacaaatttcagacattttataagtaatattggatgctagataaaaaattaatattgtctttaaagttttaaggaagaaagttattttcaaactataatcctgtaccgaagcaaataagtgtaggagcaaaagaaacttttgcttatgcaaagtctggattttatcttaaaatggttgaaagttttaccctttgtgcaccctattttaacagtgggaaacgtacaaggaaaaaagatcacatgagatctagaaaacagtagcctcggagatgacctaggagaagctgagaaagatgaagatgaaataagacagtgattgactctcaggcttgtgatgttcttcacctggtagttgtgttctagagcagaaaaattactttctttaccttggtcctgtcgtatctagtgatcaccttatagctatcccaatcacagctataaaacagaatgaaaatccagtaaaccttgacagtgtaaaaatagaactgtcaaatctggagatggatacggagaaggtgcatatatactaaataacctttcatggtgggaaatcagataccaacaaggcgatgattggattttctattgtctatttaaagttatatactaattatgtaattgtattgaaattatgaaaaacaaagtggaaagtgggcctgggtggggaaggaaaagagactcctgttttaggcctttaatgtatattttagtgttgttttgtgtgcaggtattttaataaaatcatgaatgggttagttttagggccaaagatagttttcccttggtcagaactctgaatttgtatatttactttctatcgtctcttaagattagtgggtcagaggccttttctgttactgggataagccataactcaaagaagagtcttttagtatcagagacactggggaggaaggattatacaaattctcttctcatcactcttccattcaataactgacagtgctttctaaaagcttggatttgccaccacactttacccagtcataggcgtgaagactcttagtaaaaatctagtctgtcctttcagagggagggccctctgttttcagcatgagattatttagcctatttcttcatgtaattagattctgtaacatattgcttaccttacctcatgatttcagtgtagaacctgtaagttattctagctggttgtcagcttgcattgtggctgtagtctaaattggaagcagccgtctgtaatctgtttgacaacatctcatcgttgccaaattattagatcagtcttcttctttgttcttttaagattaaattattaagtttgatttaaactatagcagacacacagacctaaagggaaaatggcttctataaaagggaatttttaaacatgcctttgaagtgtaattactactacattttttttttttaaatctccactattaattgcagatgggaagtcagaagatgacttgtgaagttgtagcagtcactctggtcctggataatactggatttgatctggtgtgcttaaagctgttgtcttatcttcagttttgaccaatgattaagtggaaacaagttgatagtcaagataacttcccctttctgacctttatgtttcagctctactttgagactgttgtcctggttaaagaagtcccgcagaaggatccgataatagtcatgagggaagagcattagatgtgtgatcgtgcagtgggttaagatctgagaagtagataaggtctaatcctttaattatgattagatgccttatccattaagattatgtttcctattaaaacctaagaaacacttgaccttttaaacttagtgtcaagaataattataaaactctgatttccgtggaataaatgttattcagtagtactccttatgcaacatggtggaatttgtaactctcattcaacaaatatttatgaaacatttacctgccaattgtcaggagtatacaactgctttgttacttttgaactgaatatattttaaagcttaatcctaatatcaaaagtgattttcttcattaactctgcatattaattacatatgaactaatgaactcttgcattgggtatttcttaaagatggtatataaatcatgttttaaaaatattacattttgagtaaaattggaagtttaaagattgagtatctgtagtatcctggtatcataggtactcatacatatatatgatggttaatgatttttaagttattacattcattgtcatagtttgaatgaatgggaactgcaggaaaagatacaaactaactttctgataagtttttcatagctaaatttgaagactgtgagacttgggtataatgactaacttactttgattgaatcgtccctaagactaccaattaggtgcatttagtagttcttcaacccttcttatgtaaatacactgacaaatacattacagttgaattctctgtatttcatgcatgtctgggaaggagtactgtgaacatctgcttcaaagtagtaggacttcctagaccccatatgcttgtttatcaggtcgtcaagcactgtggagaaactaatgctactcaagtttacccaataaaaaatattggatcagataagctgcaagccatatgttactgctccagaagggttgctcaggttggagccaagtcagcagcacttacctactgtgaacttacagcctttccagaaagcttgtatctcagtctgtgcagacagagtttatgagagtgaaccagtaaattgctgtcttcaccttggtttttgaattcttttgttaaagtttagtgtaaacatttgagcacatctgtgtgccaaggatttctataggctctaaatacgtaaagatataatatcacctaagaagtttatacctgagaggatggtttatggaaatggagattttcctgccctggtggtttatgggtttgggtcagaatgctgtgttctcggtaaaactccctgccaatttaagggagaataaaaaattcttaaaggagctgatgtttcctttaccttcactgatcttaggccattcggtaactggtatttataaaggactagaagttggattcctctgtttggcttggaactgaggcttgcatgcctgttgtataaagaaagaaaaaagcaggatttgcttcacttactttttccttattttccagaactctggtaatgaacatcattaagagtcaagataaataagtaagaactgttgacctatcctgaccaagcttttgaaggtcagacagttcagttttgcttctgagttggtaacaactgagcaaagactaagtcgccatagttgtctaggtagatacagtgtaagaagccggcccattgttttgagaagactaggttacacttctttagaatcaggaaaagtgaaaagtagaaaactcctacagaatcttttctcctacctagcttctagaacattttctttcagaatgtagaatgttggctgggcggtggctcacacttgtaatcccagcacttttggaggctgaggcggatggatcacctgaggtcaggagtttgagaccagcctgaccaatatggtgaaaccccctctctactaaaaatacataaaacagccaggtgtagtggcacatgtctgtagtcccagctactcaggaggctgagacaggagaattgcttgaacctgggaggtggaggtttcagtgagctgagatcgtgccactgcactccagcctgggtgtcagagtgagactcagtctcaaaataaaataaaaataaataaataaataaataaaaaagaatgtagaatgtttttgctacaacttgctataacatttcattaaaaaaagtattaccatttgtgaatgcttgctgcaggctttcatcctgtacccatgaaaagcctgtttatttcttcctacaaacataactttttttcatatgagaacactgcaacatttaagatgttatgatttgctccaaatttcaaagctagtatgtggcaggatgaagactggaactcgggcatctgaattcttactgaagtgtcctttcagtcttttcttggtctttattacaatatgttatggaaaactgtagtgaagaagtatcctgtcagccatcactgctgtgtctcaacacctgatgctatggttccagccctgcacgtttttctgagtgactattataaaactggtaatatatgttagcccggggttgacacactatggccatatctgtttttctgcctgttctgtatggcctaagagcatttaaaatgtaaaatgttaaatgccttttatgttttttaatggttgaaaaaaacaagaatatttcataacccatgaatattaaattcaattctcagtgtatataaattaagtgtatctatgcttctataaaacattttcatttcagttttttcaatagctgctttcataccataatgtcagcattgagctggtgtgacagaaaccctatggccagcaaaatatcagctggccctttacagaaaatatttgaccactgttagtctgtggctgtgctctcattttggacacagccttccagaccccatctaactcttcttctcaggaccttccctgtggtttctaaaatctccagtggaagattatcttcagtcactggggtggttttttttttcctcttaattatggtaaattcctcttaattatggtaaattttttattttgacaacaatatgactctcacacagccactctcaacctgaacctgtaagacataaataccctttacagaatgataaggcaggcacacgctaacattttcaatctcagctcttgtgttgagattagaattgttccagagatatgcttttcagactgacccaggcagtcactttcatggttaaccattttccttgtttccagtagtggccatcctagccttttactacatgaggttctttattccagcctctggaataaatattctcagcatatttattgcctgtaacttacagattaaaaagccttaaactcaccttcctctccctcattctctgtattctgtctttacctccctgtttcagaggaagtgagaaccctccctttccaaggctgttccccctagctaatctctgtcccattcctctcatctccaggaacttttttccatgcttttctttttccttagactcttctcttgtctgttatttctaatctccaagtctccttgatcctaaaagccatcctcccttgagccttatactcctcaagctacagcccccctctttttttaaacaacaacaacaacaaaacaacaacaaaaacatttatagccaaatctctcttcaaagactttttcctcaccttatatctgcctgacctgctaacactgatttttccttatgtcttctgctgaatctgctctcatcagtggcctggttgttctagccagtagcctctttttagtccttatcctacatgccctccctgagtagttgccactattaactattagctcccatgttgaaactcttctgcattagtctttttttttttttggttgggactggatgcatctttgagcctctggaattctcctccccaaattatctttctcagtttcctttactcattctccatctgtctactctaaattgttccttccagtcccttctcttttccttgtgtattttctccttgggtgatttcaatcatgcttcatctaacacctatttgttgatgtaccctgaatctgtttgtctctctagccctcttccctgaactccaactccatactggacacaagcatgtaggcatttccagtaaccatcttgagttcaactaattttttttttaatctaaacatgagtatctcatgctctccatgtgcgatggcatcagtgtcttaagaactaaagcattagcttcggtctctttttttcccactccctatattcattgggttgccagatagctgcacttcagctcaaatgtggctcattgaacctattctcaccaaattttctgcttgtgcttttgttcaggacctcatgatgtctcaccaggtctatttacaagcctcttaactggtctcccagacatcagtctccatgcccatttagttcatcatttctatggctacttatgtcatcttcataaaatgtaatctgattatgtctttcaccttctcacagtcaaaacactaactgttcattaaagtataaactgttcattaatgtgtatagatatgagacagtgcaaaacccaaacctaccaacctctccagccctaactcttctcttataccctatgctttagtccaaacgtttgccattccctgattgtacactgctctttcatgtgttcttggtttcatatgcattacttctatttagaatggtatcatatcctgtgagataagctcctcaaccttcaagggccacattaaacttaatgtctcctgaagtgtttagattcccccagaaagttaatcattgcttttactttgctctgagtgtactccttatggtgcttttactgcacttacaatatgacatcatattccaccttacttgcctgtcttctgtagtagctggtctttagaaactggagtgggaaggagaggagaacagtcaccatatcttattcatgtcagcacctggggcatctgatatgctatagccacaatagttagtgcctattcaaatgaatagagaaatgaatttttaaaagtgggtgggagtataggggccaggcagacttctcggaatgactgtggagcagggaaatgccacatgctgtgtgtatctgtggaagatatttaggtaactgcttggagactgacctttgaagttttttagtatctgttgccaaatgttgattaaaggaatgactctagatgttgtaaacgttgggcatctgaatcattctggagcactacacacacacccacacacacacacacatatacacatacatatatacatatacatatatatacacatatatacatatacatatatatatatttttttctcaggtacacggcattacttatgaagatttaaataaaaagttggccagttccacaaggcagaacctgggttagggaatgagggagaatataaatttggctagctgggaagacagccatgagcatggatacaaaaccatgacttatttagaaaataggctgtgaattttagtgaaacagacctaaagtttgctgctaatgagtttttattgggtttgctaggtattaagcctagctattaagcccagcatgcattaagtatttttcctaatgctgtccctcctcctaccatggatggagctagaagccattatcctcagcaaactaacgcagaacagaaaaccaaacactgcatgttctcacttataagtgggagctgaacagtgagaagatatggacacagggagggcttgttttctagaataacttctgcctgatgagaaatgtggctctcctgttagaactcactagaaagagtgagggtcctgacctccagggcttcctcacctaactgaaaccaagccagatgccgtgtacagtagaatgtatcgaaatgctaccaaacggcccaaacagaattgcagccgttttgtaactctttcttggattgcaggaaatggcagcatttccagaattcggtggcagctttgttgccttcttgcatggttttccaccggttagtgtgcttggcataatccttccttttaactgtgcgatgcagtgctgtaggaactaactcatcttagtgtcacctgtttaaccacttttccatgtttgttaccccagtcacacagatcctaggccttagtaatataacatcatttagttggaaaccggaagattgatataaaattcagcaacttagtagttactagaaagtattaatgaagtgcttctccaggtatatttttcaccgagattttagctggtttgaaacatctaattagactattatgtgtcttcagagttaacagaattatacttaagtttaaaaaattgggcaaagtaatttatatgtcaggataggagtggtagaatggtttgagataaggaaatattagtcaacttgccaaaattttgaccacatttagcatttattgagtgcatactgtgttccaagtcttatattaggtactgaaatgactgtagtgagaagaatgaaaaggattgttgccagaatatgttatagtgttgctttatttttgaactctttagtttaatgcactaccgaccttttgagtcttctaagatattaaatcagttttttcttttatgtgaattaagtaattgctttcttaaatttgattttgattatgtgtagagacatgtctatttaacaacaatttgaatactttgagtctaagcaaagatgatcaagcaatggtaggaatgtcattgtttctgggaactttttgttggtcacagaataattttcagtgtgacaaattaaagaaacttaggttgttccttaaacccattctgtcgtctgcctttttatgattttcttgattttatcacgggagcatttatcgaatctagtttttttggtcatactttgcttaatggtatacaaaaataactacacagatgtgttataacttatcttttcagtcaagcaactttgaaaatgtacaaaaaataagagaccgttagtcaccctcaacttatatttttgaaaaaaaatgaggtatcagtctacaatttagtactttatcacattcattcagtagaagatgattgtcagacaagggaggtgaagtataaagtttaaccaataagggtgcatccttagggtagcttcagagacactgtagaggtgggcatgagataaatgacagtctgtaagggtggtagtgaaatgagctgaagtacctttaaggtcttgcatttgatgaaaagcccctgcggtactttaattgatgagagtaacacagttaaaatacatgacattcagaacaggtttgctcagggcagtgttggtggctggaagtttgttgaagagcaggttgcagtaatctggtgagaggtggtgagtggttaaggaagttgcggtagaactacagagattatgcagaaagaagtgtcctgggaggcagtttagcttaaggcatttgggaaagaaaactgtgccaagtatcgtacattgattcagtgtgtagtcctgtttggggccagttcgatgctattctagggattggaataaaatgaaaaaatgcatagtctatgccacttccaagtttgcgaaccgccccccccccctttttttataaatagaactctggagtaggagtatagggaaatttaactgttgttcaaaaatggatcacccattttttctcttttggcaaaattgcctcactcctttctttagagctatttcggtcatcactgagcctcttgaatcatttcacatcattttatataccaaaaatccactgagataattggttgaaaaagataaaattgctcttttttacaagttctttttgtttgttttattctttataaaagtgcttcctgttacaattctttagctatgtactgaagaacaactaggatgtgatagcttccactcctgtcctcctcctcctccactgtaaccttgggcactagtggagcattattgttttgttagcctgcctttacaataattttcctcccctttctgaaaagcttcaatgctaaacaacaatgtagagcattctttcttgcaatagacgctaattgtgttcctagttgggatcttgctgtcatagccacaataactgtgtcaattgtgcagggaggctgggtcacagtggttattgtgcagagtgatgaatgctgcttacttgtgatgtgctgccgcccgcatctgtgggtgagaacacgcagttactgtaatttgcctggcaagtgatcagactggtataaaataacatcatctgttaggcaagatagcagtcacaaagaactattggtcttttaaaatatagaatttttaatgagaaactttgaataatagagattgaacatgtgagaacagctacctagtgtgtgttgcattattaacccctagtttgtagtgtattctggagtcaagttgacctacatagaagagaaggaactggaagtgcatgtctgtgttctggctccgattgggaaaagctgcttaaccactgtaagttacgggttggataagtgacatatacgactggtgtcaattggcaaccaggcttcacagtttcatgaaatgtgtggattctgaaagtgttgtcattgcgaatgtggtttccttgcctagttcttccacatacttaaggaaaagatatttttaatgtaattgttagaatgtgttggtacgtaatgattctgaagtaaaaggaatttttttttttttttttttaagtaaacttggtgttttgcaaggatctgaagaatcccagtttggagctgattattttcttgactgtccacatcccacagttttttttttttctctccatcccactgcccattttaaagcacttttcagctgtctgattgctcattagcattgctcattaaaagtggtctgggggcatgcatttcaaagcagtccttttaatacttggtttttcaagttttgtcaaattcccagtgaatacaaaccaagttatttcttgaagtttagccttgtttatattttttatattattccttctgcttagtacatgtctaaatgattacttttcagaaaagtgaattttgcttagcgcattgatttgtatctcatgagaggagagtaaatcatgtttggtgtgacttaagcttttatgatttgggatttgtgtgtgtgtgtgtgtgtgaccccaagaacatggagatacaaggggtggtaattttggaggggagaagtacattaattagacaagtgaggtaatgtaagaatgagatcatctgcccatggctggtgtaattcctttttgttcattatattaatttaaaaaataatattaaagtaataacatgtatattcctaccttgaaaagctagttatataaataatatgtatgtttaatgcagataatttggaagttttttttaaagaaaaaatccgagtgatcaccaatagtctctgtaccggatagtcattgttaagctctggtatagacacccctctgttactctgtacactgtttttcctttaaaccttgttttggtctcaaggccatttggaaacacaatagtcattctaagtcctcccataatccaatactgaatttacataaaatgttttttatcaacattttctgatattaactgagtagaaaaaatatagaattacatatagttaatattaagaacatttcccttaattcctaaagattaggaagattataaacttgagtttttcttttgacactaatccttttttatattgcaaaacactaaatccttatgtggaaatagaaaattgaaaacatttctaacgtagaaactcaaaataaattttcattattatacaggcatgttggctttaatcaaagtaagattgatttactttttaaaaatggatgtataaataggaccctaattcacaaattgtttattttgtatatattttttatttagataagtggaagtcagttaagatagtcctatgaaaagttgctttgtctttttttttttttttattctcttccctttctccttctgacaagtcaacatatgcttccatatagctaactgctgctattttctgcttctgtgacagctagccgatggcggagtctcttctcttcaactgcctcactggcttttccttatagtcctgttgcaagactcagcccttatagcaatggcattaatactcccagcttctctaaaacctcaaataaagcaatactaacacctgaaaaaacaggtaatattttaacttcttgactagctgcttgctttgtaattcagttactaaacacggcttaaatattcatctttcatttgaaaagcttgagaataatcttaagagtggagagtttgtgctgcacacttactttgggtacaaaaggcctagcactaatttgtactctaacaccattgatctactgctctcaattttatgtagcagacagtcttccctctttagcaaaagtatatgcatgcagttctgtatttccaaatgcttatgtgcttttaaaattaaatgtcaaacacaattaaggtagtttttattattcaagattgtaagtctgtattttttttaatttttttctggtagcttttaaatttagctaaggctgtgtagaagaaaatagtcatagtggctttttatgagatgaggatctcaccattttcttatttttctcagcattggtatgattccattcctatagccttcttctatttgttctttggttcttttatctgaagccattgatttttttatcctcatgggtggctataagtctcccgtgactactctctggtctatattatgtgggtgttgtatatatttctgcatatgtatgtgtgccttttagatgtgatattcttacccatttgtagcactgctgtttgtactcattaagaaatggaccagattaaaatttaatttaaaaatatattatcagttactgtcagacaagtgtgtcttattattaaagtatacatgaatatatattcttataatatcatgcctttagatatatacatatctaataggatgtagattttagcagtagtgaattttttattgtgataaaaaatataatgtgaaatctaccctcttaacaatttaagtatatagtacatggtgactttttaaattgtgaaaattcaatttgaaaacaatgaacaagtggttttgtatatatgaattgtgtacacatgatgtgcacgttgaccattaaatggtgacatgttggtgatttttgtaacatgaaaacatgagacaaattgctgactgtttatatatgaattgtgaagcatgtatagatatcagtcctgcagatggaagaacacacttttcctttgtgtttcaggttacacttccaggggctccccactcagtccccagtcatctatcgacagtgagctgagtacttcagaattggaggatgattctatctccatgggatataaattacaggacctcactgatgttcagatcatggctcgtctgcaagaagaaagtatgtgttctttctaaactagcaaaatgaggcttccacttggaatatacaggcagagggggaggttcaggcatttctctccaggtaatgggcaaataattagattctttctctcatactgtcctactttttaggtggagccagttatatgcttctcacactatcatgaggtggtaggacttagtctgatgaaaacacattgatacatggacattgctggtattgtcactgtggaaacagatggacagtttcctaaaaaactaaaggtgcaacttccatgtggcccagcaaactgcactcttggatatttatcccagaatagtggaaattcgtgtttacacaaaaacttgcacgtgaatgttctgagcacctttatagcccaaaactggaattagcttagaaggccttcagtgggtaaatgattaaaccaatcatgttacatctataccatggagtataactcatcaataaagaggaacaaactactgatatacacaacatcttgcttgaagctccagggaatcatggtgaataaaaaatttgatcataagagagtgcatactgtataattccacacatataacattttgagatgacaaaatgttaggaacagaggacagactagtggttggtggagttaggtatagggcttagggtctcaagagggtctcgaagctggatgtagttataaaagggcaacacaggatttttgcagtgttggtactattcattggtggatctttgaacctgtaggtaatgaaattgcatacagcttaatactctctctatctctttctgacacagacacacacacacccccacacacctgcgataatctgaataaaatgagtggattatatcactgccaataccctggctgtcatattattataattttgcacaatgttaccactgggggaaactgggcaaagtgtacagttttgtttttttttaagcactgcatgtgagtctacagttatcttaaaatttcagttaaaatgcattgacatacttctccaggtaaataattgtgaaagagtagataagtagaaataggatagtttttcactggttctgcgataaagttacaaaaaattatctgggagtgaactagttgaagggcattaatggtatcaaaaggcacagaactggagtgtttgttttggagttatcttttccaccaacataagtagaaataatcaagtatcatttaagcataataatttcctgttttcagaattagtcaaggcttctatgagaaacatggtaatgcttatgcaggatttaatagatacatttttaaggggaaaagtggttattttatataattatttagtaaaagcaaatttaaatactctttctaaaaatatatatggctaaaagattgtatgtcagtttcagaagttaagtagtcagggatagaccactttttttaaaaattgtagtactggcaatgggttaaataatgagaactttgtagtttgactatttttagatgattaccttataggatgacctaaaactattagaagtattgaggtgtcagtgtgctttgaaagagataatattagtaacataaaagaacaatagagagatgaccttgtgggaaaatatttgtacctcggcttttaaactttccctttgactttaaaagttgggggtggggagcagaatgacttcctacttgggcagagatttgaagattttagttgttttaactcatagcaaactattcataatgagatgaatatttcttcctaagttccccttctaaaatatctcttgatttgaaaaggggaaattgatagatattaacgaatgagctgtggcaggtatatataatcctcactggaattggggcaatctttttgcaaaacagaattgtccaatattagatatctgtttcataggtaaatgtgattattgtcttggtaaacttgtcaatttagtaaacttgagaacaagataataagtctctgtgagtaatttatttggcacaatttttcatctaatacttggttaattataactaaatgttagctagatcaaaatacattagagtactatttgttattttataggtctcaggcaagattatgcttctacttcagcatctgtatcaagacatagttccagtgtgtcattgagttcaggaaaaaaagggacatgtagtgatcaagaatatgaccaatacagtctggaggatgaagaggaatttgatcatttgccaccacctcagcctcgtcttccaagatgttcccctttccaaagaggaattccccattcacagactttctccagcattcgggagtgtaggaggagccccagttcccagtattttccttcaaataattaccagcagcaacagtattattcacctcaagcccaaactccagatcagcaaccaaataggaccaatggaggtaggttgtatgcttttttggtatttgatatgctttaatttttttatatgtggtcaagaaatggtttttgtgtttttgtttttgtttttgagacagaatctgtctctgtctcctaggttggagtgcagtggcacgatctcagctcactgcaacctccacctcctaggttcaaacgattctcctgcctcagccttccaagtagccggggtacaggcatgtgtcattatgcctggctaatttattttttattttttattttttatttttagtagagatggggtttcaccctgttgaccaggctggtcttgaaccactaacctcaggtaatctgcccgccttagcctcccaaagtgctgggatgacagccaccatacccggccaagaaatggttttaagagaaatatagataattggtcaatgtttctcagattaaaaatcatcctccagaccttctcagtttggtctaaatttgcgtctctaattgactggcttctgattacgtgtcccagatttataaacgcacagcctcaagaaaaccttcatgacatagctggctcggaatgagttataaatgtgcggcatctctgcattgttgctggtgcctgtggcagaggcagggttgtacaagctgagaagtttgtggtcaagcccatggaggcaaagtctgtgagttgtcattccttaccttgtccacagccttcagtctcttactgtctgttcctagcacagagtgaggttgtaagcatgaatgatgatgcttgcagaggatgctgctcttacacagccagatctaggcaagtttgggatgtgtctttccctctgatctcctgacatctagaattaagatctgtgtagcagcaggaacatggaggttgctttccattagcatttgacagggtaatgggaaattgatctgtcttgtcaacatggtgggttgctgtctgtgtcattcgtttattctatctcttcatcatttatctttcttccacacttgcagaagttggactctgacttctaagaactatgggagaagcaatcatgtaatattctaagcctgttgtgtttttgtactaatgatcacctgaaccctcacacataaattctatatattatggagaaacaaaccaataaaaaaatttataattatacaattacagttcttaattattatatagcactatttctcaaagctgggtccagatgtgatcaaatggtctttaaaaatatttataggccaaatataaattttgtattagtgatcagccataaccctgtatttagtttttaccctttcttcctttatactggtatcattcatgctgatgctaattaagagatcatttggaaatatttaaaattttgtatttgtaatttctcttactaccttgagatttcaagtttaaaggagtggtggctaaaaaatgtcatcatgactaacatattaaagctcatagatcagaaagacaatgtattccatgtgcttagtggaagtcataacatcttattaaaattgagagggcacctagagttatttctctaaagcttttttttttttttttttttttttttacttaaagtgttttagaacatcgtagtcaagttgccaagcagatgctagctctgcatcttgattgatattgtcaatgggatcatttttctccgcttagctgtttgttgcacctcagaaaagtggtattcacttccatcaaacaccgtttgaaaaggattaggtttctgtgaatcctgtgctgggatactcttcacaggaaagtggagacatatcacagtttaggtccctttatggtagttttattttgcctaaaatgtctagttttcacaatacaagaaaaatggaatacaaaggcaatcttctggatatgacttctgactaattagcttaatggttgagagcagaggctctgaagtccagtagatcctgtgtttctcaactgtctaaggttcggtttccctaactaaaatgtggacaagatgatatctgtctcttaggaaacttaggtataatttcacaccaaaccatctggtacacattttctccacctaaatatattataaggaataaatgaaataatgaatgttacattgcatgtagcctggagtggatgtgctaaataaaggttgtcttctccccttttgtttttaaacttttattaacatatgattcagatgtcctagcctgcatttgttactatagaatattgagcaaaaaactgaaataagaatggtaactttgaagctaatctattaaatatttttctaaattatcaaaataatatagatagaaaataattgtaaactgttgattcattttaaaataattgagaataaactagaaatgtatattaatatttactgcttttgtagttcctacactgcctagatttaaagagatggttcataaaactttctgggatatttctgagattcatagaattaaaagaagcataactggaataacttgctaaatatcaaaatgactcaacttgtagaatctttaccaacttttttataattctacggtatggcaggggttactggaggcatgatgtagtccttattatcatgaggacctcccctggagcctgtgttgcctggatgcctagatctagctgtttggtggacaatgagtgtctcctttagtcctaaagattcctgagtctttgttcatagagtgatgagtcttgctgcctctttaatgtgagcaagctcatttgaattctttacttggtctattcttccagtttcctgctgcatctcagcccttgaagattaaactgctgatttcttgtgaagatagaactagaacattacttttggttccctgaactttaaagaatatgtggttattaaaacgttccacattgtttgacaggaaatgtacctcatttccagatggtctgacacaagttggagatcacagctttgttccaaggggaatagtgtcctaaatatttacacttggaagaccttatttttaagagcatatttcaggattaaagctttgtgaaactgacttgttgcttaaatatgagtaaagattggttttaaagactaacacagattagaggcatagccaaatgtaacgtatggaccttgattggatcgtggtttagaggaaaaagcttgtgaaagatattcttgggatgtctgaaaaattttgtatgcagattatcatatgatattgttaatttgtttacatgtgattacaatattgtgattccatagaattttctcaggagatcaatatgcatttaaagtgtcaagatgtctgaagttttatcttgtttagcaaagcaaacaaaagtacatgtggagatgaattaaatatggcaaaatggaaacaaccagtatagccaggtggaaaaacaggtgtttatgatactattttttaacatttctatatgtatgaaaactattatagtaaatagttggagagagattttaaaaagaaatatagaagctcaattaattttctcaatagcatataattatgttcctgtgcctccctgctgcttaaaaatatatgtattggaaatatgtatagtgaaaatagtctagtactgatagaggctgtcttttttacaccagtttttgtaatagtcaaaagatctagatatggccactaagattatgtagagatgaatccttctaattcctcccttcttactacacactgtctgccaaatcatacacataatatttgctgatatataaagtacctgctctgtgaggctgggaactttaataggaatttgggaatacgagacgtatgattgttaaaaataggcatcaagaagataatgaggaaaattgccaaggaatctaacagtcagtggcaatatttgagcatccttactctagaactacacacagaaagtaatgtgtgagaggtagatacttccagctgggaagtccatagaaaagcttctctatggtggggataattgtgccaattcttaaagtattagtaagacccacatgagtaaaatattcttttgtgctttctaccatagcactctctacaattttttatgctctcttattatacatattatctaagtatacttattgtgcttgtttaatcttctgccttttccaccccaagggagcaaaaattgctggacatggcaacatttaataggtgttagtaatgtcaaaggagtagtgtatgaaaggggaataagaagagctgagtttgattttgacttgaatgccttttggattagcattcaagtatatcattattttctggttttgcttgaaagaaaatgaccacaagattgaatgctctgatatgtgcactttagtgttttgcggtatatatcaataaagataaaaatatcttgtaagttggaggggtgaaaaaaattttagatattacaatgatttatgatcttccatggtttacccctatcaaaatgttaatctttaatatttattttatttgggaaaaaatttaattttaagtttaattaaatttattttagattttctctttaggatcaacaatgggtggggaaggattgagaagcactggtctagactataaacctagaccataaatcttgactataaactcaatgagactctggactgtatctgcctaatacactgtggtatccccaacagctcacagagtgtctggtatttagtgtaaacacaatagatgtttgttcccttgttcatttgttccttctccaaagtgaggttgggtgtccacatggagggaccagcctgctcacaggtatgagagagttcacccctgtggtcggggagcaggctgagaggccaggctggagaagtataaagagcctgggccttgaagccctcatctgggctgtgctcaggagcttggcctttcagaagagggagcaggggaggaattgaggagttggagggatttcagcaagtgggtgacgcatgctgtgctctaggaagagtggaatcgagtacttgaattagttttgtccttgaattagttatggcttagtactcgtatatatgctttttttttcagtttaaatgacctgacataggtactttagtttttgggggatgtgtattgatcaaggaaaaagtgtctcatagagttgtggtcttgtggctggcttatttcacatgtgttatttcacacatctcaacattgagatctgtatgtgactctctgctgcctcttggtggcagaagatgaacttagcaaggcaaaaaaattgaagcattctcttggtcttttttatctgcaaacatttggtggcgtactcatgaaagttaaaactttccagagattaatgtggtcatgttaatgtgatgagtggatatttcaagacatctgaagtttgaattttattaatttgttccattttgatatggtagcaaaagattcagtaaatgttggttttgattcttctagggttcttttttttttttttttttaagaagcatgtaacttaatttctagggttgttttggtaaatttaatggctataagattattttctaactttttaaatatagttttagccacttattgaataggaacagatagctaactgcttagctagtccctaagtctttttatagaagtttcgttctcctttaacacattgtattagttagggttctctagagggacagaactaacaggataaatgtatatatgaaggggcattgattaaggagtattgactcacacgatcacaaggtgaggtcccatgataggctgtctgcaagctgaggagcaaggaagacagtcggagtcccaaatcctcaaaagtagggaagccgccagtgcagccttcagtctgtggccaaaggcctgagagatcctggcaaaccactgatgtaagtccaagagtccacaagctgaagaacttggagtctgatgctcgagggtaggaagcatccagcacaggagaaaggtgaagtctgctccttctgcattcttctgcgcttttatcctagccatgctggcagctgattagatggtgcctatccagatggagggtgggtctacccctcccagtccactgactcaaatgttaatctcctttggcaacaccctcacagacacacccaggagcaatgctttacatccttcaatccaatcaagttggcactcaatattaaccatcacacatgcttatttggtgggaacccttctggttgggaagggtgttttcctgtacaataggttagaaagcttgatcatcaacatgtaataatttgtatttattattgagcacaatatgacttttgttatttgcttttgaaagctagtactttggttgcataacatctgtcatttttaacttagtaaaattcttttccagataagctccgaagaagtatgcctaacctagcccggatgccaagtacaactgccattagtagcaacattagttctccggtcaccgtgcgaaatagtcagagttttgactcaagcttgcatggagctggaaatggaatttcaagaatacaatcttgtagtgagtataattatttgatataattatatattgtataattgtataattttttataatttttaattgtaaggaaaatgtctgttttatttctttgtatttacttgaaagaacactaaacttttttccttgccgtgtaacttatttttttatttcaccattagagttgaatagtatttttactattcaaatagtatatttactattcaacttaccagtgcctgtggtataaattacttaccagtgcctgtggtatcaattaataatagtaaattgttatttgtataataatagtaaattatttgtagtcctttatatcctaggatagtagaagtactacatggtgattgatttatccactcatcatacaaaaattgttttccttgcagatcctcctccttctagctgtctacctgaataagcacacttaattctgtttagccgttccttttgtcttgtttttcacctatgcatacttttgtctttttccccctaaatgaagttatattttagagtgtctaaagtagtttttgtccactctatttagcttaccccacattctgttacttactttctatgttttacccagcagtgagtgacacagttagcattaggcctagtgctgtgtatcttcactttatgtggggatgtgctgcttcggcatccccctattcctactcatgctgtctatatgggttgttgcagttaagtcttacactgacttccaggaggaaggcacaaggttatattaccagtattcataaaaatgcccaaacttgggaggctgagcatgttctgagtgtactggccaagagtcgtcaaccggatgttttaagtctgcatccaaaatggtttgtagcttttctccctcaaacttagttttaggtgtcaggttgtatctccctaacatgcagcgatctttcatttctttatgttttagttcctaacaaccaagtgacatcatttactctgtacaaggaactgtgctaactagtttatattcattatcttatttagttctaccaacaactctatgaattagtttctactgccattcttattttgtggaagaggcaacagttctgataggttaaggaacagtttgtctaaggccatacagttggaagagcagagaggcagacctaggtctggttactcccagagcttttaactgctatcatattctagctccacgtgctgttcttctctgcctagcattcttccttttccttcttcgttcagtttactcctatttacttttataacacagtccaaataccatgcctttggaagtcttcattgcttacttaatcaccctaacacactttctcaaataccccccaaacaatactagagtggattagattttcggtgcttacctctgttattcaatgtaccatgttttactattaatatgtttgtcttccttactagattgtaagctccctctgggcttgggccatcatttatttgattttctgttcccagtgcctgacgtattgccagaacataaggaactctcagtgaatgcttgaatgaatgccacaggattctatgttaaggcttgacctattaaatatttagaaccaatgacttgtataaggacacataaacaacctatgaaatttgccaatagtagaaaccgagaggactaacaactcattttatgtcaggaggttaggagaatgggccaaatgtatcatgaagaaatttagctgatagaaatatacaattctatgtctgaattacaaaaatcagtaacataccagcctaggcaatatgatgaaaccccgtctctacaaaaaatacaaaaattagccaggcatagtggcacatgtcagtagtcctagctacttggaaggccaaggtaggaggatcacttgagcctgggaggttgagtctgcagtgagccaagattgcaccactgcactccagcctgggcaatagatagaatgagaccctgtcttgaaaaaagaaaaaaaaaaatcaatagtgtaagtgtgggaggggagaaatacagtttggagaatagcaaatatagtaacaattaggaatttttgttgactccaactcaatgtgtattagtagcagatttgagtgccagaaaaatgtatgtagcccaaaatagaatgtacactgcaaagaatgttcagccttgattgaagtgcccccaaaatgacgggaaaatgtcaaaaggatacaggaaccaagttgaaggaacctcctaatggccaaatttggggcagtttgagccacagagtaaataattatagtaatggattataactgatggaataaaataaatatgcatgggttcatacttaattggataaatagaggggaacatcctctttgtagtagattccaattcatgcgtgtaaaagcaatgaggaaaatataaaaatcatcatttctaagtcaagcataatactgagagaaagcccccaagaagaatattaaagtgtaggagaaggaggactctcataacttttgtttcaaatcttaagattatgttctcatttactttcatttctgagcattctaagccactgttctttatgcattctaagttcctatcatgacaatttctggttctgggccattttgctttctggaaagaacagaggtaggatagagagttggaaaggctgcaagtatagaaggaggaacacagttgtagtcaaagacctggttttgggtcttttcttaatcataaattctttggaaagttaagtattctttctcagtcttgttttctcagttgtaaaattaggattatgcctattaattctaactagtttctcttatgtgtttttttttaaatcaagggtggttatatatgttacatgtaggagagatagtaggactctattcctgaataaactgttctgtaatttcatttcaaatgaaattggttggcatttcattgactctgcagatcaatttttggaagatcttaacaatattaagtctttgcatccattaatatgtaatagtcctccattgactcaggtctttaatatcagtgaagttttgtagctttctatatagaggttttatgtttctatagttaaattaatttctaggtattgtgatttttaataagtagtatttttataaatagtatttcctcaggtttctttcagtttctactagtttgctggtattttgaatataattgatttttgtgttttgatattgaatccagcaactttgctaaattaatatctcctaatagttacccaacataatgagtgcatatgatcaccaaaacatgttcaaggaggttcataaaaccccaaattagaaataacctagctttctgtcatcaggggaataatcacatttatacaatggaatactgcttagtaatacagcaacacaggtgaatctcacagacaaagtgtcgagtgaaagaagccagattaaaaggttaacatactaataagtctattcctaggaagctcaaaatagggaaaaacagtctgttgtgataaaagtgggaataacacttacctttgggggagttttgactaggaagaggcatgagagagcattgtaaggtgctggtgatgctttttatcttgatatgattagtggttacatgaacatatgcactttgaaaattcactgagctgtagacttaagatgtatgtattttatgtatattatgcttcagaagaaattgagccaaattcatgtgttgaaggtttttaaaaaattaacacttttttggagcagttttcagtttatagaaaaattgaacaggaagtacaaagaattcccatgtaatccctcaccctctgtatcttcctagtttcccctattattaacatcttgtgttagtgcagtagacttgttacagttgctgaactagtatattaaatatttgcatggttaaaaactagcaaattaaggcattacagaattgattagaaagaatcttagagatgattcgtcaaccaagaggactttgctgtgtcacaaagctaaatgggaacacacctaagggaggatcttacatagactttatttttataaagctttttgactactatacacatgtatcaacatttctttttttttttcttatttcaatagtttttggggtatagctggtttttggttacatggataagttatttagtggtgatttctgagattttggtgcacctgttaccgaagcagtgtacactgtacccaatatgtagtttttatccctcaccaccctcccagacttccccacaagtccccagagtccattatctcattcttatgcctttacatcctcatagctaagctcccacttacatgagagaacatacgatatttacttttccactcctgagttatttcacttagaataatggcctctggttccatcaaagttgctgcaaaatattaatttgtttctttttatgggtgagtagtattccttggtgtatatataccacagttctttatccacccgttggttgatgggcacttaggttggttctatatctaagccattgcaaatgctgttgctataaacatgcgtatgaatgtgtctttttttcaaataatgacatcttttcctttgggtagatacccagtagtgggattgctggatcaaatggtaattctacttttagttctttaaggaatcttcatactgttttccatagtgggtctactaatttacactcccaccagcagtgtaaaagtgttccctttttgccacatccacaccgaatctattgtttttgactttttaattatggccattcttgcagggtaaggtggtatctcattgtggttttaatttgcatttccctaatgattagtgatgttgaacattttttcatttgtctgttggctgtgtatctttttttgagaaatgtcaattcatgctctttgcccactttttgatgggattagttgttttttttcttgttgatttatttgagttccttgtagattctagctattagtcctttatcagatgcatagtttgcagatatttttttctactctgagttatctgtttactcactgattatttattttggtgtgcagaagctttgtagtttaattaggtcccatttatttatttttgtttgagttgcctttgcttttgggattttagtcatgatttctttgtctaagccaatgtccagaataatttttccaatattatcttctagaatttttatggcttcaggtcttatatttaagtctttgatccattttgagttgatttttgtataaggtgagaggtaggtattcagtttcattcttctacatgtggcttgccagttttcccagcaccatttactgaatagggtgtcctttccccaatttatgtttttgtatgctttattgaagatcagttggctgtaagtattagggtttatttctgggttctctattctgttcaattggtcgatatgcctatttttatagcagtaccatgctgttttggtaactatagccttgtagtataatttgaagtcagttaatgtggtacctctagacttgttctttttgcttagtcttgctttggctatgtgggccgttttttggttccatatgaattttaggattgtttggattgttttttctagttctgtgaagaatgatgatggtattttgatagaattgcattgaatctgtagattgctttgggcagtatggtcattttcacagtattgattcttccatttcatgagcatgggatgtgttttgtttgtgtcatttgtgatttctttcaacagtgttttgtagttttccttgtaagatttttcacctccttggttaagtatatttctaagtattttattttattttttatagatgttgtaaaagggattgagttcctgatttaattttcagcttggttgttgttggtatacagcagtgctactgatttgtgtacattgattttgtatcctgagactttactgaatccatttatcagatctaggagctttttggatgaatcttcagggttttctaggtatctaatcatattattggtaaacagtgacagtttgacatcctcttttccaatttggatgccctttatttctttctcttctataagtactctggctaggacttcctgtgttatgttgactagaaatggtgaaagtggacattgttgtgaaggacgttttgttccatttctcagggggaatgctttcaacttttcctcgttcaatatgatgttgactatgggtttgtcatatatcgcttttattactttgaagtaagtcccttgtatgcctgttttgttgagggtttttatcataaagggatgctggattttatcaaatgcttttttgtatctgttgagatgatcatatagttttggtttttaattctgtttatgtgatgtaccacatttactgattggcctatgttaaaccatttctatatccctgggatgaaacctgcttgatcatgatgtgttatctttttgatagcacatgtatcagtatttctgtgtatagattttgccttgtataattaaacacattttttaaggaaaaaaaatttaaggaaaaactatttttaaggaaatattttcaagagatgataaataaaaccatagatacttttttgggtctttttcccccttatatttatttcaaaaaagtatttatatatttcatgattaagtaaattcaactgttttagaaaacagggtatgtccatgtttaaccatgttgccagtactaggcatcaaaggcttgggtagttagtatgtaagcagaattctgtgcataagtttctattaaatttgattgttttccttggagaaagggattaaaaaatttaaaaacttctgcctaccagtttgttacttttaatgtgaaatgatacacaaagttggatcagtatattgatgaaatttttaagggttcttatccagagagttcccagtgcccttcattttataggttttgctactattataaatgtaataatgcccagcaactcagatagataaatgacataatgaatattatttaaggaatatatctgtaataaactgtttgtacctacagataccaccttgtcttcttttctgtaattacaactattaaagtatctcctcattttattttcttggaaccaccaccaaagcaagcatcaagaaatcctaatgtctagcaagcaaacggggaagactttctcttgtgagaactcagacatcatcacatttgtaaaggaaaggaggctgtgcttagaactggcttctgcatatagccaggcactccaaaatgtggctgatggacagaccaggagatctttgtcaaggattagaattttccatttctcagtgctgtctggaacctatattctgtttttctcctcctgtgtatattgtactctcaggcataatggactcttctgaaaataacacacatttcctaagtcggatagtggtagaaggttgctcacatgaatatcattttctcttctagttccatcaccgggacagcttcaacacagggtccacagcgtggggcatttcccagtgtctatccgacagcctcttaaagccacagcctatgtgagtccaaccgttcaaggcagcagtaacatgcctttatcaaacggcttacagctgtattccaacacaggaatccccacaccgaacaaagctgcagcttctgggataatgggtcgcagtgcactcccaagaccttcgttggcaataaatgggagtaacctgcctcgaagcaaaattgcacaacctgttagaaggtaagaatgtgtatttgcgtaacttcatttgcagtttggaactagaaactgctccagacacacgctgacttttcctttggctcactttaaccttagtaagacactaccctttatggcctgacttgtgctctcctccctttgaaaagtgatggatatccctgtgtgggtcaggtccccttctctctgatgtcattttcttcccttactccctcatcactatcactcctaagacgctctttgcttttgcttttaccagataagctctgtctccagagcttttgtagctttctgctcccaagttatttgcatggcttgctctgtgcctccctcaggtctttgctcagatggcagctctatccaaaaattgtagggcggggggaggttgactttttggttcattgctgtgtatccccgatgccaagaactatgcccaatacaggtaggatctcaaatatttgttgaatcagtcatttttaatcaaaatatggaaaaatgtgtcaggcgtatgtgcacacgcacaccctcctcccacacatttatggtttgaaaagcatcttaatgacattcacctggggctttatcagcttatgttggtaagttcagtatggtccaggtagtaattttttttttttcccttcaaagtttcagagtacttcaaaggacatttagtctagctcttggtcatgatgttcccttcttgaactggatatcatggagtatcttatattaaaaatccataaaagtggtttgaggagagattggtagatgaggaaataaagacaataaatacagacagctctttcaagaaattaggatatgaaggagaaggagaaaaccatagtaaaaagtttgaaagaggtggaacaagcaatttttttctgtctttatgcatttatggatatataaatagttttattttgttttgtttgtttagaagtaatagatgctcagatcaacaacaaatttcgaaaaacagaaactattgaaaaatagaaaagtaaagactgacccataatcctactgccagatagaaataattttggtacatgtttatttattcagtaagttttggcttattctgctttgtaaatgcagagctgtgtcatcatgctgatggctgactagaatcacattatttgatgtatatggttattgtagaccatacatttatccttgactatgtgtctccaaactaaactcttggaaaggtcactgctagacaatgtgagatggtctatttccccaaacttaagcaaatgctaggtattattctttttaattgttttaaatttaaattttttattttatctattctttttagagacagggtcttgctcttttgcccaggctggagtgcagtgttatggttgtagcttgttgtaacctcaaactcctgggctcaagtgatcctcctgccttgctaggactacagtgcatatcaccactcccagataatttgaaaaaaaaattgtagagacaaggtcttgctatgttgcccaagctggtcttgaattcctggcctcaagttttcctcctgcctcggcctcccaaagtgttgggattatagatgtgagccactgcactcagccaaagattctttttaaatgttttgcgaatatgataggcaaatcttcaattactaataaggttttgaaaatgtcttcatattcatttgctgtttgtattcaacagagtaaccatttatgtttttaggtcatttttctagccaggatcctatatttttcttattttaaaatatgttttatacattaagggtattggcccctttatttatgttgcaaattttcttgtgcaaatacaacatgcatgacactttgccatgaactggggctctgggagataagcatgcagtgaagacccgtaagtgtgaaccacaaggtacacttgagatggtgccagtggcttctcattactgcagtggaagaacatagatgggagagtaggtcaaagtgagtgatgtgactcataggattattaacaatctctctctctgtttttcttgtctctttttagttttcttcagcctccaaagcctctgtcttcactcagcactctgagggatggaaattggagagatggttgctactaatgcagttttatgtacccttgaaaaatgggaaagaagtaaaaatgagggttgtgttacctagctggctgggtagcagtggatgttgggatattctttcccttttgtgttttaatatatttactgcattgtttctcaatggaccagtcaccagagactaattattgcacttaaatatttgcctgagatactgcaacattctcaaacccatggttgcagtattgtgacacttagatctaggaagtttttgtagaactgctctgtacctgaatactttttgagagaattaagatgtatcaataatgctttgccatatgagttttttaaagtaacttgttcaatttactcacgtgttctaaacatctttccattacatgttctgtattttaatacattgcatattgacaactaggttctataatgtatgctttgaaatttacttttttatagtttacaggaattttattttttgtgcctatttctttttacacctatgtgaaccactatggaacaacttaaattttgtgccataaaaatatttttgtggtaaggtactatttttttagctctagggatatatcagcaaaaacacatcatgcaatttgagacacataattttgtgttgaatgagcacaacataatttgaagcattgcaaggagataaccagacagcagaattaaatggtcctgtctttttcatttttaatttattgtcatacatgggtttcatatttataacggcatcatgagctcattgcacttaatacctgcaatgtttgctactgtaccacaattgattttcaatactttattacgaaggatgaaactgtaatgttttattaacaatgcttctggaaatgaatgcattttaaagcaaataaatctttttgatagaccttttacaaaatccatttgcactaatgaatgctttcttatggcatataacttaatatttgttactgtgtacactgctgttttggaatgttcagaaataaagactctatttcagcaatatcaggtcatgc

SEQ ID NO: 427 - DNA, 34751 bp, Homo sapiens
gttactgggcgtatggcgtacagacacgaggccggcgcccgggaggcggtgttcatccgcccgggaaaagagcgcctgttgctcgctgcccgcgtgtccctggctctctcgggaacccagcgccgaaggcgaggtgggcgcgggccgaaggaggtcctgggaggtcggcggcgcggagggatctccgcgggagccgttggggctgttggcctcgggctgaggtgcaaggaccaggactagggcgagggcagcggtccaaggtgcggggccaggctgaggtgctaggtgtgcgggggccgggatgcgggggcggcggctgggggtccgggatgtggaggtgaggctcgaggtgcggggaccgggttgcgggggcgaggtcccaggtgcgggggatgcaggagccgggtgcggggtcgaggtcccaggtgcgggagatgcaggagccgggtgcgggggcgaggtcccaggtgtgggagatgcaggagccgggtgcgggggcgaggtcccaggtgcaagggatgcaggagccgggtgcgggggcgaggtcccaggtgcgggagatgcaggagccgggtgcgggggcgaggtcccaggtgtgggagatgcaggagccgggtgcgggggcgaggtcccaggtgcgggagatgcagaagccgggtgcgggggcgaggtcccaggtgtgggagatgcaggagccgggtgcgggggcgaggtcccaggtgcgggggatgcaggagccgggtgcgggggcgaggtcccaggtgtgggagatgcaggagccgggtgcgggggcgaggtcccaggtgcgggggatgcaggagccgggtgcgggggcgaggtcccaggtttgggagatgcaggagcctggggtgcaggggccggggtgcgggggcgatgtatcaggtgtggggggtgcggggccggggggaagcgctgaggcccgacttgccggggctgtagggccggggtgcgggggtgcaggggccggggtgcgggggcgaggtcccaggtgcaggggccggggtgagaggctgaggcctgagttgccgggggtgcgggggcggaggtctccgcattggcggccgtgcgtgagactgcggggacctgagagctctgcaggagggccttcgggacctcccgcactacccacgcggccgcggggcgcgatctctgcggagggcgagggccccttcccgcgtccgccgccgctgcgctgcgcccccgggagccttgggagccggacgttgggaagaggacggaactccggaggaccccaagtgaggcggcgaccgcgacggccgggctctgcgaggcccgggggtcctcgcgggtgctggcggcccggcccttggcacctgtggagggaaaggggcggcggggcggtggcgtcctgggatggatgctctcgccgtcttcagccccggcggcctccagggcaaagccggctgcacccctgcgcagcctgttctctgagcgcttttcttttcgtttttaagttgtggccagagagaccccgctcgcatagaatgtaccgctcaacggtttttaggcgtgtggcgcggtggtggttcccacgtgcacggcgtggtcctgagctcagcgccggagggacgttaggtggaagcgtctttggcagagctggtagcgaatcggagaggtgatttccagcgagtgtggttattggaagcacacacttgctttctgactttaagaattcaatatccagactgaggtggttttgaaactggaaggagataaagctgaaaaccagagttgtgctgggaaacctggacgtagagcgctgagccccccaggtatttagtgaccagcacagcgcgccgccgtgggtttcaggccctggagatgatgagaatcagctggagggctgcttccagtcggcttctaactcgggagggctgagagccgctccccaccccgtaatttctgttcccagccagtccagatgctgcccgtcagggaccaggctttgagaactgacgtgctgctttaggaatatttcctgctggagatgagagttcagcttgtcactgttttttaatcactgtttcacaccgttgtttgtaaggtgtcaagcgacggactgggtgcaaaggcatcaattgtgattcgcagcctagttggagaagctatggagtgcagagatgtggggagggagaaaacaggttaccatgtagtagggtgaccgtggtcacgccggggaaacggctttcggagaagggagcaagggatggcctgcgagctggtccttaagcggttcactggattcttgtggtttcagaggagggtgaggctttgttagcagagggtgtgccacggtgtagggtgagtcacggaattgatagtgataggaagcaagttgtgtttgctggagtctcaagcggatgctttcagattgatttgtagatcagcagtccccagtctttttggcaccagggaccgatttcctggaagacaatttttccacggaccggtgagggatggtttcgggatgaaacggttccacctcggattatcaggcattagattctcataaggagcaggcagcccagacccttggcacgccgacttcacagtagggttctcactcctaggagaatctaatgcctccactgatctaacaggaggtgagctcaggctgtcctgctcactcactgcggctcacttcctgctgtgtggcctggttccggtacaggtccatggggcgtgggggttggtggtggtggttgggggagggggggtggggggaggggggttggtggtggtggtggtggtgctgctgctgctgctggggacgctgcctgtagattatcagtaagagactttcatgcgccagtatgccccgtgtgtaagccgagcatgcatacgtaatcattgtcatgatgcgcacattataaaataaatacaaagcagtttaaaatgagatttaaaattagttgtaatatgctggcacctcagcggattatcctgtgtaaactcctttggaaattgctgatttagagtcatattgtaaggggtcttatacaatgaatatttgctttaatcctgtaaaatacaataggaagtcggaggtttttaaaattgaaaaatggcattagatttatctttctgtgaagatcatgaagccaagaattttagaagctgttaaaactcagaggatgaaaaagataatgtgatttaaggcagagtgatggtagatgatgtcatcgcctgcccctatgtagaaccttggatggtttctcatgtgttgagtatccaagctgtctgcaggaccctgagcagtctgctccctgcccacatgaaatcctccactccccttgccccttctctttccagtcccactggacgtcttttggttctgcatccagttcaagcacttatgtgtgggttgttaccgtttgtgtgaaagactggtaccaccctaccttccaattcctaattctctgtttcagcttaaatcttgttagaggtggataacaaggtgcaacaagtgttagagaattctaccaaagatattttggatttatcctaagatctaactacttcatatgaaaaagataacactactagcatcctgccttcgtgtagtattctaagaagctgacttcaagttgcttttaaagctgtgtgtaaataacgtgtattaacacgtgtagttataattttacctgccctttccattagggctaatgtttgttgactgctcactagaggccagtgtgagttctcatttgatcttcaccattgacttgtgcagtaggttattccaaccattcgacaaagagtcacacgctatgttgttttctcatgttgtctaaaatgtgaaggagttgggttcaggcagttgagctctgaggcctctacccttaatagcctgatgacattgtgtaccaccacgatgagggtgagagattgttacagctgagcccaaagctgatcccagctcacaggaagcacttagtaccatcatgatgttgaagaaatggagagaacggtcctggcagatgtaggagaaataaaggagtggttttgaaatcaatgactccattctttttatttagatataacgtatatggtgatgccactcaccaagaatgaaattatgggacatgaggtagaagagatactagtttgggtatgttcagtgtaagccacacatggaactctgggaagatccaggatgactcattatgtatgcagaaggattttctaaggggcctggcgggacacttgccacaagtgcctgtttccgtgtgtgtgtgtgtgtgtgtgtgtgtgtgtgtgtgtctgtgtatgggagtatgtgttaagtgtgtgtacatgtgtatctccaaatgggaaagaaagaaccagccaccagcatcctaattctttcagcactttctcctcctaagtctgtttataataaataatccaaatgaaaaactaagtcttatattaaaataggttttcccctttggccctactgcagtgcccagtgcaaggtaagcaactgagtttgttgaatgtaggaatgttacattaaaaaaaactgtcattaaagattagaaggatacataataattgcctggggagcttacttttgaaactcaaagaagtttaaagtaacattgtagaaattatcaaatgcgattgcctccattgagtattgtcttcaagattgtttcctctccagaaatagaaaacaatgactgggagagcccgagccagagccagaggaagggcccgcggtcaggagacagcgcagctggtgggctccactgccgtgagtgcttcaccgtttctgactacagaaaatgtctttgactcttgatcagcctaggctgttgaaaataaactaaaaactgtgctgggaaggatataggaagtgagcaagggagatcatgccctgtttcctcaggatattagaagctgattcgtgactttatttggtgactcttctctcaaatttatttttaagaataaaatatttgattattaatttagataggtgttggttgaattcctgagacttaagactagaaattttctctggtgtctgaccgcttgacgaaaagaatgttctttatttgcatgtaactacagagtcagcaacctggttatattcagcctaggcctcagccgccaccagcagagggggaattatttggccgtggacggcagagaggaacagcaggaggaacagccaagtcacaaggtgaagagaaagtaaaaggaagtcttaacaactctgttcaacatatacagcaaattttattgaattaaaacttggtacaaaaatttgtgctgaaactgtttaagaaacatttccttataatgttgccacaacacacaaatcaattgtggaaaatacttaaatataatttcttaaacattctatgtatcagtcttcattaataaatgacttaaaaaaatggttactcaggattgcaaatttaactctatggaacagttccctatctgtaacaaggtagtgtctacctgtagaggtaaagatcattgtgaccattaatacatgggataacaaatgaaggccctgttttgtcatctctcactgctctttagggattatacctgagaattgcttgtcacggtaaatgctcaaatacctaatgtattgtagaaattaatataagtttaacagattattgttaattagacattgtttggaccttgattttcattctgtaaagggatgtggatgcattgaaggattcttttttttttttttttttttttgagacggagtctcactctgtctcccaggctggagtgcagtggcgcgatctctgctcactgcagactccacctcctgggttcctgccattctcctgcctcagcctcccgagtagctgggactacaggcgcccaccactgcgcccagctaatttttttgtattttttagtagagatggggtttcaccgtgttagccaggacggtctcgatctcctgacctcgtgatcctcccggcttagcctcccaaagtgctgggattacaggcgtgagccaccgcacccggcccattgaaggattcttaaatagcacagtggtgtgaggtctgatgtgtgtttgaaataaaatcactctaggagctgcatggaagggggaattagcaaggttcccagtcttgtccattctgaaatctgtcctcttcatcaagtgacaaaatcaagctttggctaagtgtcatagcagtactgtatatctcaagcagaactgatttcatcattgtttatattcagaaactggcaattggatttttgcgtccagaactgaatttttttaagacaaattaaaaatttttaaggaaaaatatcagcctttatgacccttcagtgtcatcaggttggattcagtatgcgtgatttagtgtagttactcacccagtgccatcaatacttcaaaccaagcctctgggataaaaagctcactgagagagacaagtatgaacagttacatgtttaaaggatttttaggtagagccccctccaaatcatgaggtacagaaacaaacatggaagtgccttgtaaagtgctttagacgtgatatttaaaacttctgacatgcctgtgatgcttattctcaatttttcaggtgaaggaattgacactcatattaaataactggtttccaaagtatagcaaggactgaaatattttaagccactgttatttctctaaggaagtctagagagtaggcagttctggtgtttgtggtcagaagagaactggactctgatctttttgttcttttgtcctgggctcatgactgccatcattaagacctctgtttggttcagaacttctgtatttgagccctccctgccagatccagattccaggctccatgggcagggcaaagggtcaggaagtacaaaagtcacatgtcagctattggctctcttatggaatttttccaaaagtgtcatcctgcaatttctgcttaagtatcttaggccatccctaaccatggggagggtggaaattttagtctattaagtatattactccaaaaatagaatttatttaaagaatgaggggttagttattggatagtcaactggtaatctcttttacacaagataacatgcctattaattgacagctggaattttaatgcttgactacaaagttcatatttgttttttggctcacatcagattgttgatctgagataattgtataatttcagcaaatcaaatgacttgaataatttaggttcttataaccacagcttgtagcactaagcatgaactgattaatcacgaccttattacctataccagtatgagatgcgtgtcatggtcatagaatatgtgcaggtgcagaaatccattcttctgattctgaagagagtcaggtagtgaggaagttgcattttagatgtaagttttctaatccaggttacagatttaaaccctctaaaccagcaacttctgtagttgtaattgcatcatgacagactgtggaaaatacatgaagacctttaggtagttatcagacttacaatacagaaaaataatttcccagtcagcaaacatatgctcctgcactcttgcaccacagtccagttggcttgatctcttgattcaaggtgcacatctcttgaaagggtgcatctgcaattgcccaggacagtgacaaggcctttatgaatgaagttataactaggaaaccattctctcgttaggctggcagatacctaaaacatgttgataggattgttttatgccttgtcttctacacctcagtatcctttggattacacataatagcactatgggagttaatattgtcatcctttatttcgtgctttatgttgctcaagtacacaatttttttttaaggactccagatatctgctggatttcaggagttatcgttagcagagagaggaggtcgtcgtagagattttcatgatcttggtgtgaatacaaggcagaacctagaccatgttaaagaatcaaaaacaggtaggttaattaagaataagttttgtgagattacatctcaggaacacaggacagtgaattgaggcactttagtttaggtgtttatttggccaaggatcctgcatggcttttcgattttcctcactttcttttggcgttgatgaagtaggttatagatatctttaactgcacattttgaaacgtcatctcattaaatattaatagatcatttttaaaactctttgccatgaagagatttagttggttttgttgcaaattatttgtaaattacttagtctaaggaagatttgtttctaaatgtatgcttctttagaaattcacctaaagagagagactagtggtctccaaagtcagatgtctgaggactttcatgttgtctgctgctcttagccttgtgtttacggaactgtgcctgccttgtcatggtaggaaagatttcaaggaaaaataaacttgatattttgttaattgactataacttccttttccaggttcttcaggcattatagtaaggttaagcactaaccatttccggctgacatcccgtccccagtgggccttatatcagtatcacattgactataacccactgatggaagccagaagactccgttcagctcttctttttcaacacgaagatctaattggaaagtgtcatgcttttgatggaacgatattatttttacctaaaagactacagcaaaaggttatttgggaaaagggagatgggggatttccacttcaaagcagaactaccacaatgtaagatagctcacatggcttttagagaggccccaggagtctcctgtctgatatgacttggaataaacacatagggtactttggcattattgtagcattgtcagatttgtctgggtaacttgatgattacaattgagttataatacacttagccactctttttctcagagccatttaaaaaaaatccagttaaaacattttatggttttcaatgttgccttattaagcaagcagtatgtgattgggcataattgtcctttaaggatttaaagtttgggttttccacctctctggcttcaggttactgaagtttttagtaagacccggaatggagaggatgtgaggataacgatcactttaacaaatgaacttccacctacatcaccaacttgtttgcagttctataatattattttcaggaggtatgtgttttatttcaacattttattaagaaaacagcaaagttgaaataattgtacattgaacatctgcattcagttctcctagattttcagcattggttgggattattgagtttctctgtattgcagtaacttaaggtgtggtttactgatagaaaattcatctatttgctttaagcaagtatcctgcctttacttccctaattctgttgacttcaaatactgtctgagcttgtgttcagaacactcatatcctcgagagctattgcgaacttggtattccttctccccacggtgggtccttgatcaggaggaggtgcagagttcaggtcgtttgttccaccacaggagatatactgcatgcttgataatttgctttcagtgtacatatcacatatttcctatccaaaagcaagacacgtgttctgcaaaaatttttgttttttgagggggatgagaaacaatctggataaggctgaaattttcgtgagaatagtagggcataatacttgtatctgtaatttccctctttaagttagtcataagataactgtcactgatgataggacaattcattgtgataaatacttgttttgagttaatgtaactggtaaattgatttttccctaaacgaggggttggcaaacttctctctgcaaagggccagatagtaaacatcgtaggctttgaaagccatgtcatctcttggcagctcttcagctctactactggaccgccgaaacagccagacacagcgtgtgagtgagcggtcatggctgtgtgccagtagaactattggtggatgctgaagtctgaatttcagataattcatgtatcatgaaataatcttttattttttccaacctcaaagatatttgaaaaccgttggtaactcataggccataaaaaacagcaggtaggttggatttggcctggctacagaccacaatttgccaacccctgctctaaacgacatgctgttctgattgtcgtattagagatacttatcaatattcactctctgacctttccatttctaggcttttgaaaatcatgaatttgcaacaaattggacgaaattattataacccaaatgacccaattgatattccaagtcacaggtttgtatgaagtagaacgtttaatattccttaggcttaatgacagacttttgagacgataacctaatttgaaatggtcaaatttactacagtgactgttaatgccgcccatcacattatgtgactatttaacttgaataatgaggagacatcccagaatatttggatttttaaaaaatcacgtaatttacctgtcactagggaagaatacatagttgtccagtgctgtttgtatttttgcccttaggtaataaaaataatcagttaatgtggtgtatcaagattgcagcccaactgaaaaaccacctgctgggtattgtgctccgtgcctcagtgatgggaccactcatcccccagacctcagcattatgcagtatgcccatgtcacaaacctgcacgtgtgccccttgaatctaaagttgaaataagaaataaaaggccgggcgtggtggctcatgcctgtagtcccagcactttgggagtccaaggcgggtggatcacgaggtcaggagttctagaccagcctggccaagatgatgaaaccccgtctctactaaaaatacaaagattagccgggtgtggtggctggcacctgtaatcccagctactcgggaggctgaggcagagaagtgcttgaacccgggaggcggaggttgcagtgagccgagatcgtgccaactccagcctgggtgacagagcgagacactaagaaaataaataaataaaaaacaaaatattgcagcccaacaggtttaagtttatcataataattgtggtgctttcaattagattggcaactttttaaaagtcttaggccagtgtaatgaatagctgaataaagttagtacattcatttaaaatgaaacttatacaattattataatgttgttgaaggtcttaaagctggaaccatgtaaatcctagaaataaggaaattgattcattcagaaactttatagtttagacccagttaataaaagtgaaaacgcaacttagtgtgtgcagaatgtgttgaatgtggagaggttcttcatgacccccatctcgtctgacaggttggtgatttggcctggcttcactacttccatccttcagtatgaaaacagcatcatgctctgcactgacgttagccataaagtccttcgaagtgagactgttttggatttcatgttcaacttttatcatcagacagaagaacataaatttcaagaacaagtttccaaagaactaataggtttagttgttcttaccaagtaagactgctttttaaagtgcacaataattttttgtgagtcaaagtattgtggctttctagttctaccatgttaagaaatagtgtttaaaattgagtggtgggaatagcacaaaacaagggtgagggtatttttcagctttcccaggatcatagttttggagatgacataactcatctggagaggacaaatagctagtgatttttatccttttaaattattttattttctgtaagtaatttagtcacttcccccatccatctggcatagtctgtaagaaaccctgttccttctttttccaaccttgtatataaccaggtgatttgaaattttagagaatacatgctgtctagtctctctttttaatattagttcttcacatttccatcaaatgcagtcaaatctcaactgatccctaggtataacaataagacatacagagtggatgatattgactgggaccagaatcccaagagcacctttaagaaagccgacggctctgaagtcagcttcttagaatactacaggaaggtaagatgccagtggttagatctcaggagaaatccaaaatatctttggtagaattctctaacacttgttgcacatttggaacaagttgcgtttaaagctgtgtgtaaatgtatttgttagggcaatcacagcataattttattcattaccaaattattaaaatgcctctttttatttggtacagttcacataatgagaaatgccctctcctggttccctttttccagtagaatgaaagcttacgtttgaattgaagcctatggaggacaagtaggttggataacaggtggcgagcagtgggagttaagagcttgccatactgtctctccctccataatcaacatttcatttaatttcaccttggagacgggtaggaattaaagatctttgaaccttcagtatcatttctgctaaatctactgcctgtgggttaactcttaacttttgatttacatgttaacaaaatgcagacaggcttgttagcacaggctagatcagtcttttgggcgatcatctaaaacagtttttaaagagatgattctagttttgaaaagatcatcaaaggcaaatagcaggaaagagcagctattgactagaagaaactgaactgttcatgtaagaatgcatgctaacattgtttcagtactcagatgagcagatctggcccccaaatccttagaacgtcacattccatttgatatgttaaaagcgcaggaagattatttctagaaaactatcaattaaaatctcaaaacttgtctttgaattgctaacatttcacattttcttctactttcaatagagtatttcctgtttctaaaaatttggataaatgagcttaaatatgaaaagtattcatattttgcatggaaagtatgcatcttatcagtggccttggaaaggtctgtgtgctgctgtccagctgctctgctgtgactaaaaagatgagaagccactacggagggagggattctatgagacgctgcatgaagggctgaccttattcctggcaagatggaaacagccaggggtcatttcagcatgtctttcctcccactgttttcagcctctttactccttgaggactccaaccatgcctaacctggatccctctgggtgtcagaggttactgtgaggaatgagttgtggcatttttctgtcgttaattttagtgatcactctcagggatggtagaagttggtatatcaacagcaaatataaaggaaacattagctgaaaatgtgatttaaacctgaagcaaggtcagtggaacctctccccttccctgactggtactgagtgtcctgtggcagctcatcctcctgtaagtggtgttttacgtgttatcatacttaggagctctgcccagaccccttttactatatgttcactccctgggtgatttccagtctcctctgcccaggcttcaggcatgaaatgttaagaatccccagacttccagttccagcctagacttgtctaagcttagctgcctggttgttcttaagtatttggatgactcaaagatacctctcccatgttgccagtgttgaatgtgttctgtcttctcaacacggcccctactcggtgctcttggtcaatgcagataaggtaacttggacagaggcaagagattttatggtttatataccccatgcctaagtaggttcttgggtatttgaataaacaaatggtggatgagtcacacgtcagatctccgcaccttcccctgcctcctagtactcttttgtccggttctgtcactcaccttgttatctgaattgccttcatttttctccttttctaaatggcatctcctgtccaggccctatttttataattcatttaacaagtcttagtatttatttcctctaccttctgatcaatcaactcatacacatctgttcttcttcttccccttccccccagaagtgatgtggcacccgtggccctgtgtctggtgaagtgtggtgatctttctccatgagaccctgcttgctgctttattctcatggcgtgtcccccactgtgcctttagactaaacatagggttgtgtcccctctgttggacacaccttgtatgcttatgcttgagatctcagctcagcttctttctctagggaagatttctctggaaatcagggataatcagatgtctttagtagaaataattaatgaaagaggttgacgttaagatatttaaaagaatcaaagccttcttagattttctggtagaaatgcagttttactagtaagtgatggtttgggattgaagataatatctaggaaacagagtagaagaaggaagggtgtttggtagagaaggtcatagttggtttttaaaataaaaggtttaacagtaatgtctaataaaaatgagagtgctgttttttcaggtgtagaggaaaatgtttaaaaatatttgacagggccaggcacgatgggtcatgcctgcaatcccagcactctgggaggccgaggtgggtggatcacctaaggtcaggagtttgagaccagcctgaccaacatggtgaaacctcgtctctactaaaaatacaaaaattagctgggtgtggtggcatatgcctgtaattccagctactcgcgaggctgaggcaggaggaatcgctggaactcgggagacggaggttgcagtgagccgagacagcactccagcctgggcgacagaatgaaactctgtctcaaataaataaatgaatgaatgaatgacaggctgtttggcacctaagaatataaaagtggagggggcgtagcgagtacaagttctgtatcaggaaccatgcccttaaggccttgggtgaaatagggtgagagaggacacatttctgaaattacgaccacacttctaccacctgtgtttgcaagtcagtgatgtggtgtggagggtaactgttcccagactcctcattttaaaatgtgataaaataggtagtatagctacgtgaagcagaggtcagatgtgagtgttctacttaaaattttcttatttgaaacaagtcaagaacgggctagaattcatggtttcttaattcacgagggcttgtagtaggtggccaggaccttgccatatgctaggaataagaaatatgcaagcacccttagtctgctgatgagagacagattaaggacatgctgtgatgatgttcctctggtgtgctcagggaaatgtgtggtttgttcttctggtgtgctcagtggagatgtgtgtgtggttttttgttcttctggtgtgctcagtggaggtgtgtggttttttgttctcctggtatgctcagtggaggtgtgtgtgtggttttttgttcttctggtgtgctcagtggaggtgtgtggttttttcttctggtgtgctcagtggaggtgtgtggtttgttcttctggtgtgctcagtggaggtgtgtggtttttttgttcttctggtgtgctcagtgaaggtgtgtgggttttttttttttaaagctggatctgatttaagcaggatgctaagaaaatctgtttttggcaagatacaggatatggtaggaaagaggatctttgagacacagagccagaacctgtactgaagagaactcaaacaaagtctgtcatggttctagaattgccgaactgagctggaggccagagagctcatcttttgaggacattaaatcatgaatattggctgggtgccgtgactcacgcctctaatcctagcactttgggaggctaaggcaggcagatcacctgaggtcaggaattggagaccagcctggccaacatgttgaaaccctgtctctactaaaaatataaaattagccaggcacggtggtgtgcacctgtaatcccagctacgcaggaggctgaggcaggagaatcacctgaacccgggaggcggaggttgcagtgagccaagatcatgccactgcactccagcctgggtgacagagcgagactccatcttcaaaaaaaaaaaaaaagaatgtcattttttattgtttaacaaattgtcaacgcttattttgggcagtgattgcatctggggaaccttaacacttctcaattgaaatttgacttcttgaaaatatcaagattttataaaaaactttttctgattaaacctgccctgtagcgtaggaacttcttcctttcccctctgtattctcacggtgagactgcttttattagtaagttctctcagtaacagagaatagttttagaggaatcatcctatggtgaagttgcagagttacacagactactgtttctaaaccaagaaataaaaaattaagcaatgagaactgtgactaacaaagtctgaactcagaaccatactgtcctggaccatcacagtttttaggaaaaagatagggcactcagtagagcatagaagtcacaacctctgttttaagaatgttaaaaaaaatgcctttttaaaactttactctgaagctattatcagccttgctattggcatcagctctttatttttttaaaaaatgaaaccctttttgcccactgagatgctactcgaggcatttgccgtgaacagcgaccctttcgtctcttgagcagcaatacaaccaagagatcaccgacttgaagcagcctgtcttggtcagccagcccaagagaaggcggggccctggggggacactgccagggcctgccatgctcattcctgagctctgctatcttacaggtactgttgcatttcatttactcggaaggaagccactggatttaccctttctttcctaggagtcctcagacattcctttacttccccttccctccccccagaaaaccttttattaaaactgctttgtctcctgggaattcccactcaccatcaccctatactccagttatttagacctgattattatttctttaaccatatgcctttaaatgtcttatttaaaggtctaactgataaaatgcgtaatgattttaacgtgatgaaagacttagccgttcatacaagactaactccagagcaaaggcagcgtgaagtgggacgactcattgattacattcataagtaagtcattgatttcactggggcagggtttcagttttgtgtttagtattttatgtggctttgaggggtatcttttgagggagtggcagaaagtaactttctcctttggtatctgtagtatttggggtgggcttgttcttcgtgtttctaagcaaggctacctatacctcacttattcctcaggaaataatgaagttaaactttgcagtgcgtagtctttctaactcttccattagcaaaaggtgacaacagaaaaaggggatgtttctggtcaaatcttttttctatctttgttatatcaaggggtttcctttgacggggagaaagtttgggcatcagaattttaagttaaagaatgtcatgaagagaagcctgaaggtgatgagagaaagatgattgtgctcctgtgccagctggcattctcaccagcgccttcaccctgacggcgacattggagtgtgttgtaggctggagtggatatctgtttgactgtgtcttcttgctgtgtctctttgttgagtcgcatgtaaatgtgttaaatttacagaaacgataatgttcaaagggagcttcgagactggggtttgagctttgattccaacttactgtccttctcaggaagaattttgcaaacagaaaagattcaccaaggtggaaaaacagtaaggcagtttttcgttggtgttgttgttgtttttgagacggagtctcgctctgtcccccaggcaggagtacagtggtgcaatctcagctcactgcaagctccgagtaaggcagtttttaaagttgacaatcaagtgaggcttgggtcagatcacaataaagcaagtgggaagaactgagttccatgccagaatgatcttttcctcacctttctcttctccccttgcacatccactctctatcaacccacatgaacagcccgggacctcagaaataggtacaccccaggaggagaaaacgtggaagccctagagaatgtggagcctgtagctgggtcctcaaaaatcatctgtaagacttagctaaaaagtggttcgatttttttttttttcaataacttgagctaaagtgtagaatcctaactatctgcttgggttgatattttgactgccactaaaatgatggaaaatccctgatttgattggcctggatcatttgtttatagagataatatattaattattatgataccttttatgtttcattttcagaaaaggaaaagtattctaaaaatatttttagtgtaattaaagcactgtaaagtgccaacattttcatttttttttttttttaagaaaatgtccttcctgcctttgaaatgtcctgtgaacagtgatctcacaatgtaatttaatattctggttgcattgtttacgctatcccctgcgtgaggccaggcagggaggtggccaggacacgcagaagacaccgggctgctccctgtgatgaccagcactcgggtgctgtgcctcgcgtttatttcactttctgtcttgctgtcagatgtttttgtagcttgcttgcggcatataacacctcagtcaagttgttttactctcaaagccttattttttaatattttcattatgaagaaagagtagctatacttgtaagattttttaaaagattaaggagaatgcgactaaagcacttagggaagtacctggtccaagtaagcatttgtgtggcagctgtcagtatgagtgtattttaagtaaaattgccatcatcctttggatatattttagagtctacccccattgaggacattttctctgtccctttaattcaagcataaaagtagtacactaagtttcaaaatatgccatggtagaattattgaagactgtttggcttgatcactgagaacttacaatggaatttacagtgtgtctgaactctcttctagtttgattacaatccacaatttgcagattggtccaaagaaacaagaggtgcaccattaattagtgttaagccactagataactggctgttgatctatacgcgaagaaattatgaagcagccaattcattgatacaaaatctatttaaagttacaccagccatgggcatgcaaatgagaaaagcaataatgtaagttaatcaagtcatttctgctctgaaaattgcttggcagtcatttggaggggtgggaactattaaacatacaaactacgttatcttaattgaaaggtttgatgtggctccctgtaatgcagataaacagaaacatattttaataactaagaatgggtgggagaagcaaccaagtaagacagtttctgaaacctgcgtgcttaaaatattgctcgtttgtattagaaacagcccttggcatgaatggctagtctcggtgtttgatttcatgttttatacggaaacgtttcctgtgttacacaggaaggtgtttatgcacggtccatttgtcgctactgtgtctgagtgttggattgtgtactttcattctaggattgaagtggatgacagaactgaagcctacttaagagtcttacagcaaaaggtcacagcagacacccagatagtaagtaactaattgacatataggcagttttcggtgaaagagctttttcaaagggggcatgtgtacattttggaacttggagttcttttttcaaatgttaataggttctcaaactaggcacaaaatatgttttgtaaccataaagtagctaagctaatgctagctttagttgtgcacctaggagtttggtttacatactgcaaaaggtgaggaaggggtggagaaaaacaaagccatcttcaatttattcagacccaaaggctttacttagtctagaaaatttggaaaatacagaaaagcacagaggtaaaaatcagctgttgttcggcacacgtagacgtatgattgcgtaattacatggaagctccccagacagcctagtgccaggtatgggaagagtagggtcgcagagagcagggagccctgagtgacactcagcagcttgtcagcttccgcatgcatccacatcaccccgaggggtcgggatagggatgcaaccactctcctaagctctttccccttttacctgcaaacgtgttgttgttgtgtgtgcttcacccacccatccaggtgagtgagtgatgactcaggaggggaggactgagtcccgaagagcccatatgcctgtttgccagagtctcgctacctagcgtgggtgtgtgggaggtgcagagggttaggaattggagacagggacgttagatgatggcagccacttaatgacgggtggttttcattggtgatctgaaattgtggggacatgcagcaagtgtgtgttgtggtttcatttttgttgtaatctgtagcgcagttattaagagggtaaactctgaaatcaaacccctgggttcacatcccggctcagccatttgcctgatcttcatcaagtgcttctggctttatttccttttctgaacagatttaggtggtagtaataatagtagtgaaccctcacagcacttctgaagtttaatggcggtgtcatgcccggcccctccctagtagcccaggacatgttaatcactgttgctgctgccgccaccagtcagctcctcaaactcagcgagtctgagttaactcttcattttcccaatcccatcagtgttttgaattattcaggggaaaattaccccccttttctcaagctagttttttaggctgtcaggtatgtcttgacttcactgtttgtccagctttctataaattgttggttagaaactgtccgtcactctcgcacactgctctctagtacaaggccatctgcctcgttcctgtcgcgtccccagcactgagaacagggccttctatattccaggcaccagcatgttgtacgactatggcctgtcgttgttcaccatggtgtgctttaggcgtggtcaggctgccatcctgctcatcctctctctcatgcacacacccctgcacacacttctgacacacttttctcaaacttgcctttgtgttttccagcaaagttttcaacttgaaagctttctaagttatatttcttctctaacactcctcccacccctgaaattctatcaacattgatatggttgtttttggtctgtatctagagtgtagcctttataaacatgatagcagtgccatagttttcttgtaagtccacacacccagcctaatgtagcaaaatagagccagactcattgtcagggaactccggagttgtccaagtcttaatcacatttggtctagaatctcctttgcattcagtctttgtccaagaacttggaattgtggcctcaagacttcctggtccatagtggaagaaagtagggcttagacatttactttgcagaagtgaaagcacagccgagccaaagaccatgacccctgaagagctttctttgcactctacacccccatgccctgttcccataaccattccctgccctgctcttgctgccatgagcccctgggtgttggggagggtgtctcacaagtagtccttttattcaggttctctcaacttgtccagtttgaatattccatctattttattggggccctgcctgataaaatctccaagacaagtacttcagctctccttatttttagcagagttggttggttattgttagaaaactgacatacaaaggtcatagtagcctgggactgtagtgggtgatacatagaagttcagtcaattcctattgctttttatacctgtagcataaaattgccagagatctgctgagggaacatggaacttgcaaaagatagaatgacaatatgagattaagatgtaagtggtaaggaaaattatgataggttctactattatgtcattatgattgtaaagtaggaagggaaaaatgacatgcatgtgaacaataattagttcagcgatttcactgattattaggcatttatatccttggctattttaaaaacaagttgaaagtacatatctagttcacaggaaacattctgaagacagcagcacattgtggggtatcgagtgctaggatgagtttcttctgccccgttgagttttcatacagccacattgcaatgagttggcaaagacagatttagtgataaacaatacatctgtgttgccataagcctaagaaatgaattggcttcttctaatgtgttcattattttagcccttcatgtcacactttagatcccacaggcagatagctattatgttatctgggtaatggaaacacccaaggtgggaaaattattttgctgggcactataaaaagggaagagaagaatctgggaatataaattggagaacatggcaatgagttacaagctggattcaggccaggcgtggtggctcacacctgtaatcccagcactttgggaggccgaggcaggcggatcacaagtcaggagattgagaacatcttggccgacacaatgaaaccccatctctactaaaaatacaaaaattagccaggcatggtggtgcgaacctgtagtcccagctactctgggggctgaggcaggagaatcagttgaacctgggaggcggaggttgcagtgagccgagatcgcaccactgcattccagcctgggcaacaagagcaaaactccatctcaaaaacaaaacaaaccaaactcccgaaagttaaacttggatgcccagaattggggcaggggcatgttgagatcaggcgctctgttttgtccccagaattgtccatggacctcctgtggaagttcatagtttgatcagattctcaatccagagctttaaagcttacaagttacaattgtagatgaatcatgagtaaattaagactgtgggaaatctttaatctgtctacctgtcacttgtcactaaatttttctgtgctggttacatagagcatatttaagttctcaagtttaaacagtattcagttttgactcatagtttgcttaacatgatttatttccttcacgtgcaattatcatttagttgaacatgatgagcagtatttgttaatgtcctactgattagctgtgtggctgaaatgaatagtaaaataaatgatcatgttcttgacattgatacttcacaggtgagtttagtttcctgtcctctcccttgctcttaatcatctgtctcctaattctttgtaacaagggcactttgttttcaggttgtctgtctgttgtcaagtaatcggaaggacaaatacgatgctattaaaaaatacctgtgtacagattgccctaccccaagtcagtgtgtggtggcccgaaccttaggcaaacagcaaactgtcatggccattgctacaaagattgccctacagatgaactgcaagatgggaggagagctctggagggtggacatccccgtgagtttgatttaattggtagatgccgttttaaaattggtatttaagaacatggatttactttttaaatgttgctggtactccattgtatctaaaattaccatatttgtattgaagctgaagctcgtgatgatcgttggcatcgattgttaccatgacatgacagctgggcggaggtcaatcgcaggatttgttgccagcatcaatgaagggatgacccggtgagtgagactgggctactgtgggtggcagtgaggacataaagcagggttctggaggttcaggagtagtgttcattcttcgttgttatccttccagtttctcaatcatatacagcaacgaatttaggaaagaaaaataatgacctaccctagctcttgaatgactttcatcctgtattcgtcaaactgcatttcagattttttttaatcatatgtattggcgagtacatcttgttaaatgtgactctctctaaaaatgtatttgtttaataatatttactggccactgaaatgtagtttcacattttgatgtagaaaaaccacttcagtttacccagtcacttgtatttcaacataatagcattatttttcagtgcttttcttggaactaagggaattgccaagaatagtaatatatgaaaactgaaggcatgttagttgttgacattagtaatggatatatttcaaggtcttatcatttttaacttttagtttcaggagtgcatgtgcaggtttgttacataggtaaactcgtgtcatggggtttgtggttcagattatttcatcactcaggtactaagcctagtacccagtagttattttttctgctcttctccctcctcccaccttccacccccaagtaggccctggtgtctgttgtcttctttgcgtccatgagttctcatcatttagctgccgcttataagtgaaaacaggtggtatttggttttctgttcctgcattagtttgctagaggtaacggatggagctgaaggtctttcatcttttagaagagtgaaacttacaatgaatagtttctcaagagcacagccatgagtgtgcttctgtgcgtatttaggtgtaataaacctggacagcgcctctgggtattatagctaaattctgttttctccccagcagctggaatcatggtactgatttgtaatgaaaacagacacagtttgtgatgctgatacgggatctcttgtatcctgctccttctgtgtaaggtttttataaagtatttggagatgttaacagatgtctttaaggcagttacaaagatgacagattgctaagagtgaaataaatatagaataattcagaaaggaaaaattgatagacaattgcattcttattctagctgtgtttttctctgaatagctggttctcacgctgcatatttcaggatagaggacaggagctggtagatgggctcaaagtctgcctgcaaggttagtcacctgtggggttgccattctactctctaaactggggtcttccagaaattaccctgaactgtgttattgatgggcccagactttgggaagaacagacgagttgtgtcgtaggcatgaattgacataaaacttctctggcctgtttcagcggctctgagggcttggaatagctgcaatgagtacatgcccagccggatcatcgtgtaccgcgatggcgtaggagacggccagctgaaaacactggtgaactacgaagtgccacagtttttggattgtctaaaatccattggtagaggttacaagtaagcatgcaaattgtaaagcattttctttttataaaactgcacctttgtatctttgaaattagcatcacaagatgaaaggatgagggagaacctaacttgatagggactgtagggcctttgaggtgatgggaagggcagagggaagtttctattggaaatttttcacaagaaggctgtgttgaggggtagtatagagggtcattccttcacagaatgggacagtaagacaccattaccaatcattgatcagctttctttcttacctaaggccttggagtgcaagtatctgataattctgtacatccaaaggcgtccacaggattcattattgaaataagtgttcctgacagtcttagcttactgaatacttgtttcatttccttgtggacttgactagtgtttgatcagtaaggtgatttggcgagcatctagtctcatggggcaggggtagttctactttctccctttttttttttttttttttttttgagatggagtctcgctctgttgcccaggctgcagtgcagtggcacaatctcggctcactgcaacctccgcctcccaggttcaagtgattctcctgccccagcctcctgagtagctgggattacaggcgtgcaccaccacacctggctaatttatgtatttttagtagagacggggtttcaccacgtttgccaagctggtctcaaactcccatcctcaggtgatccacccatcttggcctcctaaagtgctgggatgacaggcatgagccacaactcccagcctctactttgtccttttaaggaatgtggacagccgaggatggtatccagatgctgcacttgttttcctttgaaacccatattggtttttgtcttcctctgctctcctacagacatttccgtcagtgccattatgagtcaataaaatgtgtaccatcgcaagagagccattctaatcagttacgttaactagtcctctttatcagatctgtgagtgatttgaaatcagggactgttgtattaagggctaagtgcataatacattacagatttaaagattgaacttttcaggatatttggaagatcttggatcctgtttcgtgtgcttgcacatacatattacacacccattattcttgtattttagcattttgtatcattatagaaaggagggattctgaaagccactggccacatctggggcttgattttatctggtgcgtaggaaaaggacaagcaccaagaggtcattccttatttctactaacgggcttctgagtcatctttggccaatgctaaaaggccccacacaataagtgtttatcccagacgtttcttaaaatgacatgtgatgccgtgaaggtctcagagaaagtcaggagtgtttttatcttttttgaaatagttgtgtttcagattaaaagaccacgcattttttaatattttggaaatgaaagttaatgttctttcctattcccttaagactcttaatgcttatattttgtcaaataatgatactttgttttcaggctttagaagccttattgtatgttgttctctgacttggcctttctgtctgtgtggggaggtgtggtgtggtgtgtgcagcaggcagtaaaggaggctctgacttggactgcttctttcctactctttttttcctgcgatttactacttgagcacacagtgttttctagtctttattgtcatttcctcatacctgaagtgaaggaaattgtcaagaaatgatgaatagaggtcatagtgcaagttcgtcacattcccttgagctgaattgtagggctactaggagtacacactcctggccttgctgggtcatctctgtttcttagggtcctttgggtttgattcccagaaggactggcagaaatggctcttgaaaaggaggttgccaccctagtgaatgagtacctgtgcacagtcgtcctgagtgtgcagagtggaccctggtgcagctggtgggtgcgcctacccagctccatcagcgagtgggaacacagcgttgcagggaaggagaacctaagtcgactgcttgggctgacacttagtgcactgttgcgtgaagtagactgcacactgtgaactgtggcagtagggatcagtggtaaaaagcaatatgtcttaaaatcagagtttggttaatcccagctttagcttcgtttgtagaagaagggaacagttaactgaggcattgcaaggcgtaaatgaaaatatacgtaatggacttcacacagtatccagtaagtattcaatacatggtagatagttctgggaaaaaccttcaagttgtacataaaggtaaaatatctgaaaattattcttcacttttagaaaatgcaaagtttggacttcaatgtttgtctaatagttatcattagaaccacaatgtttgctttcaaattgaaatgttgcttttaagcttttatagcaacgtatcacagggcagctgatttagactgtttgatgcaagaacaaatcagaaagtcatgccagcatatttgtgacctgtttttgttactatatttgctaaattgtttctcgtgatgttataggattaactttatccaccttatgtccttccgttcctaagactgatacttgttttagatgctgtcatgaagtcctagatagtcatcactttctaacaaggccctatgctgaacttaatctctgtaagtggcagaggcatttgaaacagagggctgcacacattttcaacacgttcattgtggctttgttatattcagagctattagcacgggcagtcgctgggcagcagtagtctgcgtaggcagatagggacatttctgaagatgtcctctgcttactcaagtactctcactgagtttcttgccctattcaattttcagtgaaaaacatcagcaacattgccgagtcagacattactaggtccatactgtataaaaccctctgcttcccagcattggaaatcaagtgtatctgtcctcttaaggaactaatgttgtagttggagatggaggtgctaataatcatgtttatctagtgcttactacctggcagtgctgttctaattgctacctgttctaattcatggattaactacgtggattgtgtgtgtacaagtgtggctgcttcagaaggatttgaagtgagcctggaggagggggtggaaaaggatgtgaaaggtactcaagcagaccaggcagtgcaagtgcagggctgctctccgcagggtcagagggagggcagaagggccagggatctgccgggacggacagctgatagtgcacggctgtgtccaggccaagaagcctgatgaaccttgacacaggagagccgcctgaagaatccaggtggggatgggtggctaaaaagggcagcctctagtatgggtgcatctggcgtgtggtaggccaaggagtgtggggccgtcctggggtctgcggaaaacgtcatttgagactccggtgaaacacgagtatgaaaatgaagttactcctcctgaaaaaggtatatgaatatgtagtatgtatgtatgagtgtgtgtctgtgtgtatccccgatatatagtgaaacggtaattttgaaaagcactacttaaatccacttacctgtcaaagattttagagttaatattatattttctacacagtagaaaatgcccactgaagactgttataaattgtgaattttgaagacatgctggatttaacattttggtgtgattggtatgtaatgtgtttggtctatggataaaccatctacatgaccgtgtgtcacaggacatatgtgccatttggtttccctctcaccgtttatccgtggtctttactcctgtcaagagtaagatcctgatccttctccacaacctggacagatgatacgccccaggagggatgtgttcctttttaaatggagcatgtgaacacctgaatgaatgagtgccctgaaaatatgactggctaaatgcagttacattcatcatcatttttaagccctagactaacggtaattgtggtgaagaaaagagtgaacaccagattttttgctcagtctggaggaagacttcagaatccacttcctggaacagttattgatgtagaggttaccagaccagaatggtaagttccatgtgatgagctgaaggttgttttctccttggtggtggtttctttagcatggcccctatgctttaccaattttaatacattttacttttgttcttatattttttataaacattaattttttcaactaatttggtcaaacataattaataaagcccatggtttcctggtgtctgaacagaggtttccaagtacagtttttcattgggggaaagaggattattttctgtggtattaactacacatagggagattaagcattgcttctgtagattgcttttatattttttacgtacataacctatccacagattgttttctagtaaaaagtgtttagatttgtaatacacttagttgtctaaaggtcaagaagttttatctgagacagaggtgcttatgagtaaagtggcttctgagccgagctgcactcaccgaccgcaagaaaagcagaatgccagccggagcttacagcgggcaccggcaggcacagggaaatggccttagtagcacgggaggattccgtgagaaagtcaggaaacttggctccttttttgggacagagtcactgtgttccccaggctggagtgcagtagcataatctcggctcgctgtaacctctgcctcctgcgttcaaggaattctcatgccgtagcctcctgaatagccggaattacaggcatgcaccaccatgccgagctaatttttgtgtttttagtagagacgaggtttcaccacgatggccaggctggtctcaaactcctggcctcaagtgatccgctcgcgtcagcctcctaaagtgctgggattacaggcatgagccaccacgcccagccgaaacttgttccatttttagtgagttcctcaaaaacccttttgtgtgaggtgttgttaatgcagtgagcatgttcgtgatggcaacccatcagtcattctaagttgacactgtactcaggacagcgaatcgttgggaggacttctgtttttctatgtaggtgctttggaacctttgtgaagaaggcgactttaagaggataaagtctcggcctgtgtgcaaagttgacatgtggaacacttctcctgtgtgaatcttgggtaaatgaggcaatactatagcgactttaggtggaaaatgataatagcatacagagtttagtcttatctagtctgctctgttatctgacagtggagagaaatttttattttgaaatacattatcttggatttctgtctttttctcagacagatgttatggcattggcttaggttaggttatggcattggcttaggttacaaggttctaataggttagaaggattctagcctattggggaaaaattggctagaaagacaaaagaaggctaagatgttaacatagcaaattcatttctgcaggattctctttcaccgtattcaaaacgacccccgatgctttccaacattgctactactcctaacgccaaagcccagatgtgacattggcctgaagacagtaacttaaacaaattgggtaaaatcccagttgaattatgaagtataaaaaacgtcatgagttttcactagatattattaaaatgtagcaactgctgatgctattcggacacctggagaagcccactctttttttttttttagtttcattttaagttccgagacacacgtgcaggacgtacaggtttgttacatcgtgccatggtggtttactgcacttatcaacccatcacctaggtattaagccccacatgcattagctcatgcattagctatttatcctgatgctcttcctcctccttaccccccaacaggccccagtgtgtgtgtcattctcctccatgttcatgtgttctcattgttcaacttctgcttataagtgagaacatgcggtgttaagttttctgttcctgcattagtttgctgaggataacggcttccagcttcatccatgtccctgcaaagagcatgatcttgttcctttatatggctgcatagtattccatggtgtatatataccacattttctttatctggtctctcatcaatgggcatttgagttgattccatgtctttgctattgtgaatagtgctgcatgaacatacatgtgcatgtatctttatagcagaattatttatatttatttgggtatatacccagtaatgggattgctgggtcaaatggtatttcgggttctagatctttgaggaatcaccacactgtcttccacaatggttgaactaatttacattcccaccaacagtgtaaaagtgttcctatttctctcagccttgccatctgttgtttcttgactttttaataatagctattctgactggtgtgagatggtatttcattgtggttttgatttgcatttctctaatgatcagtgatgttgagctttttcatgtatgtttcctggacacataaatttcttcttttgagaagtgtctgttcttgccctttgcccactttttaatgtttttttttcttgtaaatttgcttaagttccttgtagattctggatattagacttttgtaagatgggtagattgcaaaaattttctcccattctgcaggttgtctgttcactctgatgatagtttctcttgctgtgcagaaattctttagtttaattagatcccatttgtcaatttttgcttttgttgcaactgagaagcccgctcttaatgagcaccaaagtcatctgtaatcaccagcactgcaaatggtttgtgcctaagctgggaagccgggcttggattccagccctggcatgatttcgctgttctttctgaacaagtcatttaacatttcttaactcctcattctttgaaaaggtagctataccatctgttgtagatcagttctgctttcctaattttactagttttgatgggcataataaatcgcagggttaatttccttaaatctttattgggtcaaattacaatatctctggattgatattttattggtaccaagaaaatgaaaaaaaaaaaaaactaatgcgtattccttcatatttgtactacaggcggctctctttatctgtaggtcctgcaaccatagattcaaccaacctcggatcaaaaatacttggaaaaaagtctgtactaagcatgtgcagactttttcttgtcattattccttaaacaatacagtaaaacaactatttacatagcatttgcattgtattaggtattataatctaaagatgatactttcaagtatatgggaggttatagaaagacaacatcattttatattagggacctgggcatccgaggattttggtatcctcaggaggtcctggaaccaattcccaatggatggctatacttggtttttgttcttccatttggtcccatactagtttatattctttcatgttcccttccacttaaagatttgcattaaattcctggggattaaaatgaattctacttttgttaaataacaatgggaacagcaagaggggaaaagattccgtggtaaaagcatgtttggggagtaacagtccctgaagctcgacccactcgctgcccccacaggtcgtgcttccagagtctgaaggctcagtcacatggttcgggggtcggggtggaaaacaggaactggccaagtatgccatcgtttttagcgcccgtaacaaatgcttggttctgctgggaggcatcatgacagatatttaaaatcaaaatcatcatctttatgataaacatctttcacacataagcagtcccaaatggttcatgaataacaggctcctggacttcaaggaagcacgttacagcgtgagaagagatgaggttactgtagtaacttacagtgaagagtggtacagagcttttcactgtaagaaactggaatcaccctaattttagttttcagcacatccgtgtgttttctgtaattccaggtatgacttttttatcgtgagccaggctgtgagaagtggtagtgtttctcccacacattacaatgtcatctatgacaacagcggcctgaagccagaccacatacagcgcttgacctacaagctgtgccacatctattacaactggccagtaagtgcttctacttgttgatgtttagcaaataaaggacattcacttttcaaaatgaaatagctgtggtttaaaaggcttttagggttaatactgagatttgcaattgaaagaggctaagtctagagtaatagaacctttttttccttccactaaagggtgtcattcgtgttcctgctccttgccagtacgcccacaagctggcttttcttgttggccagagtattcacagagagccaaatctgtcactgtcaaaccgcctttactacctctaacctgcagaagacgatgcagccgcttttctttttgaaatgactttgggatttttttaagcttttatttactttttttttaactgttatctttctggatgaaacttgggaaggggattaggagatctagcattttatttctagcattgctattcaccggcttccttattttatacgtaaaaattaagattttatattttatcttcttgtttctcatagatattttgtgagcatttttttgtttattttgaagaaatgtggataagatacttggtagtataaaacagactctctgagagtatttgaaatgtgtttggagatttacttaaacgtactttcaggagtgagcaagtcctacttataaacctatattaactttatttttgagatacctgttttgaatttaaaggagataagaggcgtaaagtaggatgctcactacaaccataggtggggtttcagctcatatcttaaagataaaaggtactattatataacctatacacaagatacaggagaaaatatgcttgatttttatttggcaggggggctaggttgtatgggagtaaaaaaaacattgaaaatttttaaattgtccaaagaaacattttaagactctttaacaaaaaaggccatgagtaaatctctatattaacattactatttattttgttttggaactgggacatgattctatttgttataaaataaaattgatgtgattgtcaccttatttgaataactgtaattcttgttttactgaaagtatgtgcgttttcttttcatttaatttttaaaagtgcatacaattccattcataaaagctaaattagcctgaccaacatggtgaaaccccatctctactaaaaatacaaaattagccagatgtggtgccaggaggctgaggcaggagaatcacttgaacctgagaggcggaggttgcagtgagcagagatcacgccactgcactccagcctgggcaacagagtgagactccgtctcaaaaaaaaaaaaaaaaaaaaaaaaaaaaaaaaaaaaaaaa

SEQ ID NO: 428 - DNA, 4930 bp, Homo sapiens
aaaaagcggcgcgctgtgtcttcccgcagtctctcgtcatggaatacgcctctgacgcttcactggaccccgaagccccgtggcctcccgcgccccgcgctcgcgcctgccgcgtactgccttgggccctggtcgcggggctgctgctgctgctgctgctcgctgccgcctgcgccgtcttcctcgcctgcccctgggccgtgtccggggctcgcgcctcgcccggctccgcggccagcccgagactccgcgagggtcccgagctttcgcccgacgatcccgccggcctcttggacctgcggcaggtgagacgtgccccgaccctcggtagctggtctcgcgggagacccctaccgcccctctgggactcccttctccctcccgcacccccagggacacctgttctacactcccggccggggagaggagacccaccggggctcccattctccatctagcaccgaggccgggggggcacacctttcatcccgcacccctacgacacctcatctgtaccccaggccgggggcggggaggagaccgcccaacagttctttttggaccccccaagggtctccttcttctagtccggggggcacccctttcatcctgcgcccgctacgagaccctatctgtatcccgggagggggagaggagacccccacaagttctttttggacctccaagggctctccttctccgtcttgcacgggagggcacccctttcattccgcatcccgagaccccatcagcaccccaggccaggaggaggagacccccacagtcctcaacccctcagggatacgtcttctgcaccccgggtcggagaaaggctggcttccctccatgtggcagtgggtgggggcacccctcttcattccgcattcccaaggcaccccatctgcaccctggacgggggaccctccgcggttctccaaccctcgacggcttcctttctctatgtaggacttaggacattgagggcacctctttttaccccgcacccccacaagctctgcatctctggggggaaccttttttccatccccgatccgaggggggcacttcctctttatctgggaccgccaaggagacccccagttcctttgctaactcccaaagagccttatccccaacatctgaggtacccctctccctttcaagacccccaggggaatacccccaagggggctggaaagaagagggatcgcttttccctcctgaattcttggagatctgtccttggggcaggttgagccaccagcttcgtgtgtgtgtgtgtgtgtgtgtgtgtgtgtgttcgtgtttgtgtgggtgtttgtgttcgtgtgtgtgtgttcgtgtgggggtgcgtatgtgtgtgtgttcgtgggtgtgtttgtgttcgtgtgggtgtgtgttcgtgtgggtgtttgtgtttgttcgttcgtgtgggtgtttgtgttcatgtgggtgtgtttggatatttgtgttcgtgtgtgtctgtgtgtgttcgtgtgggtgtttgtgtgtgtttgtgtttgcgttcgtgtgtgtgttcgtgtttgttcgtgtgtctgtgtgttaatgtgggtgttcgtgtgtgtgttcgtttgtgtttgtgttcgtgtgtttgtgtgtttgtgtgtgtgtgtgtgcggtctctgttctttagttgggagggaagggaagcgtaggcttcaggtcggcacagactctggggaccctgacagctgaagtgagtggggacagaacctccattttctaggggaacccccatccactttcctcctttctacttttaacagggcatgtttgcgcagctggtggcccaaaatggtaagtatcctccgccacttccggtccctggccccccaccatccccaccccgggatacgaagaagggggaacctggagagtgaggctctgccgcacactggctttgacccttgaccgctgctgtctctgaaagctgctacttcccctctttgaacgccaccgatccctctttctgacttgctctgactctctggatgccatggcctccccatcagacccccatctgggcccacctgggacccctgccctctcagagctggggcttgacacccccaacccccagcctggttttgtgtctctggcctccttcttttcgaaaccctcttccccgctgcttttcttccctctttcctgccccttccccactctcccagcctctcttccctacctcttcccctcgcccagagcctcctccttactcccattctcttccccatccccaggccctcctcctgtccccttccctccccctagaccctcctccctgccccttccccaaaccctccccagccccatgctctcccagtttccaagacactcctcccagcaccttccctccccgtccagagacttcttccccgctcgagacctcttcccccttcccctcccagagacccccttcccccttcccctctccatctagagatcacttccccctttcccctccccctccagaaaccccttcccccttccctctcccctccagagaccccttccccctccaaagaccccttcccccttccttccccctccagagacccctttccccttccctccccttccagagaccccttccccctccccctccaaagaccccttcctccttcccctccctctccagagaccccttcccccttccctctccctccagagaccccttcccccttccctgccccctccagagtccccttcccctccagaggccccttcccccttccccctccccctccagagacaccttctcccttctccccctccagagaccccttcccccttccctccccctgcctaagactcccctccctgccatcttctctccttggtgcttccttctccctaacccctcccccaccccttcctgctccctttgcctttcttcgaagtcctctcttaccaggtcccctgtccacccctcttaaagttcccttgattccctgatggatccttcctctagaacttcctcctttcctaacagtcttccctctccctcctagctccctgtccacctctcctctcccctttccttccttctctcccttctcctccccccatctccatcctgtccgagatctgctgctccctccaaccccctcaccgccctctccaggagtccccttacccctccccgaggcctcttccagccagactcgcctggccttttgcttttcaccccctcttcctcttcctgcatgtctttccccgcacccgcatcactccttccccacccaacctcttggagttttgccctgtcccgactcttgtccttctccctggattcccttcctctgttctatccccgtctttccctcccctagctctacccctgctcagagtcccgcccccaacaacctcagttctcttcaatcagcacccccccaacgccccccccacccaggctccccgctctgctcccctgtcccgctccctgccccgccattccccgccccccggcccctgacccgttcttttctcccagggctgcgctgacatgttcggtgctcagccacgctcagctgtgctgggacatgctcagctaagctaagtgcatgctttcctcccacagttctgctgatcgatgggcccctgagctggtacagtgacccaggcctggcaggcgtgtccctgacggggggcctgagctacaaagaggacacgaaggagctggtggtggccaaggctggagtctactatgtcttctttcaactagagctgcggcgcgtggtggccggcgagggctcaggctccgtttcacttgcgctgcacctgcagccactgcgctctgctgctggggccgccgccctggctttgaccgtggacctgccacccgcctcctccgaggctcggaactcggccttcggtttccagggccgcttgctgcacctgagtgccggccagcgcctgggcgtccatcttcacactgaggccagggcacgccatgcctggcagcttacccagggcgccacagtcttgggactcttccgggtgacccccgaaatcccagccggactcccttcaccgaggtcggaataacgtccagcctgggtgcagcccacctggacagagtccgaatcctactccatccttcatggagacccctggtgctgggtccctgctgctttctctacctcaaggggcttggcaggggtccctgctgctgacctccccttgaggaccctcctcacccactccttccccaagttggaccttgatatttattctgagcctgagctcagataatatattatatatattatatatatatatatatttctatttaaagaggatcctgagtttgtgaatggacttttttagaggagttgttttgggggggggggggtcttcgacattgccgaggctggtcttgaactcctggacttagacgatcctcctgcctcagcctcccaagcaactgggattcatcctttctattaattcattgtacttatttgcttatttgtgtgtattgagcatctgtaatgtgccagcattgtgcccaggctagggggctatagaaacatctagaaatagactgaaagaaaatctgagttatggtaatacgtgaggaatttaaagactcatccccagcctccacctcctgtgtgatacttgggggctagcttttttctttctttcttttttttgagatggtcttgttctgtcaaccaggctagaatgcagcggtgcaatcatgagtcaatgcagcctccagcctcgacctcccgaggctcaggtgatcctcccatctcagcctctcgagtagctgggaccacagttgtgtgccaccacacttggctaactttttaatttttttgcggagacggtattgctatgttgccaaggttgtttacatgccagtacaatttataataaacactcatttttcctccctctg

SEQ ID NO: 429 - DNA, 24957 bp, Homo sapiens
ttctgcttttaatgatggcagctccagaaatggtgagtaaaatgggtgtgaggagagaagatgcttctcaacacttctcagtgttgtacagcttgccaaccacagcctgtttgggaggggatgttctcacccaggttccatctttcagaagccatttgcccacttattctttttatatggataaacgatgtaatttgctacatgctgataataaacagaggtatcagcaagaatgaaagccagaaaatggcccaacatgaacttcttgcttttctaagttactctttcaagctcttcttgcgatagaaatgaaatgaacatttttggcacagaactcttgtttagattttactatgatcttgggaaacacgggttgcttcaaatggcttactagatccctttggaatttcaaacgttacaacaggtagtcacaaagggaatgaaagcggatgatctgagtgtctgtgctgatgtgcctgctggagcccctgtggattttagcccttggaggaagcaggttcccagagcagccatgcctgatatctgggagagggaactagaatttaattgggaatcttctgctatttccctgcttcctccgccctctcagagttacagggaatgacttagaaaggtctctggtctccttggcattgtgataggtggaattctttcgtaggaaacacagccccggggttattttgatgcaagccgttggtccaaagccactccccactttgctatgtgggggaaggaccgggcaccggacggctcgggtactttcgttcttaattaggtcatgcccgtgtgagccaggaaagggctgtgtttatgggaagccagtaacactgtggcctactatctcttccgtggtgccatctacatttttgggactcgggaattatgtgagtaccgaaactacttatgcttatggtaggtgtaccacacgcacagggaaagaattgcgtttatgtgggacaggtgaaaacaatcgcaaaaaagcaatggaaagggctttgagagtaatttatcttctgaacaatagcaatatggcaacttctaaatggtgagagggagtccctctaaagcaatcgatttgaagattggttggacaaacaatgggaaagtcattgtcttagcagaattaagttcatactttttttttttttttttttttgctaattctagaagcttttctgttatctgctgtagctcagacgaaaatgcattctcaccagatgactgtttttggttaatcgatactgaatgcgctttgtgtggactgtcgaatttcaaagatttaccgtatgaccaagatgcacctgatgctacaagtataaataggggaacaaatgctttctgttcttcctcggctaaggaggtagaggtggaggcggagccggatgtcagaggtcctgaaatagtcaccatgggggaaaatgatccgcctgctgttgaagcccccttctcattccgatcgctttttggccttgatgatttgaaaataagtcctgttgcaccaggtaagtggacccaggtgaggactctgtgatttctgcccataccctcatgtaggtgaccaatgtgactgactgtccctgtgggggaaatatctccccagccattctgacacccacaggctggacacctgcacttccctagatctgcagaatctcagggagaaggggcattggagaggggatcgtttcgttaagccctttgctctctccctggagaccggtgttttcttctcttgttggaggttttcagagactggggctccacaattgtcctgtcaatcctgaaggaggtcagatcctggccaggaaatctctgagtcctccaggaagtcctgagaagcagtggccaccagtccctccgaaaactcaggataaactggatgtcgccaaagatattagaggcctagattaaaatccagcagcagatgacggagtggctcctaacaactgaaggaaaaaagttggtttcgtaaataagtcacaaatgcctgataaaacagtggactctctagcaacctatacggctaggatctttttgaccagagatagtcaggactggtcaaagggagctgtggggttgccggttctggaagtcagggcttggacgcaggcagattcctgacacattggtgctagggaggaaccacaggagctctgcctgaggttccagaaagtgggagtgggggtcaccctaatgatttcttttaaaccaactggaaaattggcttggaggaggtttggaaaggatgggaggtgggagaagaggtttcaagtaactgaaaagacacacatttaaaaatatggctcaaaattagctaagtgtcaatgaaagaaaaaaaaatcttgcaatcacctgactcccaaaacttacctggtttttatgtctgcaaagtctcttcctgcttttgcccgtatgtgtggtttcatgcacagtacagatataggcaggtgggttttttccataaaaggtttttataaattttttcttatggaatcacagtattccatcaagtagatatgcaatttacacagccatttgatcatagtttgacctatagttgttcctaatattttataatataaataatatgaatattaatagcactataatattcctttctcttattttttgattattttgctatgactaagtagtggggaggaacaaaaacttttccttgtaaatagagtaatgtattgttcattagaagaacaatttagaaaatacagttcattgaaaagatttttaaaaattacccacgacggcatcattactcagagataatcctattagcaatttattattgaatttcttgcctttttctatctatatatctatatttcctttggaagtaacatgtactatttgtattattttgaagcttttaaaaaattttaacaatatcaccttcacctttctatggcattaaataattaaatattttctagatgttgacaaactatggctgatgggtcaaatctggcccacccccttcttttgtaaataaagttttattggaacacagacatgctcatttgttcacatactgtctgtggctgctttcacgccataacagcagagtggggtcgttaggacagaccgcatggcccataaagtttaagtgctgtatttactgtctggtcctttacagaaaatctctccaaccgttttctatatcatcttgtcctcctataggtattccattatatgtgtacctcatttgttatttcacccgttcttttttgtgggtaatttggtccgtttcctgtgcatcaatattataagtgccattcttctaagtgtccttgggggtcgatatttgcgtatatctatggtgacattttaggataaattcctagaagtggaactgctaggtcaaaactttcatctgtttttgagctttccggtgtctaagtttacacagctgggaagtttacacagtttctacccctgtgactgtaggtgggggaccatttcctttcacttcatgtgaatcattgtgaagttggcatgtagttatgtctcatttgcattgttttcatttctcaagaagttgaaagctttttttttttctttttcttgagacgaggtctcgctctgtcgcccaggctggagtgcaatggcgtgatctcggctcactgcaacctccaaccgcccgggttcaagcgattctcttgcctcggcctcctgagttgctggaattacaggcacatgcccccacacccagctaatttttgtatttttagtagaggcgggtttcaccgtgttgggcaggctggtcaagaagttgaaagctttttcatacttgtgcgccatttgcattccttctttggagaaatgctgtacatttcattgtttattccaggcaatgtcctcaaggaccaagcacagaggaggcgtggggcccctgcagtgccctcagggcagcctgacagagaagcagggcaaacgggaactgacacagcctttcgattaaatgtcaatctttgatttgacaatttggggtcattttctaaatccaacttaaatacagagcagctggaatgtgaagatgtcattcctggggttcctgcagatttctaagtataagacgaagggtgggcatccttatagaggagaattgttagtgtgcgggggatcgaggtgtgagggtggagagaggatcctttctgccagctcaccaccgcagatgggctgtcctggaaggacttggtctcagaccctgagttaaaacggccttcattatcatgatgtcattcattcatctagcacatttttatcaaggactactgtgtgtcccctgctgttctaggtatggataatgcagcttcaacaaaccactgagcttgtccaggcctaaaacacagaacttgccacggtctctcatcctccctcactctgcgttcctcacagcctccacatctgcgaagtgcagcttctatttccctgctcttcctccatctcctgctcaccctctcctctgcacactcttttctcctcgcattccatgtcttttcatcatttttgtcttcaaattctcttctttcttaggcagcctcaactgatattgatcatttcattatcacactccttattgccagagggtagaagttgtgagtctccacggtcaggcagggaaagatctttttagctcttccatgacagagctctcggctcaacatgtccaagactaggagaagagaggcaggtgccagtctcatcctgggcaattgtgtgaccctgggcaggcttctctcccctttctggattccattcttccttatttttaacaaagacaacttgggcattcatgtatttttaggattgatgaggtaatttaggtgaaatggcctgctctccccaggagggaagagtgctagtgggaattctcctgctgcccagagaggcttatacttctggccaggcatctggacactccttacatattgtttccaccagatttgcctggttctaggggcaagaactgtaaagggcctgagatgtcaccctacttgcaagccaaaatttagcctgccacagtttcatgggtgctttggaagacacgagagtcctgggtcagagacaaaggactctattcctcacagtgcagcaaggggcacaaatatcctgtttgtgctggctgcctttgccttctcagtcccacagaggcatgtggagcagcctgtgtatgccgcacgtgcaggcagtttgcattgctgctgcatatcccagagttaagggaaccctcatctttacagtggtctgcaagcagacctgtgcaaactttgctctggaggaaggcattatatttgttaaactggacagtaaacaaacctgcctcttgctctggagggagacgctatctgtatcttccaaggctgtttgctctacacacattcttgaagagatgatctggaatgaaagctgtcagtgtctgtgcacagcaattgtggagaatggtgtatcaacatcctgtcctcggctggacatggtggctcacgcttgtaatcccagtactttggagagccaagtggggagaatcacttgagcccaggagtttgacatcagcctgagcaacatagtgagatccccatctctataagaaaaaatttaaacaaacaaacaaaaatcaacatcttgtccttgcatctcctctgggagatctcagcactacctctgcctgcaagccccccgtgtgggtttcaccccctcctctgcagggaaacagccttggaagttgggatgctacttcccctccatcttagtgtcatagggctgctgaaacaaagtccccaaaactgggtgacttaaaacaacaggaatttattgtctcagttctggaggccagaagtctgaattccaaggtgtcatcaaggccatactccctcttaaacccatagggcaccgtgccctgcctcttcctagctcctggtggtttgccaataatctttggcatttcttggtgtgtagatgcattgttcccatctctgccttcatcttcatgaggctggcttctgcctgtgtctcctcccatcctcttcccttcatgcatgtttgtccctgtgtcctgatttctcctttttgtttttgtgttttggagacggagttttgctcttgttgcccaggctggagtgtagcagtgcgatctcagctcactgccacctctgcctcccaggttcaagcgattctcatgcctcagcctcctgagtagttgggattacaggtgcctgccatcatgcccagctaatttttgtatttttaatagagatggggtttcaccatgttggccaggcttgtcttgaactcctgacttcaggtgatccacccgctttggcttcccaaaatgttgggattacaggagtgagccactgcacccggctgttttccccctttttataagggcaacagccacgttggattagggcccaccctaatgactcattttaactagatgactctgtaaagactctccaggccatctccaaataagatgccattctgaggtactaagagttaagacctcaacgtgtctttctgggggatactattcaacccatagcacatcccctcatcccccatggaataaccgggtcagaggtggagcaggtaggactgaactagagaatgtgccccttggtgggtggccctttccctaattaaggcacctttctttgggctgagacttctctgcaaagaggggagggggaaaggatagttaaatttgtaagtttcatggcactccaagtcaggttctgtggctttctgctcttcctttttctggttttcagatgcagatgctgttgctgcacagatcctgtcactgctgccattgaagttttttccaatcatcgtcattgggatcattgcattgatattagcactggccattggtctgggcagtgagtacaattcattatttagtaggatctcaaatacctagccaagtagttaaactttcatgagcgccccctctcatcccagcattttgctgctgcccagccttaattactggaggcaaacatccttttggtttgctgacttgaagttttatttgcccacatgaatgtaaagtcagtctggggtgccgcaagggctgctggccatgctcatggctttgtcaccaaggaacctgcccggttaggagtggccaaaggcagctgatgaaatagaatcctgcaggtgggagggaggcactgaccggggcagcggggagaagacaaagagacctattcatgcaatgcaggcgcaccagctgtttttacaataaggtgcatgtggcttttgagaaagtgggtcatttggatggagggtctctaatagggaacaatttttctttcaaatacctgaatcacaggtcagttcaattcgccacctgccccactgtgtggtccacacttcgttcactttctgccttcggtaagagaaaccaggaaggccgagcagttctcagtcaggactccttgctcggctggctcagcaggtcggccccccgccatgcagtttctctcttgaccttgagacctccagagtctaaattcaccttgcactgtggttcctgggccaggccacatagcgagataaagtggggcacagcagccccaccccttggaattcaaaacagaaactgggctgcaggaaacaggctgctgacagggacgcaatttcaatacaggtttcattattcacgggccagctccgcactgtgtggcagggggacagttgttagtgttgcactctgaaagagctgttggttaattcctgccttcctcccttttcccagtccacttcgactgctcagggaagtacagatgtcgctcatcctttaagtgtatcgagctgatagctcgatgtgacggagtctcggattgcaaagacggggaggacgagtaccgctgtggtaaggtcatggctcttcccctggggaaacagaaggaagcagcagaagccaaccctgacccttcccatctgtaaaatgggtccaagtcattgccatttttaggtcatgtcttcagctgggattgaactggcgtttgcccaaagacatgttgggctggggggtcagggagggccttccatggagctctggctctcttggggagaccacataagcaataagatgagaccagcgagaagtctcagggatccagagtcactgctctgtgatggggaggctgccgtggacaagaagtgggtcagatttggcagaggaggggtttgagctggctgtggagaaacccctgcctatggtctcagggttccactggccactaataagcctttctttctgcacatcggccagtccgggtgggtggtcagaatgccgtgctccaggtgttcacagctgcttcgtggaagaccatgtgctccgatgactggaagggtcactacgcaaatgttgcctgtgcccaactgggtttcccaaggtaagttaaagagcatttccaacccatgggcaaaacacagagaggataacaataaagaaagacaactaccatttagttgggcactattgggtgctttaacgctctcagattacatcctcacatccaccttaggatgcccgatatcatcctcacttcacaggcaagcaaaccaaggccagacaggctaagtgacttgctcaaggcacatgggaagtggcatgtttgggggttcccagggccaggccaggatcggagatacgaacatgcaataaaaagtttcaaagtagaaaacaaaaacaaaaccaaaaaaccctccagctcctcagcttgcagctcctagagtagcttcctggacactttcctgcttggtcctggcggtcacatcaatgtccatgcacgcttccccaagaaccccacagaaccaattgttgaaagtcagaaatttagtgaagacacaatcatccaaaacacttgtttagcaacatgtagaacaaagaactataacagttgactattcactttttagtgtttgtgttgcctacatgattttttgcattggagtgacacagttttggcctaggcatgggcctccttctctcccctggccccttccttctgacttcctgcggccgctgtacttccacgggttcccctagcagcctccttactcccctttgctctcaagtctcagcactcaaagcaggcaggctgcattctgctttgcactcaagtagatggggtcgttaaagccacactgccctgagtcctccacagagtctcagttttcaaattccatgaatcatattctcggctgtctttccccaaagctggtggaagccaaaatgccctccagcctccagccctgaggtctgcctccctctccctccacaccaactgagattcagaaatgagctgcaattcaagttcaatgagaagagcaaaaatcatccacactaacgtcttcaggaatgatgtattactccttagagacaaggaggaagaggtacacacacacacacacacacacacactgcacacagctgagagcttccccattgggcatttctcttccccgctgagcctcttcctctgactcattgggtggggggtgttggggggcctccttttctcttctctctgccctcctcctctgtcctggaggaccaccgctctgtctgagcaaaccccaaggcctctctgctctgttatgcagaaaaactcagctcaatccctctccttccccacccagcagacccaagtcaggagccccagctgtcccaggcatcaggtagaggccactcatggtgggggtagccttcccgtctctcttccaccccagcccgtttggtaaaatattccttctcatccttaatatgctccctctacaaggaaatccagggaatgcgatgtcccccatctctcaccccaatattgcctactttcttctctataggcttgttcttttgttctctatccattgcttcagtttctaagatttatttctgcattttgttctattttcttaaattctccttaaaatccttctttaatcttctctgctctactacatcctatgtcagagatctgtgattcaaaaataaataaataaataaataaataaataaccaaaggacggtcaagctagattgcttgggttcaaatcccagtgtagactcaggcaagttccacacacagttcatgcctcagtttcctttcttagaaaagagggatgataatagcacgtacttggaggggaactgaagttccgctgacgctgtgagtgtggaagggcttggtgggcaagagcacactgggcgagtgtgtggttgtggctgtcattgttaccattttgagacttggacagttcatggggctccagttgcagcactggggtccccttgcctggcacaagccccgccacctgcactggggccaagccatcccagcaaccatcggctctttcatgccagtgccagcggaatccgtgcattgagcaatccctggaagggctgcgaaggtcgtgcccgccgccttgattacattttcctcaaaactcaaagttgactgaactttgtattctacatacacacccccatagcatttacagtaagctgaagaaatcctgttgataagctggtgtgttcactatgaaaacaagcctactgtactgtgttttgttcatttcacaagggaaggagaacatggctgtttattcaccatcttccatcttgtgactctccaaacatgtgattcttctttaaaaagttgcatcactttcaccactgttctccagaagacctgtgtcctggcactgtaaaaatgagctgggctctggtgttcgtggaatcgctttcttgtttgtgttcatctctttccagtggggctctgcgctggtcctgggcaggtgagggatgtctctcctgttcctccaactcactgttcttggagaacttggtgtccctgcttgggtgccccccgacaatactgcacctagttttgtgctcacctcccctctggacttgcttcaggccaagcaaaaggcatttcactggaatgcgcaaagagtgactcaaccaaggacataggagatggtcactcactgtgtggctgcagcccagggtgggtggacggggctgtcaggtacaggccagaagcgggggtcatcccagaacacagcaggcctggactgaatgccttgccagggtgagtgaacttcattctcttggcaaaggaagcctttgatgggtttggggggacaaaatgacatcccccatgtacaatccctgtaatattgtgactcgcacatcggttgaatgcttcaaagtgtaaagttaccacgtcgggtctgtctttccaatgtgcttgcagctatgtgagttcagataacctcagagtgagctcgctggaggggcagttccgggaggagtttgtgtccatcgatcacctcttgccagatgacaaggtgactgcattacaccactcagtatatgtgaggtaggtggtcaggcgatgctgttgtctgcacaggtatcgagtcacctgctggatttgtgatgctatgcacaactccacaaggacttaagaggcatgcatgtgttatctcagatggaaggtgggagttggccaccttgatgagactggtggatgcgccaggctgggggtgtgagaacctgagggagtatggcccaataaagaaagggaaggaaatagagtagaagggtaacaatgctgtgagtgtgaccaatgtactgtcatgtgacaggcactctgggtgtgtctggggaatgaaagcaggcaagcaagaaggggggtggggaggaaaagaggaagggagggagggagggaggaaggaagggagggagggaggaagagagggagggtaaaaggaagaaaaacagaaattaagatagaaatttatccttctttgtttacgaagtattttagcattcattatttattttacatgttttccccaacaactcatggggaaggtaaaaccaggtgttcttaaataaccaccaggtaactgaaacttacagggaccacatgccttgccccaggttagacggtgtgtagcagatacagccaagagttctgaatccaattccatattctctccctgacatctaggcccaaaccctaagatgtgcattttctgctctgggaacagtaggcttgttggtctgtccgtcggggatgaataagcaccccgggacccacctgcagtctggagggacagctcatgtgttgggtgctaaatccacagtctggtgacactagctttctcttgcatgatgagctggggctcaaaaggcagaaaacattacaaagattttgggatccctttcccttcactatgagaaaagcacacaccctggtctccacctgtgtgtgggggtgggggtaggagtgtcaattttggggcaatcacactttattgctctggggaaggagtcctctgccagatgtgtgaacccaggctacaaggagtcctagagagcttgccacgctgtcccttgggcactcttgtgtccctaggggccaggaggtggagaacattgggctgaatcgccatgcaatgacagcgtgacatgttgatagaatatatctccttacacatcctttatcactagctatctaaagcttagaaatacagaacggcctgttgtgtacacaatacttcactgttagttgagtgttttacaatgaattgtgtgacctcatcctcatggttttttttttttttgaacatagactaaaattgtaatctatattcaaagagggggaaatagaatttatttttctgttaccctaagattgagtttttaagagtgttcctttcacagatctggggcatttttcacagagcctactttttctccgctttagggagggatgtgcctctggccacgtggttaccttgcagtgcacaggtaagagttccagaaaggcaggggtccagggggagcaagcacatgctaagtcctatctccttgccctcagagtcctctccccccatggggctctgtatcccttcctcctgggtgccaggcgggaactctgtgtacccctacctgctggaggaggggagcagtgtcatcctcacctgtcggcctcacctgtcaggtgggggagacagccagagcaactcattagcagcggacaggaccaaggcccatgatgtcccatcactctgaagagccttgagtccctgactcagttcccacttcctccttacacgtgcacagtgcccactccaggcctcgggcagtgcccctcgttcctggcagaggggagtgttcacaccacaagggtggggtctggagcagtcagggaggtgcgtgcaccagcggcagtgaggagggggctgcagaaggttcctgcctgctcctgacatcccagggtgttgtcatcactgggggaataggatggggagtggtgctgccaatgctgggcactgaccaagcagggcaggtgcttttcccaccgcatcctccacagcacccaccatcctcaggtctccccaagagcctgaccacctcccctgctgagctcccccttgcagcacttgtcttagagctgctgtgagctctgggagcaggggcagtgagggtggggagagaggagcaggtgcatggtggtgacaccatgtcccccaaagaagtctgcagggtggacccacaagcctttgttcccctccatagcctgtggtcatagaaggggctacagctcacgcatcgtgggtggaaacatgtccttgctctcgcagtggccctggcaggccagccttcagttccagggctaccacctgtgcgggggctctgtcatcacgcccctgtggatcatcactgctgcacactgtgtttatgagtgagtgctgctgaccatcttcccagacccctgttcactcctgggtcatgtcagggtggggctgctttgggtggtgagaagcgggtccagagggaagacagagagactaacctccaagtaatgtacagttggagaggagtctccagcctcactgtggacccatcatcatcagctgggggtaacttgtgaccctgagcttgttttaaggattgtagctcctagagaaagggcagacagaagaggaaggaagctcctgtgctggaggaaacccacaaaaatgaaaggacctagaccttcccatagctaattccagtggaccatgttatggcagagacagggtgagacggtggtgcgggaggctagagggaatatgttgggggccaggtactgggtctcttcttaaaatctcaggagtttagagtgcaagaaaactacagaaaagacttccaaacacaatggttctccctgatatttttaccccctattttgttgctgtttgatgaacagtagtgcctgatagactccttgcagtgaccaatgttgagttcagccctcaaatgccaagacgacctcagaggtgctgagagtgaggtctgggaaacacatggggtgtgggtctgtgtttctgtagggcgtggcagtgcagttgcatatacagcataaacaagcagggtgatgggaccacatcttgcctgataacctctcccaccatcttcctaggttttcaggatacctgaggtcaatgagttcagtggttggacttttcctgtgcttcacctcttgctcttctcatttcagcttgtacctccccaagtcatggaccatccaggtgggtctagtttccctgttggacaatccagccccatcccacttggtggagaagattgtctaccacagcaagtacaagccaaagaggctgggcaatgacatcgcccttatgaagctggccgggccactcacgttcaatggtacatctgggtctctatgtggttctgcagctcttcctttgtttcaagaggatttgcaattgctcattgaagcattcttatgatggctgctttataatccttgtcagatattaataattccaactcctgattcatgttggtgttggcatcagttgattatcttttctcattaaaattgtgatgctcctagctcttggtatgacaagtgattttcaattgtatcctggacaatgtggctctcatgtttgcagacttgagtcctacctacattttcaatgttaccctgtttaaatgtagtttgtagatcctggcctacagaatgaatgcactgatgactctgccaggtagattggtgggctgtagttccaacaataattttagagccttcgtgggctgtgtgctttgtctggtgccaccttctccctgttggtgccaccttctccctgttggtgccacctggaggcagaaagagcttcttgaggccagaccagctggggcctctaggtggtggaagagagtcatccatctgtagggacaaagagcactttcctgtccaggagcctattgtggaggggtcactcagccagtgcctcccacctgcctggtttctccaggtagaggggccatcttggttgagaaacagaacctcccaggctggccaggtggtgtggtggagtcctctcatttctttacaagctgaaagatgctgggcaccctcagctccctggaagtacagaaaagttctctcccaaccagcagctcctaaagaccctgtttcttgaaaaagtcaagccctgccctctggacattacgaaaatgccagaagagccacacctgataaaactttcaaacatctcgtagatgcaaacaaagtactaggagactactcccaattaaattaaagccctctttccttcttaagaaagcagggaaagcataataaataggttaattccctcttattgaagcagaatcctgacctgagaccagctgcaggctctacctggcagagtcattactgcatccatcacatggacacgtaatgcccagaaacaaatatttccagagaagcaggaaaatgattatggtggtgccagtctgccaactattattaatgatattggttataggaaatgaggtgccagcacttgtactttgccaaagtttcaagtgagttcttttattccttctctacctctccattactgttctgcacagaaaagctcggggaacctcagggtgtgttcacacgaaagcccgaggtatgtgcagggcactctggctttgggggaggcccacaggatccagccctacacacaggcaaactcgtcgcctccagatatcccaggaaccatagcaatattcatggagccgtgttctataggcaacacccacactgtgatctagccaggagtgggcacgcgttggcctgagagcctggtctgccccatcgtgttttggtaaatagacattttactggacacagccacacctatgtgggtacctgttacctggggctgtcttcatgctccaatggcagccagagaccgcacagcccacgaagcctacaacattgactattcagccctttccacaaaaggtgtgctgaccctggtctaggttccctcacgctgcgacggtggagggctcttttacagttttaagtgctctgggtgtggtggatggggtaaggggctcctgctgtgagctgatcgttttcaagtaaccaagggcttgaccttccttcccttgggagatagtttgggctcctcagaggcagaagcatagatgagattgttttctcggactcctgcttcaattgagttgtgaactattgtttcccttcaagcagaaatgatccagcctgtgtgcctgcccaactctgaagagaacttccccgatggaaaagtgtgctggacgtcaggatggggggccacagaggatggaggtcagtgggctgaagccaagattcggagtccaggggctcagaacccagagggctgcggagggggctcccccaatgtcccattgtgatgttcccatgggctgcccagataccccggccagggagtgcatgtcagctgctcgggacacagtcagccaaggaactgtgggtcaggagtcacggttccattgttatggggacaacatgaccctgcagaccttctcaggagagagttagaccttctcgaacacagcaggtgtttccctttccctgcccggacccccggccttgttaactgaggacatacagagcccacctagacaaccctcccaggcttcattcagaactcaaagattcgtatttgtgaagactctttgtcttgtgggactttggaagatgtgttctttcatcctacaaagagcaagtggaagcagcagcagatgagatcgctgtaataataagggaagtaggagtggcagtaaccatagtccatgcaaatgaagcccgggccaccctttccttagtgtgggtacagagctggtcatgagtcttaggtttttccatcaatcactttctttgttagtaggaagaggattcattttccgtggctgccgtgacaaattatcacagtctgcgtggcttaaaacgatggaaattggccaggtgtgttccctcacacctgtagtcccagcattttgggaggccgagtctatgggatcccttgaggccattagtttgagaccagcctgggcaacatagagagacaccgtctctacaaaaaatacaaaaattagccaggcatggtggcatgcacctgtaatcccagcactttgggaggccaaggcaggaggattgcttgagcccaggagtttgagaccagcctgggcaacatggcaagaccctgtctctacaaaaaattaaaaaaattagcctgggccgggtgcagtggttcatgcctgtaatcccagcactttgggaggccgaggcaagtggaccatttgaggttcaggagtttgagaccagcttggccaatgtggtgagaccctgtctctactaaaaatacaaaaattagccaggcatggtggcgcacacctgtaatcccagctattcaggagactgaggctgtagaatcacttgaacctaggaggcggaggttgcagtgagccgagatcatgccactccactccagcttgggtgacagagcaaggctccatctcaaaacaaacaaacaaacaaacaaacaaacaaaaattagcctgacatggtggtcccagctactcaggaggctggggtgggattgcttgagcccaggaattctaagctgcagtgagccgtgatcatgccatcatactccatcctgggtgacagagtgagactttgcgtttaaaaaaacaaaacaaaacaaaaaaaaagtggagatttatttccacacgcagttgaggtgtctgtagggtggttttcctggaggctctgacccctttcctttgggttctggtggcggcggctgcagctgcactggcattcctgggcttgtagctggatctccagcctcagcctccttcctcccgtggctttgccccctgtgtctctgtatctcaaacttccctctcctgtgtcttataaggacagcaagtcgttggatttagggtccaccctaaacgctgggagatcttatgttgagattcttaccttaattacatctgcaaagaccctgttccaaataaggttgggctccatagtggcaggtaggcatattttggaggggcccacagttcaacctaacacaggaatttcagtgttttccactcaacaccaattacttgagcccacccccagctgaaggcacccaggagctaacccggatgcttcgagtctgtgggcctacttaccccccacccactggcagtgctgcccacctggccgagggcactcacagctctctgtagtttccaacccacccacatggcccaggcccagttctgtgccagtgtggctggtccagggcctttctagcttcatcagaaccagcacccctggtgtgtggtgggagctgggacaccaatctacgctccccttcctctcatggtgggctctcattccggaccaaccagcccaccagagtcattctgatgacactgggctctgaagaggaggctgtgcaacagcttcatcctcccaggagattctccatcccgctgccgattttcttctcgctgtcaatctgctctgtccagtgcaaaaggtccgacgagcccctgtcctgatgtagcttcagctccagcctgtcctggaatcttctcccataatgcattgagctgtttcgccacgttccgggcaggaagctgagtgtcttgtgataccatgtgctcctcagagcagcccctcagggtcctgtcattgtgtgattttgttgtctccatggaatctatggagtctttaaaacaccaagatgcctgggtcacaaaccagctgagttggaggggtccatccctcggtgtcgggggcgtgcttggcccactgcacgtggattaagtctcctgtgactgttgcaacaaacgaccccaaattcgtggcttaaaatgacagaaaggtatcatctcatagttaggaaggtcacaggtccaaactcagtctcagggcgctggcgtcaagtgtgggctgtgctggctcctcctggaggcccttggggaatctgtctcctgcctttcccagcgtctgcactctgcccacactgcttggctcgtgcccctccttggtcttccggggcagcaatgccgcatcttcgaatctctctctgactctctgactctggtccctgctctgtcgtcacagcttctcctccggctcctccaaagacccctgtgacttcgtcaggtccaccctcttacttgggatcatctccccactcaaggcctgtccctcaatgcacctgcaatgtcccatttgccctgtaaggtgacacagtcacaggttctggggattggggtgagaatgtctttggggtcatttttctgctgaccatcccagagttcacaaagacgctgagtgagtgaccctcctgagcctcagtttccctcccataacctggggtgttctgatggctgattgggctggtgccctggggaggtgtcttggccactgttgcccctactcctcctcctctttggacaccttaggggagtcggtggccctgccttgaagcagactggccccttgcggccactcgtaggagggcaagctcgggcttgaggtgcttcgagacagtgggagtctgctcgtcccacccgcagggccctgtccttttccgctgttgcgacacaccagagagcatccccctcgtccctcgttccctcacccccctggtctcagcatgcgccttctgtgttttgggccgggcttccttctcacacacatcccctcactcactttgaagcaggtgacgcctcccctgtcctgaaccacgcggccgtccctttgatttccaacaagatctgcaaccacagggacgtgtacggtggcatcatctccccctccatgctctgcgcgggctacctgacgggtggcgtggacagctgccaggtacggggccgcagcggtgggcgaggccgtggcagggtgacccagcccttgggacaggtcgttgccagcgtttccctgtgacaggacaaaaagtaaatttacagggcgtggagaagaaatttgctcaagatatcactccttttcctggctgccagccctgtgtttacccagtgatctggctctgcgtgggtgctgggtggtgggaggggactcatgctgctcccctccaattctgactttgtgggggaccacaggggaggcaggtggtggggaggcaggtggcggggaaccagtgaatctggccctccgaaagctgcagtggctgggactccagttctactaggtggatcacaggtcacctgagggccctggccaggtggaccctccctctcaccagctgcccttgagcttcagagggtcagggtctgcattctggaagggacacacagctggaggcagcaccccaaaggggccgagggacatcctcccttggggatgctgtgtctggaagggctggtgggttcccttctgtaacctgggtcatccattgggacatcatgaaggggggtcccaactccatagcaagcagcctcacacggcagactgtccacagaaagcaatctcgcatggcggtgactgtcccccaatctttgcttctttcctgtcacccagggggacagcggggggcccctggtgtgtcaagagaggaggctgtggaagttagtgggagcgaccagctttggcatcggctgcgcagaggtgaacaagcctggggtgtacacccgtgtcacctccttcctggactggatccacgagcagatggaggtgggtgcggcgccctccccagctcacgttgtccctggcttttgaccctaaggtcccttaaatgcaaccctggtcttgctataaaaaccagggcgtgacccagtggttgtcaattcagcagcagtgacttggtggctccagggtgtcagacgcttgtgctgaaaacagagatcacagctagtcctgggcagctctgggtgggtgcagcctggcaggcagaggagctggggcccgggaggaagaaggagcctcacgacatgggaaaggaggaggcagcgaggaggagcccctgctgggatggggatgggtcgggcgtgccccgtgtgccaggagcagggagaaagtgggagggggcggggggctgagacagtgcgggagaggaccttgcctgcctgctgaggggctggaacctcgctgggagccagggatgagaggcagcagtcaggagaggcttggggagctctgcattggtggtgtgggggggtggggggtcccggagggggaggcgtggaagtgggaggggcctgcaggggggcacccaacagcgaggctggcttggcaggacccgggcatggaggggaaacctgagacggtggaggaggaagaaggaggcttagggcttcgctgggaccctggcagctgcgtgctggcaggtgaacacggcgcctttctcatgtgggcgccggggaaacatttgctggcttgatctcagatgaagtctctccttgggatggtttcaaacacaggaggtcctcacttaatacggttgatgggatcttagaaactgcagctttaggagaaacagtgcgcacaggccctccagcaacgtccttgcttgcaatgtaattttgttataaagtcgatgagaaaaaaaaaattggtttcattatatatcattttgcttaaagtcgtagtttccaagaactaacaatgacgtcaaagtaagtacgttttttttccctaattcaagtgaaatttatataacatacaattcaccattttaaagtgaacaaccctgtagcatcagcacattcacagggctgtgcagacaccacctttgtcagttcccagcattctcatctcccaaaagacacgcggcaccctagaagcacgcagttactccccactccacttttctccccagcctctggcacccaccagtcagctttctgtctccaaggctcaaagacctttttaaaaagctcatttaatttgaaacaattggccaagaaaggacatcaaatgctgaatgtgcctcaggcgttaattcccgttttgctctcactgattttgtgctttaaatgagaaactaaagaatggtgcccacgggcacagggtgaggcctgggactgagacctgggctagcttcacctccagcactgccgccctgcagccctgagcaccccctcggggcgtggtgagggctgtgctcgggctgggtggaaagtgcttgctcctgctcaccttgctgggagaggcagcctggccccatactaggcactgagtggcctgctatgctcttcagtataaagctcagcccagcccgcccgcactgtagaaaggaccaggatggacaactgaatgggagacctcctcactgttcagggtgctgtgggagcctggggggcacagaagggtcgcgtgggcacagagggcaaagggcaggaaaggagaagccggtcctccacacgggtctgcagtacatggaggccttcacgggacacagatccccaggggctgagcactgagctggtgatcctaaaagtcccccttaagacactgaaggcgcaaggcagagaagcccaccgccgtgtcttccagctgtcgtgggtgagctggagacaaacgttcaaaatcagtctggggagcccgctcacaacggttccatgacggggccacctcagcccctcccatgtcagcaccgtcctgggccacagagcctgtgaccctccctgtactacagcggagacgacctgcatgaggcccccccagctaacaagggcagagtgtgcctcacatcagatccccgacgtggccccagtgtgactgcacagcagaatcaacagatctcaaacttaggggtgcagaagcctctctcaggatgtttgttaaatgtgaagattgcagggcgtttatctggagtctgattgggaggtctggggtgaagaccctggtgaatgtgttgcatgggggcttcagggcacactgagaaaccctgggagggtcttggaggcagtttcccctgttgtggtgaagctgtggtggaggagctcgtctgtgacgctggctccggcgatgcctggggcccctgctccctgcacaacgccttagtcatccgctgcctccaacccaccagtgcatgcgagagatgcgcagcctcagacacgccctttcccaagtccctcttcagacgtcctaggggagacccagaagagacttcctttcctgggaggctttccagcaggcccgctgtgcgtttcagttgtccattgtgaggaaagtcaacgtgagggcctttggaagactcactgtcttgcggggaagtgtcccgtgtgctagttggtggcatgcccatggcctcatcttcattttcatccagcacttttctctatctagttgggggtttaaaacaaaattgttgtgactcaaaccagaactcaggaacatagtgccgagacctggaagtttcctacggaagtgacggaactgtcgcagggcggagatgggacctgcggatgcattgctggttggagcttttcatgcctgcctgggatccactcagagctggcagccccagggggaggccaaccttgtcttcatcgtggagaacagccccacaattcccacagggcaaaatgcaggtgcccgctccgtcatcatgttggacggatggctggaagtgctaaaaacaataacgcctttgttttcatttatagagagacctaaaaacctgaagaggaaggggacaagtagccacctgagttcctgaggtgatgaagacagcccgatcctcccctggactcccgtgtaggaacctgcacacgagcagacacccttggagctctgagttccggcaccagtagcaggcccgaaagaggcacccttccatctgattccagcacaaccttcaagctgctttttgttttttgtttttttgagatggagtctcgctctgttgcccaggctggagtgcagtggcgaaatccctgctcactgcagcctccgcttccctggttcaagcgattctcttgcctcagcttccccagtagctgggaccacaggtgcccgccaccacacccaactaatttttgtatttttagtagagacagggtttcaccatgttggccaggctgctctcaaacccctgacctcaaatgatgtgcctgcttcagcctcccacagtgctgggattacaggcatgggccaccacgcctagcctcacgctcctttctgatcttcactaagaacaaaagaagcagcaacttgcaagggcggcctttcccactggtccatctggttttctctccaggggtcttgcaaaattcctgacgagataagcagttatgtgacctcacgtgcaaagccaccaacagccactcagaaaagacgcaccagcccagaagtgcagaactgcagtcactgcacgttttcatctctagggaccagaaccaaacccaccctttctacttccaagacttattttcacatgtggggaggttaatctaggaatgactcgtttaaggcctattttcatgatttctttgtagcatttggtgcttgacgtattattgtcctttgattccaaataatatgtttccttccctca

SEQ ID NO: 430 - DNA, 4608 bp, Homo sapiens
agcggcttcaccagccccgcgggtccgaatcgcacgcggccgggtccgctctcccgggaggagagcccggcgtggaccagcgtgacgaccccagcgtgctgcggcctctccccgagggcccctccacaagggtccctgcgcgggccgggctcggccgttgccactcgggacagccatcccctcgagttcgcgctcgccgtccccgccttcacctcccgggttgggaggcgggcgactgcgcgcgaggtaaaggaacttgcgttccccggcgccgaggcggcagcagcgcagtgcacagcggcttctgaaggcggcgtcgacggggagctgcgcgtggctcccagtttcctggttacgtgcgcgccggcagagccaaaacctgcagccgaaactcccgcttctccgtaaggattaaagggcgggcgcactaccgggagacgtgtcaaactcagcgcgcctcatggcggccgcggagccccacccgctcctactccagtcctctcacgcccactgacttaccctgcgcacgcgcgctgaggctccgtggggccgccgcgggccccgccccgaggtgggagggcctgacgcatccacagctggccaatcggcggatggcctcgcgcgcccgccccctccccctgcccccggcgccgggctccacgtgccagtgtttgtgtacgtgcggccgtggcggggctggacagggtccgggtcgttgaggattaggctgctcgggcgtaaccggagctggggcgcggctgccaagggccggcccggaagtcccagcggtctttaaattctcccgtgctagggccagcctgcgcattcttacctgtcggggtgcggcgagtgtctcacctctctgcacttccaaggactcttgtcatctgccttaggcgggaaatgctgttgctggattgcaaccccgaggtgagattcgggctcacagagcccgagcttttgtcctgcaggctcaagcttctagattcgtcttctcgttaatgcggggacggaccactgggcgctgcctggtcagagctggttgtgaagggcggggaggtttccagcccggaggggcgcgggactggacaaaggtgggaagggtgctggatctgttctcttcctgcaggtggatggtctgaagcatttgctggagacaggggcctcggtcaacgcacccccggatccctgcaagcagtcgcctgtccacttagccgcaggaagcggccttgcttgctttcttctctggcagctgcaaacgggcgctgacctcaaccagcaggtaactaggtaactgttgctgtgtacagccgtcccctccaacccagacacacacaaacatttctcagacgccaagagttgtttcagctgttaaaaacatgtctatagcagcgatgtccaacagaaatataatgcaagacacagatgtaatttaagagtttttttccagtcttgatgtgaggacatgagaaatttgaagtttttaagtagccacattaataaacgaaacatgaaattttagtatttgacccaatttgtccaaaatgttatcagttcaatatgtaatcaaagcaattgctgattagatattttacactttcttttattctgtcttcacaatctggtgtgacagcgtatctcaaatcagactagccacatttcaaatactctagccttaagtggctgttgactatcatattgaacagcacagatctagtttatttcaaaagaagtaattgctacattaccaaaagtctccctgcagcaattgaaatacttaggagctatgtccacaagcattctaatttcctaaagagttttcttactgtagtttgcatcttccactgaatattaaagcatggtgaattttaaattgtaaacttttctggaagaactctttttatttgcttacattttaatgtatgtgcatatggctacacgtttttatttatttgagacggagttttgcttttgtcgcccagactggagtgcaatggcgcgatctcggctcactgcaacctctgcttcttgggttcaagagattctcctgcctcagcctccctagtaggtgggattacaggcacgcgccaccgtgcccggctaatttgtgtatttttagtagagacagggtttcaccatgttggccaggctggtctcgaactcctgaccttaggtgatccgcctgcctcagccttccaaagtggtgggattacaggcgtgagccaccgcgcccagccacacatttttattaatgaaaacggtatgaaaaagcaaactaaaagaactaatcaaaaataaaaagcttttgcagcttaccgaggaaaaaaacaaaaataaaaagcttgaatttaaaaattcagtccaaaggaggagatttttagaaggttccatactgaaatgaatatgcaagcatagtacatttctatgtttcaaattagcccatggagttggctatccctaatgtaatcactaaaagtatctagaagatctaaataaaggaatgatcatttcagagcgtatgctagaatgctgaagttataatagtccactagttacttaattctgcatttctgaagtgttgcacttgcaaacgattatcagtagtgtttttaattagaagagatgttgatgcaggtttatatgtatcaaaaacacatgacttcttagtcttaaaagtgactaagacttcttatttctgaaaacaaacccaaaaccggaactgagaatgaatattaacaaaataaacccacgaaaagtttttggtgttctctgccaaaaaaaaaaaaaaaaaaaattccctgtccagtacaatgcagttctaactagcttccttaaatagctaatattaaatgtcactcatcaactttcacaaaaagtgtttttgggagactctaaaatgcaccatcttaccttaaggatgttttaggagaagctccactacacaaggcagcaaaagttggaagcctggagtgcctaagcctgcttgtagccagtgatgcccaaattgagtgagtatgaaaacagtggcttcacattttatgttttcttggattaaactaatcagactcctgaagcttagttacatgtgcttttaaaaataatgcttgcgtaattgataatttagtgttaatcatttaaatgttaacttaggttgttggtgctatcgaataatactcagttcgagtaagtaaaaagtcagatcctgagcaatcagaggtgcaattttgttcattatgactgtattctacttcagtttcggttcaggaaaacccattctatagttcccattgactacctttgggtactcatacactgtattaaacatcagataattctaacattcattcagaactggaatgcccgctctatgctggattctgttagttgctgaggatacaatagtgaccaaaaatgcaatttccttatgcatcctttacctcttctgttctgcaaccaacatttgtatgagcccaaaattcccttgtaagatataaaaaaaaagacttaagttcaatgtttcatttcactccgtttttatcctgttttcagtttatgtaataagaacgggcaaacagctgaagatctcgcttggtcatgtggatttccagactgtgccaagtttcttacaacaattaaatgtatgcagacaataaaagcaagtgaacaccctgacaggaatgattgtgttgccgtgctcagacagaaacggagtctcggaagtgtagaaaataccagtgggaaaaggaagtgctggtaagtaactcagagctgctgcttttttcctcccgcagtgatctcttgtttgcatagcatttattattccatttaatactgacactcgtatttctagtagtattgtttcattctcattaacattttagtactggttatacttaccagagtctagagaccaaaaatgggactgcatggtggaagtttggggataaaactctttttaaaaaaaagtttttaatgttaacgtgtttttaaaaacagatgtcacgtgggttatgaagaagtctgaagaacgccttcatttcatgcaaatctataagctcctgcttttggctttaccatatgttgtgtctaatctccttctgagaaggacgaaaaactttcttccaagtgaagatccatttaagaacacatgtatttacatgcctataatatgctggttgtgtatgctttgtcttttaagttattaaaggaacgtctaaaaaatacattctccgtgcagtatttacaacctttgaaaaaggtcataatttaaatcgtcaaactagaaccaggatttaatgtgaaaaattaaactgattctttattcacaaatttataataccactctactgcagtctttgactccaagatattttaaatcatatttggtcgctgaggaagacataagttatagtatgcatccttgttccaaaaatctgggcccttccatccgcaccagccctggatagagaagacgggaaaggaaagccttttacaaagttacaagattatgtcatggaaatcgtgacatcaggctctgtcagcaggaccttggaataagactctaaatggctttatcattcaaggatttgaattcctactagcatagaa

SEQ ID NO: 431 - DNA, 16897 bp, Homo sapiens
cctcctgagtcccgggaggaaagtgctcgcccattcctgacctgtgacacgctcactgcgaaggcaggttattagaagagtcccatgaaagtaaacagggtattaaaacggatccttaaaaatgaaagtgcaggctgaaagttggtagtgtgggaggtagagggtgtgtgttcttgtgcagaggagcgtggggtttgcagaggagacaggggagctttgtgtacccggagcaatgaacaagcggcgacttctctacccctcagggtggctccacggtcccagcgacatgcaggggctcctcttctccactcttctgcttgctggcctggcacaggtaagtcctctcccccgactctttcccttccggaggctatggccatccttagttcttcaggcccaaaactaaacaaaacgaagatggaggaagagggaggatcaatggcttgtggaactacttcatgagaaataggaagccatttttctttccaaataaagttctgtgttcgttcatgagcttcatgaaagaaatgtaaaacatttctccctttcaggtaatggcaccgaagcctcctttcgctatgtttgaacagcgccacgctttcctatatatttttatagcagagcctaaggcacagcctggcacagtgcgggaaacagtgtctctccatgccagctccaggcggaggctcaactttccattgctgtttgcaaaatgtgcaaagagcccctggaaaaacgaattttgacagcgactttttccagttaagtctgtccttctttgaaaggggcactttggaataaacatttacatttttaaaacattctcttactttgtcttttctcagtccatgtgtttctcacttcctgaaagggaagcagtccatggaggcttggaaatatttcaagcaacagaccaaagggaagtttaacttactatgagcaattcattgccttagtctttttaaataagaagatgaaaacaaggtgacttaattgttgatttatttacacggtagacaggagacagagcttttgaaatctggtgatttaggaaacatgggtgtgtctgtgagttagtagttgattggggccataagtagtagatacatcttagaaaacaaggaattgcaaattgttataccatatagagagagatttacgatttcaaaagaatcatgacaagaatgtcagtggtccaggtcattgctgctgttctgtggaggggctcactcccctgtctgtgtgcctcctattccactgttcttgagaaaaagcctgtcattgtggattgagagcagctagatgttcttagacagcaggtattccaacacagagagatgtgtacaaaataaacaacaacaaacacagaaaggtgttacacaaagagcggtaaaaatggattattttgtgcttaactttgcttttatgaattcataaattcatgaaatagctgataatacctagcatttactgaatagctgctatatgccaaatactgtgctgggtgctttatttatttatttatttatttatttagagacagagccttgctctgtcgttccaggctggagtgcagtggtgcagtcttgggtcactgcaacctccacctcctgggttcaagcgattgttgtgcctcagcctcccaagtagctgagattacaggcctacaccaccatgccttgccaatttttgtattttagtagagatagggttttgccctgttggccaagctggtcttgaactcctgacctcaagtgatccgcccacctcggcctcccaaagtgttgggattacaggtgtgagccaccacctccggcccaagggtgctttagttattatcttaattatcaaaacaactttacaaggtggtcattattaatcccatattacagaggagatcaaatgatgggaagttctgtaagatcacagagctgttgcaaagctcggatctgttgtcaaaatgcttattctttctattgcaccattctagtgatgcttattgtcctgaaattttgctgttgaaaacaatcaaaatatgcctgaggaaaagtgaaaaatataagattctttatatttacccacatattgactatgtccaggcctcttcatttcttcctgtatttctaagttactatcataacagaagatcttcagaccgaagatcctcctttagtatttcttgtgaggcagatcagctagcaacaatttctcttaggttttgtttacccagaaacggtttttatttcaccatcatgtttgaaagacagtttcactggctatataattctggattgacaggatttttttttttctccgtttaacattgtctctgggcatcttgttcttctccatctctccctcctcctccttcttttgatgagaagtcagatctcagttttattgtacttctgtatgtaatgcttcccccttttctcagtctactgttatgattttctttattttgagatggaatcaccctctgttgcctaggctggagtgcagtggcgtgtcttggctcactgcaacctctgccttctgggttcaagcgattctcctgtctcagcctcctgagtagctgggactacaggtgcacgccaccacacctggctaagtttttgtatttttagtagagatggggttttgccatgttggccaggctagtcttgaactccccgcctcaagtgatccacctgcctcggcatcccaaagtgctgggattacaggctatttcagcttcatttttgaaagatggtttcactggccatataattctgggttgacaggttgtttttttttcctttcaacattgtctttgcacatcttcttctcaatctcttcctcctcctccgtcttttgatgagaagtcagatctcatttttcatgtaattcagtatgtaatgcttttctcagtctactgttatgattttctctttatccttggatttcaacagtgttaccttttgacctcagagattatctggaaatgcttcaaaattggaaagttaaagaggcatccgggggcagttttgggagtgtgcatttcattagaaagaacacatgaaaaagcagggaggagaaaaccaacccagggagtccagcaaatggcaagtcatggaaggagagtgtgtgagagctaaagctcaagaggtaggcaggagagggctttggataactggctcagaagtttaggctgcacagtatggactatggggaacccctgatgggctttaaggagaggagtaatacaaccagacatgttctttaaagagattcctccaggagcaacatagtagatgcacttgaaaagtcattctggagggaggaaggtcagtcaggaactcgtagtgacggtgcttacttagtagcaatgaaatggggaaaagcatctagttctgggaagacgaggacaatacaatacataggagagggtcactgaatcgtcataggaggtgagagggaggaagacaacccagatgaatccagcttcctgactccaaactttgaagagtgaaaaatgatgacttttggacttgagtatttcctggaggacatttgggtggagatgtccagtaggtagttatctcacgggtccagggctcagtggagaagtccaggctggaaatttagttttgaaacttgcataggatgaaaactgaaggcaagggtgtgggtgagattgccaagacacagtgtagaatgaggcaagcaatacattaaagctatgaaacaccaataggcctaaatttaagtcaaattcagggtaacaggagcctgcggaggagattgagaaagtgcgttgaaaagtaaggggaggactggggggaccagatgtaatgaaatccaaggtagaggagagttaaatgccttagagaggtggggcaagaggaggactgaagagggttcacggatgtgagaccagcaaagaggccactgaacctggcatcctgaatcactggtggctatagctgaacctgtgcaaaactgagatggaggcaaaatttttttaagtttaaaatttttttaggattctagcttcactatttctactcccttctccattttgatgtttccttttcccctgctccttctccagaagcccagcagtgtcctatcctccccatcaaaacccattctcacgttgtgcatgtaacttttgaatcacagctgaaacgttactctttactgaggcatatgtgttttaccagtagtaagaaaaaaggctgagggtttaatattgggtggaatttcctacagatacttctaaatgtagaatttttgagctgcaaatggacttagatctagtaatcaattcaacagtccctggttccatcaaataaacattaagagttatttacataagcaaattgccaggcactgtgctaggtgctggtggtatactcacaaacaaaccacaagcacctgaggttgggtggctttacggctagtggaagagataggcacttacatgggtaatttcagtttaaaaatgtgtgcaaggcagggaagttataggaacctttctggaaaagatgatactgaaacagaaccttgaagtatcctttaactagatgaagaaggagctgggtctgggcagaatgtcccaggcaggaggaacagcatcatatatgcagggaactacaggcactttaactttctggaacctaatgcatacaagaactgcaagacacgaggagggccctgaatgctgtgcataagtgcttgcacatttcctgtaggtcagacactttcacgtgtgaaggatgagggagaggaagaaatccagatggttttcagcttcctgactaggggacctgagtggatggtgacgccattcactaaaatgggaactgctagttgaggagcagtttgtcagggggagggtacttgtagaacctcaaagtgcatatgtaccatagcaactaataagttgtaagcttaagggatgaggtctaggctggagaaatagatgcagagatttggtgatttgttctgtatcaaagctgggttgcagtatgatttggactaggaaaggaaggagggtaagtgttgagagcttaggctctggaacctgcctgcctgatttaaatcagtcttctatcacttacttgatatgtcacataggacaacttaaataatttgagtctcagggtcctcatttacaaaatggagtatacagtttcctattgctgctgtaagaaatcaccaacttgaatggcttaaaacaacatgattatctacagttctggacatctgatgtccaaaaatgggtcttacagggctaaaatcaagcgttggcaggactgcctcccttctggaggtggcaggggagaatccattctttgcctgttccagcttttaaaggctgtctggcttccttggaccatgacccatttcagcaacggcatcgctcctacctctgcttctgccatcacatcttctctgacatgcctgcctccttccccagtggacccaatgtacttgtgattaccttgggcccacctggataatcgagagtgataacctcaagattcttaagttgatcacatatgcaaaaatccccttcaatgttttaggtaacatatatgcacagactccagggattaggacatggacatctttgaggggaccactatctgcctatcacatggtataatcaccactgcacgctgttgctatgaagtttgattgaaataaccatgtaaagtgatttataaagatggcagtcatcaagacagacattaggcaaagatcttgctttcaagatgctcacattcttggtgcaggtatcagaaagtaaacaactgaaatgtgtaggtaataagaaaggtggtaaactctacggtgaaaggactgggatagggtgccctttcacaaagagtggtcaaagagggcctcactgagaaatttgagcacagacctaaagagagtaaaagagtgagccatgaagatatctaggggcagagtgtgcttggagtcagagaacaaggacgctggtgtggctggtgtggaggcagcaagggggtgagtggcagtgggcaaagtaatatggggaggggggaccacaggatgcagggccatggtggcactttgaattttacatggaaatgggaggccatgaggaagtcactccatatgagcaaagagtgatatgaactggcttatttttaaagaatcattctggatgtcaagtggacaaaggagcaaggaaggtgaacactcaggaggctattgtaatcatccaagtgaacaatgatgacttggattatgatggtaacagagaaggtatcaataaatgatcaaggtgggtatttttaaaggtgtaataaacaggatttactgatggaattagatgtaaaatatgaaagagaagagtcaagcatgatctgatctcaaggtattttggaaatatattggcatttgcttaaatagggaagtgtgtggaagagcagagtggaaggggaagcttgggagcttgtttttggtcatattaaatttgctatacctattaaacatcaaagtggagatgttaagtaggcagtttgagtctgagttcagaagaggggtatgagttggagataagagatatagtgagggaagatactttagaggccttatccatggggctctgaggtttacagattaagaggatgagaagaaactgacaaaggagagtgagaaggagcagtcagtgataaaggaggagtaagagtggaataagaggaataagagcctccaacagtcttggaggctgagtgaagaatagtttaaggagagtaattgtgtcaaatgctgataggtgttattataatgattgtaactcaccactctgtatactacctgtttgggggaaatcttctattcctgttatactattacatagagaagctatttctaacatcacctttattatcaaatgaagttctgctgcagggtacagggcactggaccattagatacaacacctgaaggaaggcctggagaagtgtcagatgcacctcagcgtaaacagttttgtcactggccctgcaaatgccctcagcagaagccccgttgccctcctggagtgagcctggtgagagatggctgtggatgctgtaaaatctgtgccaagcaaccaggggaaatctgcaatgaagctgacctctgtgacccacacaaagggctgtattgtgactactcagtagacaggcctaggtacgagactggagtgtgtgcatgtaagtgtcttcttctggacctgctggaaaagattgagtctagacagaatttttttttcctgcaattgttagcttggagtgatcagcttagtttggctaaatatgaggtgggtttagttttcatgcaccagtgggactggctccattgtattggatactatgtgaaattagcagatgcttacacacattcagaagcccattattttcattgcactgaggtgattttgcagttcttctcaggtaattgcttttaatgatagaaaataaaaggaattatctagagtctgactttttaaagagctacaaaatgacagcttttgttaatactgtcaaaaacaatccgaattcggccttttctgtaacaaaaaatgatctgcttaaaaatactagaatgtatacccagtattcagacatacaactttaacctcagctttcccaactaatgaccgagttgctgtgctttttacttcagcagatttgtaaaaaaagaaggtgaggtcaccccaaaccacaacctgaccctcagccttatgtgactaagttctggagactgattcagaccatctaaacattgacactaattcagggtgccaaattatttaggattaaacaaataaaatttataagggaagagaaacactcatgtcacctgggcagtttagtccgtctgtagaaaagtcaaagtaggaaggcaaattactatcagaagtttggttatgagccatggaatgagagcctacctttggagtcaggctgaatgtgtagagcactcaagcttgatagcctgatgcccctgccagcactgtattgtatggttaaaaatgtgggatctaggttcaagtcctgactgctctgctaactaaatacacttgatcaagttgtttattctctgtgtgtctcagttacataatatgtacttcctagcttatagagttgctgggaggatcaaataaaataatgacataaaacgcctagcacaatagctggtattcagtaggatcccaaaaatgttatttattggaatcctataatgaaaacatgacctatcaaacaaagtggcattcaggacacccatttttcccaagctaggcaggttatttcattaaaccaacaaacacttagtgaccatccactacagagccaagcactgtggccagcaactgaggacacgacaggaaaaacaaaagatataggccttggcctcagagaatgaaatattaagatgtcagacctttctgtaagtaatttcacacaaaatgtgatgagacttttaacagggcatagccacgaggataggaatggggataatctataactggagccccaaactatgacctgagggtcaaatctagccaacagcctgtttttgtaaataatgctttattggaacatggcacattaatgtagagtctttggctgctttgcaatggcagagtcagtagttttgaccaaacactctctggcttgcaaaggctaagatattttctagttggctcttttcagaaaacctgatgatccctgatcaagagcaacattttaaaagctttttgatctgcggacccctttacagtcttagaaattacccctttatactcttagaaattaatgaggacctaaagaggttttatgtgggttttatcattgatatttgatggattagaaatttagaaatatttattcacttaaaaagaataaacccattgcagattaataagaataacgtttttatgaaaaaacatgtaacttattttccaaagaaaaatttagtaaaagagtgtcattgttttacattttttgcaaatctctctagtgtctagctcaatagaagatagctagagtcgcacatttgctgcttctttcaatctgttactatgtgtttttctggttgaaatatgtgaagaaaatctggcatcacacagatatgtaatttgaaaagggaggaatattttaacaggcttttcagatcattgtgtatatacttttatgtttattgatattatattaaaacttggcaagtgacagtgccttaaaaattagctgcatcatggaatctgaaaccatatcaatgaactttcgactctgtgacattaaaatgcattggtctatccaagacccatttggaatagatcttttactcatgtataattttgccattctatgcattgttcatttggaaaatatgtttactgtgttgtagagatgttcaaaatattgatacacttaattatgtaatatctaaaaaaaatcacattaatatcatcctcaccagaaaagtctacatattggataaatataaagttttcagtgatggatacaagttttccaaaattctaatttttccttgaaatcttgaattctcgcattggcaaaaaatgctgtcacagttgttttccttgaagtgacaggctcagtttgctcatcttcaaaaaaaatttccaaaatacacaagtctgaataaccagtttatcatcagtcatttcttcaagtaaaattcccactaaaaaaagtggttagctcagctcacaactttaccaatgacatagttccttaagtttccctgagagagcagtttgctgaagtttcaagacagctgttgcactaaaatattctatgtatatttcctattttgtcacgtagaatattaaagagaccagtatttgatgattaagatttaataaaattaatactttttgctgtgccatcaaggacattcttaggtaaaacttcccccaccccttttaaagtataagtacctggcaaggaaaaatacaagattacctctacagtttgattcatgccaaggcaccagcagttcagttttagccacagttgcttttgtagcaccggtgcaaataccaacacagtgaaaaaggccagccacatcttagtatttggaaaagagttttgaccttgcagatcccctaaaagtgtctcaggtactgccaagggattagaggaccacacttggggaacagcctatccagaaagtcaagaatacccatcagaggaagggaaactctcctgcaatctcttaacaaaaaccatcagtaccttgcggttctgtagttaactaacgtatagtttcttcagacattcacttatcctgtcttcctaagactatatcctagcctattgttggatgtctgagaaaacctgtctcactaggcattaacctgtctcagatttattatcaaccactatacttatggtgattttacagggtctttacttggtcttaattctggaagtgaccatgtggggtttatagcctgcaatataataaaaatgcctcactttagaaacctttctacagatgtcctgtgaaggaggttccaaatggaacctaagaggttgagagctatacttcatacaggagatgatccgtttcttcttaggtttataattggaggtctagactatcacagatcatggcttctttggcaattttgctcttttctcttttcagaccttgtagctgttgggtgcgagttcaaccaggtacattatcataatggccaagtgtttcagcccaaccccttgttcagctgcctctgtgtgagtggggccattggatgcacacctctgttcataccaaagctggctggcagtcactgctctggagctaaaggtggaaagaagtctgatcagtcaaactgtagcctggaaccattactacagcagctttcaacaagctacaaaacaatgccaggtgctcagaagtagagctatttttcacgtatgaccttggtggtattccttcatgttccttttacgtatcataggtactcagtaagtacttgttgattggtggtcagagtgagatatagtttgagtgtatcattttacttaatctttgcctcagacagggataaatatctgcaaaggaaattttataatgttttagaattttctggtaaaacatttaaaaacatttttaaaagatctactaggtcaggaagctctactaaaatcttacacctctgcttatttctaacctcttctcaggaaaattgaccaaatattgttcacatgtaccctagaacaacttatttttattgttctattatgggcaagaagtttgaccattcacttccccaaattttaaaaggtaacatttctatgtgatacaggcagaaatgggaggctactgctgaaaaatatttaagaactgacacatattttgaacttgtaaatattatttctaaaaatagaaatctcgtaggaagtcctttccctcactctgaaattgaagctcaattgttaatctctctgtaaacacacacacacaaacacacacacgcacacacacacaaacacacacgcacacacacacgcacgcacacacacacacacacaaacacacacatgcacacacacaggcatttttaagtaggttacccatgtatctatgttctcagaaaaatgaagtgtgatccttcattactcatcttgtgtatctggccatttcaaacagcttaagtatacttataaaccttgtattctggtctgctctaagttagcattttatttaagcatcagcatattttgggaacaggagtttcagaaccaccagcaaataaagtatagaggaggagggactcaaaaggggcaacatcgaagtctggttcttgttcacatctctgtgttctcatccagaaatcaagaatgcctttttcttaaagtttagagcttagtgagaggtgccatggaaatgcagaatacttgaatatgttaacaactcatgagttcacttttattaagtggatatttaataaaggcaactataagcagagaaatgagtttagatatttaagaactaactctatgaaaggaacatcctcagcaactccagttttgtcagtaaattagaaaaaaaatttactaggttgttgtgaatttgcatttactatacatgttcagttgacagcatgacactgttaatgctctgaaatctctgaaattataagccatgtccttatttttttttttcaaaatgtacagaacagttggttttctgcattggattttagtcattcagtataaggctcttagaacccacacataaacttccctgggaagactaccttagagcagttttccacaagtgaagccctttggatcaagttcaagttggtctcattttagaagttagagcagttcagtggattcactttgaccttggttgggagaggcatcagatagtcagtcttagtagttagtgttttgtcaggtaaaacaagaaaatctcctgaagtgttctctggtatttatgatttagacctaggtgtgtttcaaatgaagtatacgttcagtctaatgtctcttctttgcttaactgtgaaattatatttatggcccacacaggaatttggcttttaaaattaaccataatgacaaaaacacatacttttagatatatttgtgacagtaatttatagtctatggttggaatctagcttttgctaggtcagtatgaagcacgcaatgacataatgccctcatgcttttttcaatgccctcatgcttttttcaatgctcaccaaacactaagctttgtttaaaaaatctcttctagttttcttgctttttaatgaatggtaaattcctgaactacagctgtcggtttaacaagtgggattactggtaacacggtaatctaacctgcctttatttattgcagatgtgtgccaagcttctaatctgcttcctgcattgaggtctttaaactgttgtctaccttccaggtatcttcacgtttctgcttcctctcctcagttctatgtgcaattgcaagagactctactgtcataacactgaaagcagtgtcacagtatcaattaaaatagagcacatactttaaagagactatttcctatgaagaaggctttttttttttctgggtgtttttcgagttttaagttgatttttttgaagtaatatagccagaattttgctgtgcagactcaaatcacaaccatactcccaaagcatccatttcaagatgcacattaaccttaaggaaatgccttgagacagtaagtcaatatgtagtttgcttaaaatgagccaagggcctgattcatttataagaagaagctcccagtgaccttacatggaaatgggagcattattagaccctcttatattctctcttcccctcctatttctccttagcagcacattggaagggctctatctactcactcactgacccatctattgatccatccattctgttttttcatatgtaattcgaaatcttagccaattggagagtactttgggcctaagaacatagggagtgtgacaattaagttgaatgaatgaaattatacgcttgcaatgactttctatataaatgattagtttagttcagtgtagtattaattagacagttttctaaaagactagattaaaacaaatggaagaaatctggtctcactgatagtctcattctcaaatataatttttgtattttagattttaacatattatgaaagttaacattaagatcacactgttctgatcaaattccctaatttttatttcaatgtctgttagaaatgatgaggcaagaacaagggaaaagacaactcaacaggaacataagcttaggtttagtattcagaggacaggcaaagcagaaaaatgcaaatgagtaaatcttctcagtttttcaaagataaagtatttttattcctcctaagagactggactgtaatacttgattgaaagttaattttggggttgggaaagagggagatagagtgataaattagaccatcggcttcttttattctgagttatattatacaaaaatactcagatttcttaaacattaaacatgattaaaaattatctatttatacaagtacatttatatgtatacatatgtacttttctccctttgttttagcttatagaaatctcccacttatttggaaaaaaaaatgtcttgtgcaagcaacaaaatggactccctgctccagaacatgtgggatgggaatatctaacagggtgaccaatgaaaacagcaactgtgaaatgagaaaagagaaaagactgtgttacattcagccttgcgacagcaatatattaaagacaataaaggtaaagtttaaatatatttaacttaattcaatattaagagattcctgaaaagtaagcatgtgtgtgttttggagggtgggatggtgtttagttcttagaaaaataaaagcatctcattataatgcttaaagtcaaactatttcagaggaaaacaggtattaactgcatgttgtggggaaaattttaccaaccagagcagattctaacttcttttttctatgttaatgaataaaagattttggttgctacactataattatgaaaacagatattatgaacatcagagtagagaagtcctgatcttagttatatatcactaacttggaaggaagccacaccatttccaaaatgctctatgcttacatagtaaacttgctaaaacactatgataaaatatttaccctaagattgtttggtataactagagctggtcctgcttcttgaatgaggcagtaagtctgtctcaaaaagggtaatttttagaaatgctacacaatccttctaccccaaagttattctctatcatattagcaagttgacaattcagttttaaagaaagattaggataattattcatctatgcatccactgaaaactgtctgggctgtgttatggaatttgctaagtcttagataaatatttaataagacatggctcttgatattaaacaaaacagaaatttctatttattgtaaaattgagtcaagaatagatagcaaaaaacattgaggagtacgtgctataatatgatgaagaatagagaggacagacctctgataagaaggggatcttaagggtaaagagagtgctggaaatcactacatagcaacttttattaatgcctccaaatactcagatttgtactataaactattctacatgttttcaaaactattgtaataaaatttaaagaatgacttcattttatctatcttttcagattcccaaaggaaaaacatgccaacctactttccaactctccaaagctgaaaaatttgtcttttctggatgctcaagtactcagagttacaaacccactttttgtggaatatgcttggataagagatgctgtatccctaataagtctaaaatgattactattcaatttgattgcccaaatgaggggtcatttaaatggaagatgctgtggattacatcttgtgtgtgtcagagaaactgcagagaacctggagatatattttctgagctcaagattctgtaaaaccaagcaaatgggggaaaagttagtcaatcctgtcatataataaaaaaattagtgagtataaaatggtggcaaatctactttgtttaaaacagtatgaatgcctattctcagatcactacatttaaggcattagaaacttttaaaaagttatcttaaaaatatacataaaatttgaacaacttaaaaattgaactaatttctaaaatatatcctataattatataatacacagacatttgttaccatctaagcattttgtatatgaaaaaattatgcaatttacaagaaaatattttacaaaataatctggaatacttgctaaagctgtataaaaagtatactaaattttaggctgggcgcagtggttcatgtctgtaatcccagcacttcgggaggccaaggtgggcagatcatttgaggtcaggagtttgagaccagcctggccaacatggtgaaaccctgtctgtaattaaaaaaatacaaaaattagccaagtgtggtggcatgcgcctgtaatcccagctactcgggaggctgagtcagaagaattgcttgaacccaggtggtggaggttgcagtgggtcaagattgcaccactgcactggcacggagaagcgagactcctttgggggagaaaaaaacatactcaatttaaaaaatttaatctatatttgacaatgtagcctaaggtgcccattagttgatacatcattatagggcaagtgaaattctagattaattcttgaacagaaataagattaagctgtaaatatatttagacttttcactgcctgatcttgaatatcagtttcttttggaaaggagaaaatgcaacttttctggccactgttaacaactgcaatctaaaattttttacatcaaatattgtaaaaagttaaatttccaagacaaagaccaagaacagtatcattactttgcaaaggaaagaaatataaagaatacaacttaaaattaacctgtggatctgaaatataaaatgttattaaaaataaattaatgttaaggctagaactgaagattatagtaaccggaacaattatagccatttattgcaaagtttggaagatatcaagcttagtaacattctgttcatttgcataaatgtcatgcagaacaataacaagtagcactgttgaaaaatatagacatttattataaaatcaattggtttgataagaaagcaattatttaaaaagtttaatacaaatacatgttaagtgtacaaattaggattcttttgggcaaacaagttgttatctaaagaagaagcaaaacctccttaacagttgtaataaaacctatgcctgaaaagttggtggctatt

SEQ ID NO: 432 - DNA, 5609 bp, Homo sapiens
ctcgcgtgcgtccgtatccgggagcagccactaggtaactgtagaggccactgcaattaatcggcttgaacagccaggagcggaaacccgagagtcagttcaaccacagccacccgcgtgtgcccgcggaaagccgatggcctactctcgtccggcagcgcactggtttcctgggttaccggcctcagcgctcctcccgctttcttttccgggaggcgacaatctgacgctctcagcgcgtgacgcagcacgctttgatataaatgcagaccgcgcggccgtagcttcctctctgctctcgcggccgactcgcaagatggcgccggtgagtgagcgatgtcttggtgggagtgttgtgtggcaatttaatgatttccgctgtaacgatttttgcatctgtcgagtggagacgtctcagtcaagataaagggaggggagtagtgaagtctgggtcagaaacacaaccaagacgcgaggatcctgaactgtttttcgagactccctggcagctgccatgaggtctagtggagttggagctgggcccggaattggtttaggatgggtggttttggacacgcgggaaagagggaggcacaactgtaaatgggccggtggtactgcaatctgagccatttctttactatctcgcgcctgataatgcttttgccactcagcactgggtaggggaatggtgggtaatcgggccggtctgacgacctttgccaggccagagggagctcctaggcgctcagctcccgcgatggccgacatcacaagtttttgagaactttcagttggggaagaagtttctcggtgaagtaatttttagaaaagtataagtctagattccagcaatgtgaaataaacgtgcttcagatgttttacttaagtcattagtaagggaaccagtaagatgttaaaatgttcctaagaatatctgaaaagctagatatacatgcgcaatttacaaataaagttaggataaaattgctgggctagctacaaaactgggtaatgcccagcatggccataaaccctatagggttatctgttccattagacagaagttgtttgtgtctcccaaattaacttctgcgccaactgggtaattatcttttggcacatgttaccatgctacctgagaaagcaaactaatgtgtaatacttggtagccacttgggtgaatctaaattggaggttatagtctgataaatacagatttgtttgttcatattgcagtgaatgtacatggttgctggccacagtaacattttgcttatgtagccatattatatggtcttggtataaaaggtttggatatggaaaatttaagttccacggtgttggtttttaggtttttttttttttttgagacagagtctgttgcccaggtgggagtatagtggcatgatcaggctcactacaacctccgcctcccgggttcaagcaatcctcccgactcagcctcctgaatagctaggattataagcatgcaccaccacacctggctaatttttgtatttttactagagatggggtttcaccatgttggccaggctggccttgaactcctgacctcacgtgatcctcctgcctcagcctcccaaagtgctgggacggcaccttgccttttttatttttattttttctttttcttttcttttctttttttttttttttaccaaagtccccttcccttgcctataataacgtaagaattgaattttctagacataggtgggtggaatcctagctctggcacttacctgagcttgggctaggcagtatactaacctattcccatctgcagtggggtggcagaaaagcacgataatttaaaattgatcattggtagtatagaaaacaatgaaagtccgtaactttttgacaacttgaacatattaggacttggttagaggttcaaatcaaccccggcgtgggtagtggtggtgtttttttatttattgttacatttctgtatatgtaacctaacagtacattgtacagattgcattggtacaaactttaaaattgtttatataaattgaataagttgttttatatagctacataattatttctcatttatgtagcagaaagacaggaagcccaagaggtcaacctggaggtttaatttggaccttactcatccagtagaagatggaatttttgattctggaaattttgtaagtatcattctactcggcttatttttgtaatcagagttattgataatggtttaaatatatagtatttgataataacctaagctctattcctagggtaccttccctagtgaatatctagggttctcttccctagttttgcattttttctgttttaaaataggagcaatttctacgggagaaggttaaagtcaatggcaaaactggaaatctcgggaatgttgttcacattgaacgcttcaagaataaaatcacagttgtttctgagaaacagttctctaaaaggttggtacttttgcaaattttaataaaactatagtagttttggaatatttcatagaatatgtagttattacatgtattctgtttatatgcaagaataaatatgaactttagactaaaggcctacataaatgggaaattcagtaaatgagtgccaattgctgagtctagttgtaagtgtcatttattgctagaatatgagccagttgtgtccacagtcccagtccagtaaattataggccctgtaaatccaaattgtatataacctttaatgctgagtactttagtatttgagtatgttgcaagaaacatgtctgatgtgtacataggagaattgtctcaagttatttattcagtagaggtagccagttaaagtcaaagtcttaacatcttgctgccagtttttatttgttgaatttattcaccaaatattaaatactacatgggcagcacaggactgggtaacccaacagtgaaccaagcaggcagtttacccaccaccaagaaacttctagtggagaagagagagtgaaatggaattaatcaagcagtgataagtgctgtaagggcataaaactagttgcagagtttttgggtacgttggtaagttggtcaggaaatgaaatgcagaagtgagccttgcagttgttacaggcaggatgaaccagaagcctggcagattaaagtaatagtaacaaagccagtgtgtctggggtatagtgttctgggaggaatgcatgagattggagggtgtctggggagcagatcttgaaagccatgggatgtgtaatgggaagcaattgtttattgtggctgaaaaagactagggtgatacatctggtggaaactgaagatgtaagagctaatttcagtgagagacaatgatggcttggactaaagtggttgcagtacatgttaactgagattataatcactaaggattcagagataaaaatgtagtagctgtagtagctgtaaatcaagtatcttacagataatcagataattattgtaaaatacaactctagttacattagatgtagagagagcccaagaattttcagagaagttgagacttaatgagcatagtatgggtttaaccctattattaataggttgcctgttgagccggggtgggattgggagctagggggcttgatagtggtgaaggaggtgttaacgttttcacatatatatacacagataatatatttgaagagtgaaatcatattgcttaaataatttggctgtagcagtttgacaagagaatgctaccctaacaatcttgaacaatatatagtgtggcagtatgacaagaggatgctaccctaacagtcttacacaatacatcctgtgaatggaaggatgaaatattttggaggaagctaggtacagaaaagatgaatatgatgatgtatatttttcgtatagtaaacctttacatagtaggaattgtatttcttaatgaaatttatgtttttattttaaaaggtatttgaaataccttaccaagaaataccttaagaagaacaatcttcgtgattggcttcgagtggttgcatctgacaaggagacctacgaacttcgttacttccagattagtcaagatgaagatgaatcagagtcggaggactaggcaaaggctccccttacagggctttgcttattaataaaataaatgaagtatacatgagaaataccaagaaattggcttttagtttatcagtgaataaaaaatattatactcttgaacttttgtctcatttttttgagtatgctgtttatatgattttgatttccctctgataactatcaacagtatttaaatagcttatagctggtataattttttcccacgatttccaaaatcttttatgtactcaggtaaaagtagcgttatataggaaatcttttttttagacactctcgttctgtcacccaggctggagtgcagtgactcagcttcctaaatagctggaattacaggtgtgagccaccatgcccggctaattttttgtacttttagtagagtagggtttggccatgttggccaggctggtttcaaactcctgacctcaagtgatctacccacctcggcttcccaaagtgctgattatagctgtgaaccaccatgcccggccaggaaatcttactgtagaacaattttttatatagctgtataaaatgtatatgattgtcttgacagtctcaaatactgtttttaatagcttgtaaatgtaatctcaagtgcttagaacagttcttacatataagttgctctgtagtttgctcttatagttagcccaaagactctgggtgtgaggcctgctgtaaaccaatgttaaactgcttattagaaagccctaaccacctgctttgtaggcaccagaaactcaaaaccaaatctcaactcagctacagaatctactgtggtccttgtctgaaaaaattagttcactcggttggaatcttgtctcagagcatcctcatctctttctcaaaagcccctaccccaacaccggcgtgttggttgtctattgaaacttacaagtggatggaccctttctcccgaataaactggcctttgaaagctctaatcgaaatggtttggcaaaatccatactgcaggagattagggaggacaagaatgatgtgcctttttgtactgctgagcctgatggtggtgccactacttcaggtacttagatgagtcttgatgctaatagaattgtgtcgccaaacatatctggacagttacaacctaatctatgcattaattggtttgggaattgcttgaaattattgtttaattcaatgttttaattcgttttcctaaaaatttaagtgcccccatcatcgtgcaatacctcagtgcagcaactccttgattcttggatgactgaacttcctaacttggctctgccccattgttcccatttttcatgtttttcacaaatagttaaccaggtacctactactgtgcaccgctgcagagcattgaggatgtatgtgatgagtaaaaacacccagcctgctctgctgtgttagtattatgacggaaactgatcaaatcacatgtgaacaaatttactgctacaaaagggagggcttaataaaaggaatttcatctgggaaggcaaa

SEQ ID NO: 433 - DNA, 160259 bp, Homo sapiens
ggccgaagccaaaggggttgggaaggaagagacaaaaagtagttttttcccctcctcctcctcctttctcttgctaatcccgcctcctcctaagacttaggaagactggtggatgcgtttgggttgtagctaggctttttcttttctttctcttttaaaacacatctagacaaggaaaaaacaagcctcggatctgatttttcactcctcgttcttgtgcttggttcttactgtgtttgtgtattttaaaggcgagaagacgaggggaacaaaaccagctggatccatccatcaccgtgggtggttttaatttttcgttttttctcgttatttttttttaaacaaccactcttcacaatgaacaaactgtatatcggaaacctcagcgagaacgccgccccctcggacctagaaagtatcttcaaggacgccaagatcccggtgtcgggacccttcctggtgaagactggctacgcgttcgtggactgcccggacgagagctgggccctcaaggccatcgaggcgctttcaggtgggcccgggcctggccccacccgggctctcgccccagccctgcaccgcccgcccaggcccaccgggtggctccgcgggccccaggcccggcgcgctgggggagcgggggtgaggcctgagcgcccacacccacgcgcgtgggggccggggctctcctcagctccggctcccactccggcccgcggctctgcttccccggccggggtttgctgggtgagggcgaacgcgctgtcaagaaagccccggcgctggctaaggggggcgcggggctgggggaggcgcgctcccccggcgccccgcccgggcccaggcgcgtgctccaggccccggcacgctgggcctcgggggccgagctagaatgcccgcctgtgcctcgttccttcctgctttcctcggtcgttatttacggcgctgtctgtgctgcgccccgaaacccccggccgtggagaacggaaagtggcctcgaccgtgctgccgagtgagaccgcgaggctggtgcctcgcacaggcggccccgcgcttcctccccaccctgtgggaggagagagtgtgtgcccggtttccccgttccacctcccctggtccgacgagcgataggggcaggtgggcgggggcggctggtcgcctggaagggagtcgccgccacgcaccggccgcccgccgctctccgggccctggcgcggggctgcggcctccgggtatggctccgccagggcgagggacggtgccgggcggagcaggacgcccagggggaaggctgcgttggggtccccatgggagccccgtgcctttcggcttcccttttaatcaattcagacgtggtgcgggcgcctcgccgtccttcgcgcctggttcagcctgtgccgagctgcgcctctgccagttctcccgttcgtggtctcccctgccgtccccgaccctttctcgccactccctgtcttcctcaagcccaccgctgagtgttcccggcgggtctgggctgaagcagagggcagggccagggcgccccctcctgaagaaagccaggggagccccctgccccgagtctgccctgtggagcgtgtccagggcggtgagagggtgggccgcgtccctcttgcgggcctcgtggtgttggtggcccccaggggtgggtgggggaggcttggagactggactgatacccaagtagtgggcccgccagcggaccctgctccccaaccatctgcgagttaaatgcccacgccgctcgagggggtcggcttctccctccgcctggagccgcgtccgggcctcgggggcccttcgagggcctcaggaggccatttgtgtcgccgcttgggctgtgcgggtcttcgggcagggagagccgctgaactcggccgaccgtctcacttcttgtgtgtccgcaggtaaaatagaactgcacgggaaacccatagaagttgagcactcggtcccaaaaaggcaaaggtgagctgctgcttctgtttgccccgattctgttctcactccgttattgggtggagagactcagctgagaacttcttgtcctctggtgcttaccccctgccgtgtggcgtggtgttccggtctttaatccttgcttttaagtttatggcgggggtgtgtgtgttgatgatgctgggcaggaattgaaagcttttctgtggcctctgccgcgggattatggttattggttacaaaatctctcgaaagctcacagctgaatgtcctcggtccgagcgggtcaaattgctcctacgggaaatgggtcccaacaagcagtttggggggtttgcagggcttgggaagcagcggatgattcccccacccctccaggagcaggagaggcgaaagcagctgcggacacgcgggggtccctcctttccttctctgtccggggttgggaggccgtgggcgcggccgagtggagaggaatttgcctctgccctgtgagctcgccaggggtattggaacgcgtgcgtaaacgctggggcctctctggcccagaagtgcctttgagtcactccgaagttctacaggttcctgcagtcagcacctttgtctccccgctttccaccccactcctcctgggtacatttttgcttacaaccaccaaaagatgaagacaggaagattcgtactacttaaggacggggatttctcgtctccgagatcatgtgtgtagtatgtcgctttacagaatgtttatagactgttttagcctctgaagcattttggagacatggctctttccctttttctttttcttatgaagccttatggagcagtggagactcctttcctttcgctagagcaggccggattccggctctatttttttgttttgttttgttttttaaaaccttcagccaactcacaccatagattccggctctaactgcaattggaaaggcactgctccctcccagtcgcaccggggtgggcctctaagcctttctggattttgcatggtggggttagggtttctgcctgcccctctcccatccccccaactcccaacctgagccaaataataagctgaaagttaatttaaatcagggctgcgtgtatctggttagatattggtgagagagtgtgtgctggagagcaggagggtttgctatgcatttctctggtgctgtgcagaaatagatggctacaaaacatctcatctgtatgcctgtgtagatttcagctctcttcccaggcaaagcattttcacaaatcttgtttttaaggatgagttggtttggatttttcttgttctcatacttaaatttcattaagataattgaaagggatttgagtgacctgatagatttagttctagttgggaattttggtaggggtcacatgattttcatataaattgagcttggtttaacaagaattgaaaatcgagggagaagtcatattcccgtaaaaagaagcttaaagccatagcctgaattggttaggaaaaaaacataagcccattttacaaattctaattgttattatgtttggtcagtatgtcttaattttgttaaaatgttgaataaataagcaaatggttgtgcctcaaggactggcattttaacatttgagagagtttctaaatttaaaaatgaaatgttttggatttttacaattcatcgagctacatgtaaatacagattactgtgccttcccctgctgcttttcttttgctaaccgatgggaatttctccccaggtgtaggggattaatttaaaaacattacctgttaacaactgcctgttttattcttaaaggcttttgcttagtccaaaagcatatatatacttagttacttgttactttataataaacaggagttcctctttaggaaagcacataaggtaagatgtcaccagtgacagcaagtatttatcaatgtatcttcagtttattaacaatgtagatttaaattttcaagttcatttttcaagttcatttttaacaatgtaaattgaattttcaagttcattaaaatgctcaggattttaaatgatacagtactatcttactaacaaagtaaacagggatgagaacattggaggttgtttttactgatagaacaatcatgttccttgcttgtgttgaaatgtcttaaaagtagagcctttggctgggcgcagtggctcacgcctgtaatcccagcactttgggaggccaaggtgggtggatcgcctgaggtcaggagttcgagaccagcctggtcaacatggtgaaaccccatctctactaaaaatacaaaaattagctgggcatggtagcaggtgcctgtaatcccacccagctactcgggaggctgaggcaggagaattgcttgaactggggagctggaggttgcagtgagccatcgtgccacttcactccagcctgaacaagagcgtgaaactctacctcaaaaaaaaaaaaaaaccttttttctctgcctctggaaatctatattacagttattttaactgacccttggagctgtgatgcagtttcctatatctggactgttccaccattttcataggctctggaagcgggcagagaaggcatcagggtgaccacatgcccagcacctaagggaaggtcaagaggttgtactgactgatgggggttgctctgatagttgaatgccacaaaccaatccttgccaagcctgctggactttagggtggagttctttctgcttagcagtcatttcattccatcccatcatcatgtgggcatctgaggcaggcacacccacatgtgcagcagtgacctttgtacttgatatacaaggcatgtcaggaacctggtgctggagaatgcacgctgagatggatgaatgggcttgcactgactaaacaggggagcaggcccaggaggtgattggaggcttggcaggctggcctggctttgacttccagtggagcttggggggggaccctttcaggaagtagtaaggttgaatttggttcagaccaagcttagctcccaattactgaggtctcaagggaatgtggaaggaatgtggcttttctgcattcagatacccctcagttggggaagattatagcagttactttacagacattgaagtctcctgcagctggactaaagagaagattgcattggatatctgtgatagtgttgcactctctattctaaatataaaagatacagaacatgaagactttgactccgaagtataggctcaacttttttccctccaccttggaagtaagggtaggtgtggaaaatagttggtacttggaaatgttgtagctgtgtttggttggaagagctgctggtatcctgtggggccttgtttgtgcccctatgtgattatgtaaatagcactgatgtccttttttgttatgttgtgggctgttgggcatgggagagggaagaggaaaattgctgacactggggaactgagaggatggtggttttagttcaatttccattactttttaaaattacgaaaataatttttcatatgttcagttttttagaacctaacctttttgttgttgttgctgcctcctatgtgatgaagaacctaagcatatttttattaaacttcctcatgatttagcggttggcattgtttaggattatgtgtaggaaaaatacatttgaagaaaggagaaaaaaataataggatattatagttaatatttttctaggcaggatcctttacctttttcttcctttcagggtaggattttttctatttttatttttatttttatttttatttttatttatttatttttttttaagatggagtctctctctgttgcccaggctggagtgcagtggcacgatctcggctcactgcaacctctgcctcccaggttcaagcgatccttctgcctcagccctcctagtagctgggattacaggcatgcgccaccatgcctggctaatttagagtaagatcttttaaaacagactgtggtgcctaagctcaaacgttgttttttgtttgtttccttaaaaaagaaaacagtgatagttgcccaacactatgaatgtatttaacaccattgaattgtactcttaaaagtgattaagatggtaaattttatgtgtatttaccacagtaaaagtgggggaaaatgcaaaaaagaaagtgaagaacttatttccatattagtcttgtgtttaaaatgtaaattggatagaacttataaaagtcatcggggttttaaatgtaacttactttaagtggctatttaaaagctagtgttgcattttaataggtgttaaggatagaataggctagtgtcatgaccagcaacgtgcccattagccagggcacatgatccttcaatgctgcctccgacttcaaagtcttaggacagcaaaagctgtttttaatgtagaacgtttaaacacaggtacgaatagcagtggtactccttccttatcagtgtatggcttaggtgaatcttgcgattcgggaaagtttctcacacatgcagagacttgaggttctgaatgttaggaaactttcttggctggttaaataattataaactaggttatctttcaagtgctcagtttaagatcagcgtgggattgcctaagtggttgtagctaaaaagattttttttcctaatttcatattttctcaaaacaaattcagagatcttgaaagatttcttactttggttttaataagagtttaaaaaaattagatgcatgttgataagtggcttctactgtatggctgtccacagtaactctgaggaagatgttacggaaacatgacatgtgccaggagccagtggaaatcgagaatcttggcttctgtttctggctttccttttgatttgtgtgatcagttacattctcttttcaggccagatgccattatgataaactacaaggggtatatagtattttgttctgaggttttgccattgtgctcaaaataaataggttatcagctaaggcttaaaaatatcttttggaattacagagatctggggtttttcctgtaaggagcttgacttaaattttttttctgtagctctgttgtttttgcctgtgtacctctttcatgcagttagcaagggggaaatgatctttgccacgctttgaaactattatgagcgacacaagtttagttaatgtgtggttataggattgggattttgtattaaagtgaagctgtcaaactaccttcatgtatttgaagtgactccattataattgtttttagcagcagcatccaggcagcaacttttctagcaataactaatttttggaaggtgtgagttatccattcagtaactctggtggttggtttggtctgggaggaaggagaggcggaaagacgagatggttagctgtgctattcttagctgagtttcctttatcaactgttgcctctgattcaagcttccagagtcataagacaggaggtggcagtgtggtagcaatgaccaaggggtaggattggtattcttagttaagatctcagccccataaatctgatgttacaaattggcttggattgccagaattttgcttgaaggctgatggcaagcatacatagttttgagtgttccattaaaattaagggtgtaatgtatcatggtctgaaattgctgtttggcaagtattcagtattggtaaataaacacagttctaaatattgacatattctgtgaattttgttgccctgaaggggactactttgtagtacataaactatagatattttagagaattatcctgagaccatataacttgattaggaaatagtttaaagttattgtagaaatatccttgggccaggcgaggtggctcacacctgtaatcccagcactttgggaggccgaggtgggtggatcacgaggtcaggagatcgagaccatcctggctaacacggtgaaaccccgtctctactaaaaatacaaaaaaattaaccgggcgtggtggcggtcgcctttagtcccagctacgcggtaggctgaggcaggagaatggcgtgaacctgggaggcggagcttacagtgagctgagatcgcgctactgcactccagcctgggtgacagagcaagactccgtctcaaaaaaaaaaaaaaagaaatattcttagaggaatctattgaactataagctgaaaggagcctaagtctttagaatgtctggcattattgcattattattagttgttgagggagctgattctattgtggttatggtatatcagttatctattgctgcataagcaaaccaccccaaaacttagtggctcagagcaatttattctttctcattctgtgtctgttaggtggtggtttctgatccacatgtgccactcaggtccattactaaactgggctaaaaggaccagggaatctttgctgatgtaactggccgtccttgtaacctttctccaaatgataccttattgttcagaagaagctggagtttttttttcctggcagagttgactgatcttaccctaagtgaaaatggaagctgctagtcttcttaaaggctgggctcagaattggcacattacttctgtcacattctattgattaaggcaagtcatcaggctagctcagattcaggggagatatggaaatagactccatctttagttggtagagtggcatgcatgtaccgagagaggaattgatggtggctatctttgtatgtcatcttccacaaattgaaggaagggtggagtagtggtttcaaaatgcttgcaacagaaaatacctgaaaattgcatttagcacagttgtaatattccggcaggagatgatatgttactagctttggaggtaatgagtagtggctattctctgtatagctgtaaggaacagccaacaggatttgctgatggattagctgaggagtatcagaaaagtgaagaattgcaagattttttggccagagcaactgggtggaagatggtgccatttaccaaaatggagaatattgggagaggagcagattcttgggtagaaaataggaactttggttttgatatggtgtttctaatacttactagaaatttaagtgaagaaggttagtaggcagatatatcaatttggagctcagggggagatgggacatagaagtgacatttggagacttcattagcttgtggcatttgaaaccatggaattggacatgatcatcaagggactgagcctatggctgtaggatgaaggaaagaccagcaaaggagggtgaggaaggacagtaaagtagaagaaagcaagcagggcaaactgtttctgggagataaatgaagaaagcctgtggagaaggagggtgtaatcagctgtgtagaataccaccgagagtgatgtagatggatgaataagtgagtgagggtggtgttaaatctcggcctggctctgctgtaaatagaaggagaacgatttacaaattttggagcaacctgggatgtaacctttctttcagaattcatttattcaatttttgttcactttcttagttttttatttatttatttatttgagatagaatcttgctctgttgacaggctggagtacagtggtgcgatcttggctcactgcagcctccgcctcccgggttcaagaggtcctcctgccacagcctcccaagtagctgggactacaggtgcgcaccaccatgcccagttgatttttgtagtttttagtagaggcagggtttcaccatgttggccagaatggtcttgaacccctgacctcaggtgatccacctgtctcggcctcccaaagtgttgggattacaggcgtgagccactgtgcctggcattttcttagtttctagaaatatctgagtacttatgtatatgttagagatggaagaatctcctcagtagatcctctgactcaatggacaaggcttgtctgtgacaaatgacgattgatctactctttttttttttttgagatggagtttcactcttgtcacccaggctggagtgcagtggcgatcttggctcacttgcaacctctgcctcctgagttcaagtgattctcctgcttcagcctcttgaatagctgggattacaggcacccgccaccatgcctggctgatttttttttgtatatttagtagagacagggtttcaccatgttagccaggttggtcttgaactcataacttcaggtaatctgcccacctcagcctcccaaagtgctgggactaccgctcctggccagttgatctactcttgcacttttttaacatttctggtgagtgtgagctcactttcgtttttgttttttttttttttttttgaggcagggtctcgcacggttgcccaggctggagtgcagtgatcacaggtgtagactacaggcacctacaggcacatgcctcctcgtctggctaattttttttttaatttttagtagagacgatgtcttgctgtgttacttaggttagtcttgaactccttggctcaagcggtcctcccactttggcctcccaaagtgctgggattacagacgtgaactactgtgcctggccttcactttcttacaaattcattctgctttcttattaacataacattgggaaaattgtctgaacctatcttaggttccaaaagagtgtagaccaagtccagttcttcttcttttttcgagtcagaatctcactttgttgcccaggctgaagtgcaatggtatgatctcagctcactgcaacctcctcctctcaggttcaagtgattctcctgcctcagcctcccgagtaactgagattacaggcgcacaccaccacacccagctaatttttgtatttttagtagagatggggtttcaccatgttggccaggctggtctcgaactcctgaccttgtgatttgcccacctcggcctcccaaagtgctggaattacaggcttgagtcaccgcacctggccccaagtccagttcttccaaatggtggtctaaatgcgtgatttgacaagcagaggttgaaactgttggccaaaacgtttatggatatcatgagccaggtttaaaatacctttacctggttattttagggcactggcataaattaagtattccttccattttgttcattaaacttttgctaaaagaaatagaagaaatcttttgggaggagctaaattccctcatttttacatttaaaaaaatctggtccttggtaaagtagcatgtttccccaattatgaatcctgtctttggtcacaatagtgaccaaaactattaatcaaaaactgggtgatatgttagatcagttgattttgagataggggacttgttctgaataactcctttcgagacttttctgctgtctatgcaagtcctttgatcaatagagtactacttccaggatgtatttaaatattataagaaaggaaaactaataaaaatgagatagcacagtagatgctttaccaaaggattctccatagaaccctgggagaagcaacctgcctaaggccctccagataatcatgggaacccattgccacctgctgcaactctgcctgacttcatccctcccatttaagttgtccaaatcctcaaagtagcttgcacaggagcccaatcatgtttgcagtggcaagtcagagcagagatgtcctatttcttgccttctctaagtacagaaatcctgtttggcttttttgaagggttgatttatcttctttatttaggaaaaagactagtatacaggtagtctgtgccccagggcttattgtagaataaaaacatggatatcctgttttaagacagaaaaatgagactttttttgtttcaatgtgttttttagtagcttcatcttaatataagtggcttgcggagaagttggagaggggcctaaagagataggaggttagagcagagggcatggggaggtagatgtcacggctttgtctcaggaggctgattgtggttcctggggatatgttcttagattgcaagaggtagaggtatctggagtggagtccacggtgtctgtctgtctcagcttgttagcaagttttgtatgaccctgacatgcagaaaaaaatgtcttgaatgtgagatactgctgaggaacaggagagtaggaaggagaaactatgctgaaacctctcggtgaggagactggttgcttgccacatgtgtctttgttgaactgaagggaaaagccaggaggatgtgggatatgaggtctagatctgggcttgttttgtgggatatgaggtctagatctgggcttgatttccagctccacttactaaatgcatgctgtagcttgaggatgaggaatttgaggtcttgggaagttagaatggacatgatgcttcataggatcctgttggacaatgtgtgtaaaggatgaatacaacgtcacccagtagtcattccaatggaagccgttgtatttttctccttgagattcagatggggaagctggatggatgtaaatagatttgatggtgataacagaaacatggaagatctttgttctcttttgggatgtggactcaagtaataatctgcaggtggtgtgtttttaatttacaatgagcatgtattaccttttttgttcagatacaacatagatacaacagattgtataaatattaaacaggttgataatttttacatatgtgcacattcagattaattcaaaatacataaaatgtggaaaatgtttttcaatcctcactctctctagtagttcccagggcttgcttacactcgttgctgaatatattttctagaagctctatgcatgtgtccacagacatctttgaatatagtaatgaaatcatactgtttataatttgtgcttttactaaataatgtatcctgaagaatcttcaatgtaggtacaaatagttctcttttgtaaccaacagatgcattgttcagcataggtgtgcaataatttagccatccttttcatagtaactttattcaagtgtacctacgtgtatgccatcagacttcttgttgagaagtttaaaaaaaatttttttttttttgaaacagggtcttggtctcgcccaggctggagtgcagtggcgcgatctctgctcactgaaacctccacctgccgggttcaagggattctcatgcttcagcctcctgagcagctgggattacaggtgtgtgccaccacacccggctaatttttgtattttttggtagagacggagttttgccatgttggccaggctggtctctgaactcctgacctcaagtgatcctcctgccttagcctcccaaagtgctgggagtactgagtgagtcatcgcactcagcccctggttgagaatttttataacgtaaattcttaaactgggaattgttatgtcaaaagatgtggacatttaaatttgaaagctctctgaaaaacctaaaactaaatttcttctttgtttttgtttttgttttttgagacagagtcttgctctgtcgactgggctggagtgcagtggcgcgattttggctcactgcaacctccgcctcccggtttcaagggattctcctgcctcagcctcccgagtagctgcgactatgggcgcgtgccactacgcccagctaatttttgtatttttagtagagacggggttcaccatattggttggccaggatggtctcgatctcgacctcgtgatcccctcgccgcggcctcccaaagtgctgggattacgggcgtgagccactgcgcctggcctcaaaactaaatttcttatgttgacataattagttataagtttgacaacaaagagcttctttcaatgaagtgtgcagtgagaccgtttgagtaagaactgtctcatcaaacatggaggactatataattgtaggaacacactcttctaccatggatgtgctaactctgacaagtctttgcccatttcatttgtgccccttgtatataaaaattaagtaaaaagctgtaaagctgaagttctgataccttatagctaagatgtctaggactcatgctctcccgtacttagcaccttaaattttgcatcctacttcagaaactaacagtagtttcttgcggaggaaacttcaagaaggtccacattttgaggaggaatttgattaagaattagcttccaaaagaaggtgctactcagcttttggtcccagcagggcagataatgagagaatctagttaagagaacctgtggtaatagtggttaaaaaaacaacaaaaaaaatgctggttgaaaagtgactgagctctccccagatgtcttttttttttttccagctggttttgcaaaaaatggagaagctcttgctctttctttggagagttaagttgaaatttttagtttctgtatttcttgtatgcgagtttacctatttttgcatttttttgagtttctgaaatgacttaatatcttatgtaaatttttagtttaacaagcatagattaagtgcctgtgctcatagttgattctatgctaggtttcaggggctagaaagaagagtaagaccctgccgggcgcagtggctcatgcctgtaatcccagcactttcggagccagaggcgggtggatcacgagatcaggagattgagaccatcctggctaatacagtgaaaccccgtctctactaaaaatacaaaaaattatccgggcgttgtggcgggcgcctgtagtcccagttactcaggaggctgaggcaggagagtggctcgaatccgggaggcggagcttgcagtgagtcgacatcgcgccaccgcactccagcctgggcaacagagggagactccgtctccaaaaaaaatagtaagacccttgtcctgaagaaagacatggagtacagtggctttcactttgttctgtctgatttcctgggtgacagtctttttatttttcaacagtaatggtggttcactgtggtagtgatcctaaaggtgggttaaaatctctccaagtaaagagaagttgtcaatatgtcatagggtatatgtgagatgccccagaacataggaggagggagcattattaggcttagcctggttgttaccagtgagaaatacattcagagagggatgtgaaaataggcagaggctaataaccgtgtgcacccaggagggaagaggcagaagggacagcaggagccacctcatgtaagtgtgaaacatcctggggtgtgtgtgggaactacaagctgtttgagattaaagaggctggagtgtgaggcaggatggtgattgaggctgagcggagagggcagctggagcagcctgcgtgcgtgatggagtgactgcattattctcattcttcatgtgtttgactttaggagctaagtagtttagttcatgccatttagcaaatgctgatttgggattatcatggaagactgatgcctaggttaattttggaaaatgctcaccagagatcccactgaacttttgcgtcttcagtactttataagcatgggtctggctatgctcccaaaacatttcatggagttcacagctgttcttagggtatcctctgacagggtaattaaggcaaattgtgatacaggactaggaatcttataataaggttgactgagcccatgtaatttttttaaggttagctgtggcaagacaatcaatggtgctggttaaagctcctggtattatatgatttttgttaaagacatcccaagtgatgtaatgaacctttggagaaaaatgtgatagacacttctgtgtgcacgtactactacctaaagttggggacagcagtacagcacagtggtaagggtgggccagtggcatcttgcttggagctacacaggcctcagtaggaacctttgcttagccctgtgatcttgtgcaaactgattaaactctgagatttctgtttttaaaatctgtaaatgagggtaataagacctatggcagagggttgttgggaattaaatgataatgtctgtaaaggacttcttggattatctggtactaaagtgatattgtctcactaataagtttgtgtgtttaccatgtggtagtggaaaatgggggatgggtgtgcctattcccgtatgaccccgtggtttatggtttatgtttcatatatacggagacataggagtgtttcacatttctttgtaaaatatgggttatgcactgtgaataagttaagaattggtgctttatatctaggtgcatggatcttagaatccctaaaatgtgtttagttatggaattatcttaggagagatcatacgtaaaggaaataatagaccaggagatgaattcctaattccaaagaggtagaaacagtataaaaatgaacgaaggatgagaagtggcagttcagaagggcacagctgaaaagtcagtctgtgtacaaaaagatatccaatctaggctgggcacggtggttcatgcctgtaatcccagcacttggatgaatcgcttgagctcaggagtttgagaccaggctgggcaacatggcgaaaccccgtccctgcaaaaaataacaaaaattagccaggcatggtggtgcgtgcctgtagtcccagctaactggggggctgaggcagggggatggcttgagcccaggtttgcaccactgcattccaagctgggcgatagagtgagatcctatttcaaagaacaacaacagcaaaacaaacaaaaaaaacacccttgtctaactagttattagggaagtgccaacgataatgacattttctgcctatgaggttggagaaaaatgaataagattggccgtatctggtgttggcaaggttgtggaggcatggccactcatatagctaaagagtaaattggcaaagacttcttggcacactatttggcagtatctattagaacttaaaatgagaatacctttcaactaagtgttatggaaaacaacccagtcctcatggctttgtgtaatctgtaagcacagttttaatcagcaatatcgtacaatattgtaaaagagctccatccaaatcgccaagcaggaattggtaaaaagggtctctagtaggtgggagtctgtaaaacacagaattcttaggttatactatattacacgtcacattttaacagtatcgtacagataatctgaaactaacactgttgtctacttttcgagcaaaaaagatctctagctctaattttactgtttgggacattttgcaattgcctatctttgagttgtagaaggggaatttttgtaaaggaagacaatactgagagtccttccttttttcttcttgtttaaaagtgctttaaggccaaggtgcttggctcatacttgtaattccagcactttgggagaccatcctgggtaacacagcaagaacccatgtttatttgtattttgtttgtttgtttgtttgagacggagtctcgctctgtcacccaggctgaagtgcagtggcgcgatctcggctcactgcaacctttctgctcgctacaacctccgcctgctgggtaagggattctcgtgcctcagcctccagagtagctgggactacaggtgtgcgccatcatgcccagctaatttttgtatttttagtagagatggggttttaccatgttggccaggatggtctcgatctcctgacctcgttatctgcctgcctcggcctcccaaagtgctgggattataggtgtgagccactgcgcccagccctgtgcgccccccacttttttttttttttttgagatgagtctcgcactgttgcccaggctggagtgcaatggcacgatctcggctcactgcaacctccgcctcctgggttcaagcgattctcctgccttagcctcccgagtagctgggattacaggtgcccaccacttgcccagctaattttttgtatttttaatagagatggggtttcaccatgttggccaggctggtcttgaactcctgacctcgtgattcacccgtctcagcctcccaaagtgttaggattacaggcatgagccaccacgcctgggggaacccatgttttaaagggaaagaataagcactttaatgttcaactatttgtaactttgaggcatgtttaattcctttctccataacagcaatttcacttgtagtattctattacaaagacatacttggcaaaaagacatgtgttttttccatattgtttaatagttaaaaataggaaataacctaaatggccatcaaaagaaaacataccctattctggccaggtgcggtggctcacgcctgtaattccagcacttgaggaggctgaggcaggcggatcacgaggttaggagattgagaccatcctggctaacacggtgaaaccccatctctactaaaaacacaaaaaattagctgggcgtggtggcgggcgcctgtagtcccagctactcaggaggctgaggcaagagaatggcgtggacccaggaagcggagcttgcagtgagctgatatcacgccactgtgctccagccttggtgacagcgggagactccatctcaaaaaataaaaaataaataaaaaaaaaaaaggaaaaaagaaaacataccctattctaaccatatattccttttttttttttttatcttgctctgtcgcccaggctggagtgcagtggtgtaatcttggctcactgcagcctctgcctcccgtgttcaagtgattctcctgcctcagcctcctgagtagctgagattataggcgcctgcctccatactaggctaatttttgtattttcagtaggacagggtttcactacgttggccaggctggtctcgagctcctgacctcaaatgatctgcttgcctcggcctcccaaggtgttgtgaatacaggcgtgagccaccgtgcccagccctaacgatatattctgtggcatattttgtagcagttataaggaatgatagaggtctgttttgttttgtttttgagatggaggttagctgttgttgctcaaggtggaattcaatggtgcaatctcatctcactgcaacctccacctcctgggttcaagcgattctcctgcctcagcctcctggaatgataggggttttataaaaaacccattacatgttatcataaaattttaaataaaaaactcttttttgagacagagtcttgctctgttgcccaggctggagtgcagtgatgcaatctcagctcactgcagcctccgcttctgggttcaagcgattctcctgcctcagcctcccgagtagctgggactacaggcatgcaccaccacacctgactagtttttgtatttttagtagagaccaggtttcaccatgttggccaggctgttctcaaacccctgacctcaagtgatccgcccacctcagcctcccaaagtactgggattagaggtatgagccactgcgtctggccctaaaacactcttataaaagagaactgtttttcatttttgtaagtttctttggcctaagaggcaactggaaactggtaactactactgcattcagtttgtcgtcatgtattgttttgattgaagtatatgaggaaaatccagccacatatggatatgtgtttagaaaaggaaggagtataaataattacagatattctttggtgctacatcaaaatatgacaagtggtagttaaaaaaaaattcctttttaaatttaaattgagacaggatctcactatgttgtgcagactggtcttgatctcctgggcttcaagtgatccttgtgccttggcctccccaaagtgttgggattacaggcgtgagccactgcacccagctacaagtggtagcttttttgcggaggtgcgggggtgggggcttactggtaaagaccggaaaaccacctgctggacaaattctaaaagagctgtaacaccaagtggtagtttttttaaagtctagtttcaatgtggaatctgaaatcatatcagtgaattttttttgtacttgttacaaaaagaatccattgattgtcttatactcggaaaggatctttatccacgaggattgggaggctgtcaaagctcattggtaatagatagaagtttttcaaaatactagtttttacttaaaagctcaaatttagtcatttggcaacagatacttcaggaaaatcgttttacctgaagtgacagactcattttattcctttttgagaaaatatctgccagatactcaagtttttaagtaactacattttgcttctagttcttcaggtagaaacggtgcttgactggttcgtcttgcaactcaaacaactgcacagtgctttttgtgcagacaaccaggataggtagcagaagtgctttatgcatgcttcccttttcttcatacagatcataaaaggatgtatactgaaggattgagattaggacatttttaaacagtttgcataattcttcgctgcaaatgccagagaagaatacagtgactactagtacagttcagtgccactgcattgcttcatgctaaggaccagcagctttactcatcattgcctttgctctaccagtgcaaatacaacacagcagaaaaggcaaataacatcttagtgttattaggaaaatagtcttaacttcttggacctcctgaaagtgtgtcagggattccttataccatactttgagaatggctgctctgctctaatgtgtggtttgaaattagatcaggtggctgggtgtgatggctcatgcctttcacatgaactttgggaggctgaggtagccacatggatcacttgaggtcgggagttcgagaccagcctggccaatagagttaaaccacccccgtctctactaaaaacacaaaaaatgagcggggtgtggtagcgcatacctgtggtcccagctactcaggaggctgaggcacgagaatcccttcagcctgggaggcggaggtttgcagtgacccaagattgcgccactgcactccagccagggcgacagagtgagactctctcaaaaaaaaaaaaaaaaaaaaaagaaaaagaaaaaggaaaaaaaattgtatcaggtatttttttagacggagtctcgctgtgtcccaggctggagtgcagtggcgctatctcggctcactgcaagctctgcctcccggtttcatgccattttcctgcctcagccttccgagtagctggaactacagacgcccaccaccacacccggctaattttttgtatttttagtagagacggggtttcaccgtgttagccaggatggtcgcgatctcttgacttcgtgatctgcccgcctcggtctcccaaagtgctgggatttcaggcatgagccaccacgcccggcctgtatcaggtattctggtgaatatgtatttacatcataacaagagcaagtgaggattttatgcaattccatggcatattagccttgatagggaagtcagtttggaaaaaaaaaaaagataataaatcggtataggaagataagcaaatgaaaaaatgtcaaattctaaacaaaaagaagaaaaatctaagtgcatgaaagataaaatattgccaggtgtgatgtctcacgcttgtaatcccagcgctttgggaaactgcagcccagaggattgcttgagcccaggagttcaagacagggtgggtggctggatgcagtggctcatgcctgtaattccagaactttgggaggccaaggcgggcagatcactttaggtcaggagatcgagaccagcttgaccaacatggtgaaaccccatctctactaaaaatacaaaaaaattagccaggtgtggtgttgtggcctgtggtcccagctcctcaggaggctgaggcatgagaatcgtttgaacccaggaggtggaggctgcactgagctgagatcaggttactgcactccagcctgggtgatagaacgagactctgcctcaaaaaaacaaacaaacaaacaaacaaacaaacagcctgggcaacatagtgagaccctcatctctacaaaaaataaaaaattagctgagtgtgatggtgcatgcctgtagtcccagctacttgggaggctgaggtgggaagattgcttgagcccagtgagctgcagtgagctgtggttgtgctacgccctccagcctgagcaacagagtgagatcctgtctctaaaatgtatttttgaaaagataagtgtttagaataaacagttaaggactgctgaaaacaagtacacatgaggaggatgaaatgaatttggacatctgggcatctatcgatacacttaagttcttcaaactgaaatgaaccctacatgttgataccaggtcgtgcctaaggaaatgaatagcatttgtttccttctgttattcctaaaactttaacaaaatctaataatgatttcaggaccccatcaacatttcttctgacagtttacattttgaggctggaaccttgtggtcactcactgtatttttaaggatgaccaaatggagagtccggcctctgacatgtttcagacagctttccttgccctgggtaaatattagttaaatgtaaaaaataactggctgacttttatcactggataggttcttgtctttttttatttttattttttagccagtcttgctctgtcactcaggctggagagcagtgctgtgaccatggctcactgcaactcgaactcctggactcaagggatcctcccacctcagtctcctgagtagccaaaactacaggcacacaccatcatgcctggctaatttttaaattttatttgtagaaacaggatctcactgttttgcccaggctggtctcgaactcctgagctcaggtagatctgcctgccaaattccagcctccccaagtgctgagattgctggtgtgagtccctatgcccagcctgtttggtctcttttaatctgggacagttccttggtcttcatttttttgttgttgttgtttttttctgagacagagtcttgctctgttgtctaggctggactgcagtggtgggatctcggctggctgcaacctccgcacccaggttcaagcaattctcattcctcagcctcccgagtagctgggattacaggcacacaccccatgcctggctaatttttttgtatttttagtagagacgggattttaccatgttggccaggctggtgtcagactcctggccccaagtgatctacctgccttggcctcctaagtgctgggattacaggcatgagcgacctgtaatccttcatttgatttaatgactttcctgtttttgaggagtataagctagttttttgtttgtttgtttattttgtggaatgcccctcaatgtgggtttatctgatgtctcccatggttagcatcaggtgaggctgtgtgtgtgtgtgtcagtcagagtcttactctgtcgaccaggctggagtgcagtggcgcgatctcggctcactgcatcctctgcctcccgggttcaagtgattctccctcagcctcccaagtagctgggattacaggtgcccgccactgcacttgactaattttttgtatttttagtagagatgaggtttcaccatgttgggcaggctgggcttgaactcctgacctcaagtgatcctcctgcctcagcctccgaaagtgctaggattacaggcatgagccaccgtgcctggcaccaggtgaggcatttttgatggaattcctcagaagtgatattgctttcagtgcacctcatctagaggcacatggtgtttgttgatttttgtttcagtagtggtggtaactttgaccaattggttaagtagtgtctgccaggcttcttcagggtaaagttactattttttcttttgtaataagaactttgtggggagatattttgagacaatgtagagattctgtctctcaatactttcactaattttagcatccattgatgattcttgtcagcaactgtcactgctactatagtggctgtcaaatagtggctttctacttctctttattttttctacatttattatttgttttttattttgttcaagatggagtcttgctctgtcgcccaggcagcagtgcagtggtgcgatctcggctcactgccacctctgcctcctgggttcaagtgattctcctgcctcccgaatagctgggatttcaggtgcccgccaccatgcccagctaattttttgtatttttagtagagatgaggtttcaccatgttggccaggctggtctcaaactcctgacttcgggtaatccacccaccttggtctcccaaagtgctgggattacataaaggtatgagccaccacactgggcatctacatttattatttggaataaactttactttccccaatttactttgtttatattaatattagactcatggaatcttattgcatagattataacatgttacagttgttattttgttgctcagactatggaagtgaggttttttaaaggcaagtgtattaacgtggtggtattctgaaggcaatgattcagcacagagggaaagatgattatgaccatctaatgtccaaagattatgatcatctaatttcaaagatgaaatctttgcttgtgcttcattttattttttcttttaatttgttttgtgcttcattttagacgagcagctttatacttactacagacttatctacctaaatgtaataaatctaatacttttctggggatatcttacaactagtggaaataaggtcattcttcatatacatgatgcattgccttaaattcagatactgccctctacttaaacataactattgtatgttgtgtatgtcacttatggtaattgttaatcacctgcaggttattttttccataccagtctaactttagctcatgatcatgcatttttccccagtctctggcattttgatgtgctatctataacaatattggtaaagcattgttacacgcttcttcagtgttcctatttattcttaggtctcttgatgaataatgtacataccgaaacaaatctaatggaatcttaagctattttctgtgtacaaaacacccacaggaactaagtaaaagtagttttacttagtcatactaagtaatactctatagtgtatacgaaacacccgtaggaactaagtaatacttagttacactgtatacaaaacacccacaggaactaagtaaaagcagttttacttagtcatactaaataatactctatagtgtatacgaaacacccataggaactaagtaatacttagttacactgtatacaaaacacccacaggaactaagtaaaagtagttttctctaaattaattaaaaagcttggaaggttttagaaaaacagtgcacatggcaaaatttaaatgatactttatttttctccttcctcaaatgcaactactgtgcagtttattgtgttcctttagggaaaatttacatgtatatgtgagcatctgtgaatgtatgcttttttagaaaaaatacgacttagcaccataccttactgttttgttttatttattgttgttttttagagacagggtctcactctgccgcccaggctggaatgcagtggtataatcatagctcagtgcagcctctaaattctggatggaagtaatccttccaccttagcttcctgaggagctgagaccacacctgattaatggctttctttttaaatttttagtagagatgggaactctatgttgctcaaactggtcaccaactcctggctttgagtgttcctcctccttcggcctcagattgctgggattactggcatgagccaccgaacccaactacctcactgttttaaaaagcaatttttttttttttttttttttttgagacagagtcttgctctgtcacccaggctggagtgcagtgttgcaatctgagcccactgcaccctccacctcccaggttcaagcgattctcgtgcctcagcctcccaagtagctgggattaccagcacttaccaccatgctcagctaattttcgtattttttagtagagatgggggtttcaccatgatggccaggatggtcttgaactcctggcctcaagtgatccatttgctttggcctcccaaagtgctgggattacaggtgtgagcccccgcacctgacctaaaaagcaattttaaaggttctttggaaggtgggatagggaataattgcagtaaagtgatatgttaaatactattaaagtagtggacttgatttaggagtaaagtatattcacccatatgtaggtcaataatacattataacctatttaaacatcttgtcattaataggatattaataatatcttaggtttcattattgtacttgttaaagatttttctgatattcaggaaactccagcatgtggtttaccccaattatgatggaaagaagaaatgtgttgtgcaatgtttaaccaaaaataaaaaaagaacaaaacccccaaacctctgaaaacctcagagcagtctttttaaatagcatatgcacaacacattgtattaactggaacttgttcagtgctctaaatttaattctaatggtgttttttttgttttgtattttgttttttgagacgaagtctccctctgtttcccaggcagaagtgcagtggcgcgatctcagctcactgcatcctccgcctcctgggttcaagcgattctcctgcctcagcctcctgagtagctgggattacaggcgtgtgccaccatgcctggctaattttctgtatttttagtagagacggggtttcaccgtgttagccaggatggtctcaatctcctgacctcgtgatccaccctccttggcctcccaaagtgctgagattataggcatgagccactgtgcccagcccagaaaatcttgtatattttattttttatttttgcttattattattattatttttgagatggaatctcactctgtagcccaggctggaatgtgcagtggtgtgatctcagctcactgcaacctctgccttccaggttcaagagattcccctgcctcagcctcccatcccaagtagctgggattacaggtgcatgccaccacacctggctaatttttgtgttttcagtagagatggggtttcccaatgttggccaggctggtcagcatggcgaaaccccgtctctactaaaatatacaaaaataggccagtcgcggtggctcatgcctgtaatcccagcactttgggaggccgaggcaggtgaatcacctgaggtcgggagttcgagaccagcctgatcaacatgaagaaaccctgtctctactaaaaatacaaaattagctgggagtggtggcgcatgcctgtaatctcagctactctggaggctgaggcaggagaatcgcttgaacctgggaggcggagtttacagtgagccgagatcgcaccactgcactgggtgtggtgtcaccagcctgggtgacagagcaagacacagtctcaaaaaaaaaaaaaaaaaaaaaaaaaaaatcactgtaatgtttaaatatgtagatctgattgatacggtttacttttggttgtggacgatttgtgtttcagtattaatatttaactttttcaaaataagtttaataacagtataatttaagatactgaaatttcactaaactgcttccaaatggtttgattaaacataaaattctagttacctggttttatggtacattttaatttggtttacatactgccaccataaatctctgaatttatcaaaggactagatggacattttagtaaaataacatcaaaacatgtaaaatgaatatttataaattaaaattgaaactgtaactccttaaaatctagagattggtatatgcaaagtctgattataatatgttatttcttgttattttaaaaatgaaaaaaacagactgggctcggtagctcaagcctgtaatcccagccctttgggaggctgaggtgggtgggtcacctgaggtcaggagttcgagaccagcctgaccaacatggcgaaaccctgtctctactgaaaatacaaaaattagctgggcgtggtagtgggtgcctgtaatcccagctactccagaggctgaggcaggaggattgcttgaacccgggcgacggtggttgcactgagctcagatcaggccactgtactccagcctgggtgacagagcaagtctccatctaaaaaaaacaaaacaaaaatggaatgttattctatgttattgaccttgcataaaacctaagatgacattaatccgttacacaactgataaatctgccttaagggattacattttaatgttgttgatgtttgcagtttgatttccattgcttacttgaaatttcattttctttcaacttatgttttgagccctgccaatgacaaccattatgcctaggtgctagggagacagaaaagcattaatttacaattttgaaagagaaaaattaactttttaaaaaaattttcttgagacagagtttcactcttgttgcccaggctggagtgcaatggcatgatcttggctgactgcagcctctgcctcccaggttcaagtgattctcatgcctcagcctcccgagtaggtgggattacaggcatgcaccaccacacccggctaatttttttgtatttttagtagagacggggtttctccttgttggccaggctggtctcaaactcacgacctcaggtgatccgcccgcctctgcctcccaaagtgctgggattaaaggcatgagccaccccgcccagccagaataattaacattttatagtaatcttattcaatttataaacagatttatgtgaatgatacaagtataatatttttaaccactgtcataattggcagtcactttaaatgcttagctggactgagttttcacactctctgagtaggtaatttgcaatttctggtagaggtgggagcagttaaggttctgcaagtctttttttttttccctaaatctacagaattttaacatatgtgtcttttttttttttttttttttttttttttttaagagatggagtctcactcttgtccccaggctggagtgcagtggcacgatctcagctcactgcaacctcggcctcccgggttcaagcgattctcctgcctcagcctcccaagtagctggaactacaggcgtgcaccaccaagcccagctaatttttgtatttttagtagagatggggtttcaccatgttggccaggatggtctcgatctcttgacctcatgatccgtccacctcggcctcccaaagtgctgggattacaggtgtgaaccaccgtgcctggtcttaacatatgtgtctttattttttgcagagatgtgatctcactatattgcccaggctggtcttgaactcctggcctcaagcgatccttccaccttaagatgtgtgtcttgttagaagtaaatcagatctggtggttttgatgctatttattcagtctcataactgtcatgactctgaatatataggctcttgaaatggtagaccaaaaaatacttcaagtatattatttgctattcttttctgcttgtaggattctgcaactaatttttaagttatttatgtgtgtaaagccttcccaagtcccaggatacctaaagttgtaaacataggggtaaataactatttaaatgatgtctgatagataaatctatagagaagggattcagaatcccaaatgcttgcaactgatattgtattcttatgttcaaggtttaatcgtcagtagagtaggcttaaatttgtttatgtatatgatgtgggacctcttagaaaaaagctaaaactttgacttaggtccttctatagccctagtagagcctgcgtaaaaataaaaatgacctgatatgtggacaggtggctggtggttaggggttgttggagtcctggtgtgccgctcccccaatagacagtatgtcgggatagcttatgtttgcacttgattctactagtctgtttcaggcagttgttaaagtacttggctgtgtaacacattcttaaagcttacgcatttccaaaacactgatttcaacatttttacaaggtgttaaggcccatcccactaaagtgtaataccctatacagattgttaataacagatttagtttatgatgatttttcaaattataaagctttgttttgaaacagagtctctctctgttgcccaggctggagtgcagtggcacgatctcggctcactgcaacctctgcctcctgggttgaagtgattctcctgtcttggcctctgcagtaactgggattaagggcacgtgccaccatgcccagctaatttttttttttttttttgaaataactaaacaatttctgctctgttgtccaggctggagtgcagtggcacgatcttggctcactgcaacctctgcctcctgggttccagtgattctcctgcctcagcctcccgagtagctgggactgcaggcgcgtgccaccacacccagctaattttttgtatttttagtagagacggggtttcaccgtattagccaggatggtctcgatctcctgacctcgtgatctgcccacctcggcctcccaaagtgctgtgattacaggtgtgagccacctccctcaactaattgtaaagctttcaaaaaagagatagaaggtttggcagagaggaaagggccattgtaaatttttgtggttctgttacagagaaagcccgagggcaggtagatgtgctctaggtactgttgagtgtgagtactatgcaaaggtgagagccatttgtttctatctttggtgcttggtgctcccacccacctcagtttctttgtttatgttaaatgttttgaccaattatatcaacactggaaaggagaccaagagtttttcttcctttgagagacttgtatcctctgtgagattggttggttacgtgttaaactcataggggtagtgtgtgttgtgtaatcacactgattataagcatgatatcacaacctacattatcataagggacagagtttaaacatgtctttttttttttttttttttttttgagacggagtctcgttgtctcccaggctggagtgcagtggcacgatcttggctcactgcaagctccgccccctactcacgccattctcctgcctcagcctcccaagtagctgggactacaggcgcccgccaccacacccggctaatttttttttttttgtatttttagtaggtggggtttcaccgtgttagccaggatggtcttgagatctcctgacttcatgatctgcccacctcggcgtcccaaagtgctgggattacaggcgtgagccaccgtgcccggccaaacatgtcactttttattttattttttattttgaggcaaggtctctgtccccagcccggagtgcaatggtggtatcatagctcattgcagcctcaaactcctgggcttaagggattcttttgcctcagccttcgagtagctagggcttacaggtacatgtcactgtgcccagctagttttaaaaatttttgttgagatgaggtctcacttcgttgcccaggctggtctttagctcctggactgaagtgattctacttcagcctcccaaaatgttaggattacaggtgtcagccaccatgcctggcctataaacatgtaactttttaaattgaaattgaaaaatatgtaacatttttaacaactataatggtggaaagtagaatcgttaaattttttttagcatctcagtcttatgagtttattaagtagattttacattattgctactggaaatctgtcatcttttctgagaaagtaatttaactggaagtgtgacatagttactgaagttttaaaggaccacaactagggttattataactaaatttatttaactaaatttttaaagattattttatcagcctaacaaccattataagcgtgtggggtccttgaaatgacttcccagtagaaaggaattaaaaaattttttaaaaatagagtcggtctcactgtgttgcccaggctggtcaaagggaacttcttgaaacatcatatgcattggatcttttgtcagttagtgtacttatttgtctcatttaccttagatggtgactgaggttggatatttgccttgaaatgatctatgttgatgtgaccttgagtcttctttataaaatttgtatgtggcccagtgtagtggcttggtggttcatgcctgtaattccagcactttgggaatgccaaggggggcagattacttaagctcaggaattcaagaccagcctggctaacatggagaaacctcgtctttacgaaaaatacaaaaattagccaggcatggtggtgggtgcctgtaatctcttgggagactgagacaggagaattacttgaacctgggaggtggaggttgcagtgagccgagatcgtggcactgcacttcagcctgggcaacagagtgagactccgtctcaaaaaaattaaaatttgaaagtaagttcgataatttctagtgtttcctccaggagattgggattcatgttgttattatattgaacaattttcctgaatatctgtgtaagtgagttttatttacacagaagccaaatagtattcatctaagataaaggtagacgtagcatggacattgggaggtatgagtttgaatttggcttttcgttgacttgcgttttgactttggttaaaataatcctttgaggctgtttccttaatctgtaaaatgggagtcttaaattgacctcacttgtttggtgtaagggtacagtggaaatgtatttcaagtacttggtatggctttacccataaggagtcactgaatagttttttacttttgttctcaatattggtgaaatcttaaagtttgttgttaaattgcagttgtggcagaaataatctggaaatgattaagcttcctatatgttaatgactttgttttgctggctagaagatgtaacttttcatgtacagcagcttttttgcttctatcagaattggcataaatatgaattgtgcagaattgtcttaatgtaacaaaggatttcatttaagtggacagtccagattgttttatttatttatttatttatttatttatttatttatttttgaaatgaagtctcgctcttgtcccccaggctggaatgcaatggtgccatctcggctcactgcaacctccgcctcctgggtttaagcgattctcctgcctcagccccctaagtagctgggattacaggtgcctgccaccatgcctggctacttttggtgtttttagtagagatgggggtttcaccatgtgggccagactggtcttgaactgctgaccttaggtgatccacccacctcagcctcccaaagtgctgagattacaggcatgagccaccatgcctggccgataattttattaatatacattaagttatagaacaaagtttaaaaagtatcctatatttgcttttttgttttgttttttttgagacagggtctgactctatcgcccaggctggagtgcagtcgcacgatctcagctcactgcagcatctgcctccagggttcaagcaattctcctgcctcagcttcctaaatagctgggactacaggcgcacaccaccaccatgcctggctaatttttgtatttttagtagagacagggtttcacccagttggccaggctggtcttgaactgctgacctcaggtaatccacccgccttggcctcccaaagtgctaggattacaggtgtgagccaccgggcccagccaatatcctatatttgaagttatactatagttactgcagcaaaataaatccaaatgtactttcctaggcaaaggaaggacatctaacactgtctaatgtaacaatcttagaaaattctagtttttttgtggtataggaaatactaatatcatctcaggttatgtgcatggaaagtatttaacatctctttactaccagatagtcatgtaaagttaaattatatttttctcttaaaaattccttcttctgggtactaacaagcccagagtttgattttaatggaatttaacatttgtgtcgatggtgacttctagatttaagagagtagggaaaaacagtggaaattttaaaagtaccacagaggagataatggtataataaatcctcctatactgatcacctagcttcaagaatcaccaaatgatgactggctttgattcatctctgtgcctcaatgccacacctccccaaattatttcaaaacaaattgaagacagcaagctttttacattcctaattcttcagcatgtatctctaaaagacagacttttaaaaagcatagacattatcattacatattaaaaaacatgacactaactcactggtattaaatattccaattttcctgattagttttttccattgtatttgaattgggatttaaataagtttcttccattatgattggttaataggtcttaagtttgttttacttaatgtcaaggattccctcctccttttttcactttgaaatttatttgttaaaaaatttagatgttggccgggcatgtggctcatgcctgttctcccagtactttgggaggccgaggcaggtggatcacttgcggtcaggaattccagaccagcctggccaacatggtaaaaccccgtctctactaaaaatacagtattagccaggcatggtggcacacgcctgtaattccaatgactcaggaggctgaggcacaagaatcacttgaacctgggaagtggaggttgcagtgacctgagattgcaccactgccctccagcctgggctgcagagcgagactgtctcaaaaaacaaacaaagacaaaaaggccaggcacagtggctcacgcctgtaatcccagcactttgggaggccgaggtgggtggatcatgaggtcaggagatcgagaccatcctggccaacatggtgaaacctcatctttactaaaaatacaaaaaaattagccgggcgtggtggtgggcgcctgtaatcccagctactcgggaggctgaagcaggagaatcgcttgaacccaggaggcggaggttgtggtgagctgtgagatcatgcccctgcactccagcctgggcgacagagcgagactccgtctcaaagaaaagaaaaaaaaaaaaactttagatgtttgtgctggagagtttcccaggtctggatgttgctgacagtgtttctgtggtgtatttttatatgtaattctgttctcagaagacatgatagggctagagacttcatcattttcaggatttttttttttttttttttttttttttttgagacagagtcttgctctgtcgcctgggctggagtgcaatggtgcgatctttgttcactgcaacctccgcctcccgggttcaagcgattctcctgcctcagcctcctgagtagctgggactacacgtacccgccaccacacctggctaatttttgtacttttagtagagatggggtttcaccatgttagccaggatggtctcatctcctgacctcgtgatccacctgcctcggcctctcaaagtgctaggattacaggcaggagccaccacgcctggcccattttcaggatttttgtgtttaattggcaaatatgtcataggtgagaaaagggaaaattttaatactttggccaaggttttattcattcaaggaaatgatggattaatgtgactgagttcaaatttgggaaaatactgatgtagttggggaagcatgttgcacttaagtgaaagtttttttttaacttgtttgtccttaagtgtggtaaacatacctgttctatctcactagaaggaaaaagagcttagtaatcaggaacaatttgctgctattggagactggtaacgtagcattgcatttgcattgtgttttctgctaggagaagggttatctacaaagcctagtgaaattatatcttgggagaaaagaaagagttgagttacctaggatgaggaatgtcaggcagaaatatttagatcaaacttgtcaaccttttgttttgttgatacattggagttctcagagtgcgtgaaactgagaattctcatactgagtttcttgaacacaattatttgcttattttctttgcctacttgtagaaaacattaaaaatggaaatataaacaagtctggctgtgtaagtctacctctgggaaacagtcttcaagctttggggtggtgagattattatagtttctaaagttgatgagaaggtggtataatttgataatgatcaactgcaactttcccacgaacaaaaacaaacccaaggatctgccttgtctaagaaccacatccacttagcagtaatacgaaataaaaactgttaatgtagacataccccgtattcaaaatacagtggttttaaaagtttagtaatcttaaaacacctcttcttgcaggtacagttttagtgatggttacttttatgtggaaaatacgtattccatataaaactttttctttttttttttttttttaattttaatttttccagacagagtctcactctgtctcccaggctggagtgcagtggcacaatcttgtctcactgtaacctctgccttccaggtttaagcgattctcttgccccagcctcccaagtagctgggattacaggcacacgcctccgtgatgcccggctaatttttgtatttttagcagagatgggctttcgccatgttggccagactggtcttgaactcttgatctcagatgatcctcccgcctcggcctcccaaagtgctgggtttataggcataagccactgtgcccggcctaaaactttttcttgattgttcttcaaattcccttgacaaacaaattaaatttaatcaattagttttagataagctctgttcaatagaaatacatgaactaaatatatatgattttaactttttagtagccacattaagtaaaacaaaggcccagtgtggtgatgtgtgcctgtatcctagctgactgggaggctgaggtgggagaattgcttgagcccaagaggttgaggctgcagtgagctatggtcgtgccactacagtttgggcgagagagcaaaaaccctgtctcaaaaaaaaaaaaaaaattagttattatatacaacctaatatatctaaaatgtaacagtataataaattgttgagaaattttgctttttttggtattgaatcttcaacatctgtatgtattttatccttacagaacgattcaattcagactagccacatttcaagtagttagacacatgtggctagtggcttctttattggacagagcagcttaagatgtacggtttctaaaaatcactgtttaaaaatatcttgttgctgggaaaaaaatataatgatatttataaaactagttttagctatggaaaagtatgggaataattaattttcagtgctactcaagcatgttagaggttttatatccaagttctttattcctttcttaccactctaattttttaggaagataagtacaatttactatattgtgttaatattaagacttttgaaagagctatgcttttaggtcatacaggcagtgaggcttttatttaaatagtaactgttcaactgcgtgtgtttctgtggttgtaatactggtggtgactttttagtttaaaggcacatatacaggctgggcgcagtggctcatgcctgtaatcctagcagtttggtaggccgaggcaagtggattgcttgagcccaggaccagtctgggcaacgtggtgaaaccacagcttatgaaaaatacaaaaattagctgggtgcggtagcgcatgcctgtagtcccagctacttgaggggctgaggcaggaggatctcatgaacctcggaggttgaggctgcaatgggcagagatcatgccgtttgcactccagtctgagcaacagagcaagaccctctctccaccaaaaaaaaaaaaaaattaaaaaatgaagcacatttacttagttaaaatctcagtatgaagactataaaaatctttggttatttagggatcaaggattagtttgtgccctgttttttttgtttgtttgtttttttcctgtttgacattctacattaagatgtgcgtgcccttctagtagtcacattaagaagtaaaacaaaggcccagtgtgatgatgtgtgcctgtatcaattgtctttcgaacagtgttaggttttcctaacttgcacatgtcctaaggaagtataaaaactttgactatgtttcttcaaggaacatttaatcttctaaaagaaagacatagcagtgtgtaaatgcaagcaaacaatagtagtaagagagtacgtagaaaaacattcagtcttttttggactcttctagtgcatactcatggcgtcagtcaagttttcatccatgcacgtctggctgtcagactctgttctacatagatggagataacgtgtgcaaatgtaaaagataaaatatacctctgttttagttaacgggactaaaacatagctgttaccatggagatctgggagctggggataatggaaaaaaccatgtttagattctcacttagaactgtgatgtaaagagactttgttcccttgctcattgtttaagtaatattgaataattgcctgagatgagctaagcaatctgttaaccagtggaatgtgcaacagtgaataaaacaagtaattttgcctttgagactcgccctgttaactataccacagtggccaccaatccataagagagagagagaatgtgtgtgtgtgggttggcgggggaggggccaagttcccctgccccacccccagaaattacgatttaagtctgttttggggccctggaatctgcattttagttagtcccttgtggtgattctaacataggtggttctcggaccataattgaaggacatctctttattttacggtgtaggggaccttgtaatcttttttttttcccccttccttcctcctgttcagttcactagaatctggcattctttttaactgttgcaggaagtatgcttttctttagtgtacctgtgaccctctgttaatccactagatgcaatgccatctttcatagggatttttgacctgggtctacctgtgttactcctaagttatgtttcctcctttccacttttacagatacttatttaagactgacctaaagtatctagtttcttctgctaaactataaaatctataggaattttatagggggatggagaactgatgtcacagaactagttagaactgttagaatctagaattgttttcctcttggttcattctgatattatgctgctggctagaaacaatagcttatttttccctcaacaactagtaaagttcattttataaaacacaaaagctagaagaaatggaaaactgcagatgattctaccagccagtgctcatcacggtcagtatcgtaatgctctctcttccttacttctgttaatgttcatgtgtatgtgtgtatgtacagatatgtacattttgttcctggttggaatgttctttttgtgataaaaccacgtattttaaaatgagatcatattccatgttctcttttagtgatgcacttttttcagtgaacagtgtcataagcgcatgtcttcattaaatattctttcatatttataatatctccatgagatttcattctgtgtattgtaattgaatccctttttcctggacctctaagttcttcctagttctccctatttacagacagctaagcctttgagcgtgttacaactttacctaaggaaatgatgtaagaaagataattcttgagttagaggataagacactgccaagtcagcaatgaggcagagttatgccagttgacatatagaccaggaatgtaagactgatcattttcccaagtatttgcttggagtacagtattaaacttcttgaaaattgaggttgaccttttaaagagctgattcttaactgtataaaccaagaaagaataggtgtaattacagtatagccatattgaaattagccaggctgaatgaagtcctctttggacataggtttagttcggcacagctggaatgaaaatttgcagccggtacagagtgccaccaagtggcgggttggaaagcccatgctagactgctttgagccataaggcttggctttttacttgaaaataccagtccaaatccgaaccttgtgttccagtttttttgcataagaaataaggcagctgggcgcggtggctcctgcctgtaatcccgccgaggcgggcggatcacgaggtcaggagttcgagaccagcctggccagcatggtgaaaccccgtctctactaaaaatacaaaaaattaactgggcatggtggcgcgcgcctgtaatcccagctactgaggaagctgaggcaggagaatcgcttgaacccgggaggtggaggttgcagtgagccgagatcgtgccactgcactccagcctgggtgacagcgagattccatctcaaaaaaaaaaaaaaaaagaggcaaagaagaacatgttacaagttagacttggttttctccttctgtcatcagctggtgttagcagcattatgtcagtatctgtcttataaagcagggaagcagtgattcccacttgatttgtatgtaagcattggtagaaggaaggggctgagacagagccttttccagaggaataagttaaaggtgcatccaggacttacaggtaatttggatgaaaggttgcaggtctaatacagttttgtgtcttgcattgggacttgacttgatatgactagcttcagaagtacctgaggtgcctatgtatataatctttgtaatgcttgagacaactgagtagttgtgttttcctcatagttgcctttcctctcttccttctttcttggtattaatatgtaagcttgtccacttaatttcaatattgagtcgccatatgtaagttattgtggtttaaagctaaggtgtaaagggaaaatattgcttaggattagcatatatttttatcttttgaatttcatgtgcaatctatacttttttgtgaagttatttggtatggttatgctgttggttggattataagtgaaatcagtaagaccgactagagtatggttaggaggatagaatctgtggccagaatgctcaaatacatatgctgaccctgccacacagtagctgtgtgtgtattcagacaaattaaattacttctgcctttgtttcctaatctgtaaaatgccaactctgagggttaaatgagaaaataaacataaagcacttttttgggttcttatttctatcttttgtcagattttttagtggaagaaaatatgcaaatataagagactttctgtgaaattccagtcatccaaaatctgagttggaaataatcagtatgaacccatggtttattttctttccaagtgtattttctagctctggcttggaagcaataaccaatctaatgagtgcctctagtgaccagattgtagtctctctgtactttttctgactaaaagggatcaaggatccatgctgataaggctgattatagatgggggcaagaaacatacaagctaaacctagaatatcacgtcataacagaaagcagaaatgctcacaaatattattggagtcacatcaaaagatgaaggagctaacatgaagaagccgttttgctggccaaagatgggacaatttgagcatcaaaaaagattgatacaagcaaaatatgtatgactctgaattaataatgatactgaaggaatgaaatatttgattgtctttgggcaatgtcaggtccctaacatgttattctgaaaaatttgaaataatatctttggactcctttttttttttttccccctaaaaaaaagaaaaaaagaaaaagaggcttgctctgttgctgaggctggagtgcagtagcatagtcatagcttactgtagcctctcaacttcgtgggcccaagcggttttcccacctcagcctcccaagtagctgggactacaagtatgtaccaccatacccattaatttttaaaaatatatattatatatatatattttttttttcttttatacagcatcaaagagaagccaataatatttttttctttttttgagacggagtctctctctgtcgcccaggctggagtgcagtggtgcgatctcagctcactacaacctccgcctcccgagttcaagcgattctcctgcctcagcctcctgagtagctgggattataggcgcatgccaccatgctcggctaattttttgtactttttagtagagatggggtttcaccgtgttagccaggatgttctcaatctcctgacctcgtgatctgcctgccttggcctcccaaagtgctgggattacaggcatgagccattgcttctggctttttttgttttttgagatggagtctcactctgtctcttaaggcgggagtgcagtggcatgatcttggctcactgcagcctccacctcctgggttcaagtgatcctcctgcttcagcctcctaagtagctgggattacaggtgcgtgccaccacacccggttaattattttattttattttttttgagatggtgtctcgccctgtcacccaggctggagtgcagtggtgcgatctcagctcactacaacctccgcctcctgggttcaagcaattctctgcctcagcctcctgagtagctgggattacagatgccggccaccatgcccagctaattttttatatttttagtagagatgggatttcaccatcttggccaggctggtcttgaactcctgacctcgtgagccaccctcctcagcctcctgaagtgctgggattacaggcgtgagccactgtgcctggcctaatttttctatttttagtagagatggggtttcaccatgttggccaggctgttcttgaactctggacctcaggtgatccacccacctccgccttccaaagtgctgggattacaggcgtgagccatcacacccagcaaaattttttagtttttaatttttttgtagagacgaggtctcgctatattgccctggcatcaagcgatccttccaccttggtctcccaaagtgctgggattacagatgtgagccactgtgcccagcctggactcctcttaaagcagagattgaaacagggatttgccaaagttggtttattttggagatgatttcaagaagaagtgagggaaggggaagaatgaattggggagtgaggaaaagccaatgatagatactttattgagtttcctatagggaaacgggacctccaagaaattcacggaatgcctcccaggtttatctatctgaaaaattggagcttcctgcccgcaccctcatacacctatatttatgcaagttcttcttaaggattttgtctgtccagtgtttctgggctgctcctgtactctagagactttggagaaagccctgagataaagaagcagccttgtgtaaggtgtgtgcttttgggtggaaagaagcgagacaactgaaatgtgtgtgggattgattgtccaccacagcgatgagtcaggtgatgtgataaggagcacaaaaccatctgctgcagaagggaaagaataaagtatttatcctgtctttactatacttagtatgcttcagagcatccaaatatttgatgagggacacttgttctttatggaataactctggctaaaaaacacagaaggcatgatagaatgagaaaatcatggttttcaaccttgaatgaaatagtgggtttaggcagtgatcactagtagctgccaacatcatagaaagatatcagaggtaacaactcccatggaagtacagaacactccctatggaatattgcctctctcaaatatgaaacaagagaaaccaagttgagcctttggatctaactacaactttatagggaacagaggaatgtattaaacactattacaggagtgtcactagcaaactccaggtagtgagaaactcaaagacaaatgacagcattttaggtttttggttttttatccaaataagttgcaagaaaaagggtaacatttaggttataagactagagtcataagcaaatgccacatatggatcttatctgaatactgatttgaacataccagttgttaagaaagatattttttaatcaggaaaatttgagtactgactagatagtattaagttttgctcattaaattttttccccccaaccatttctggcaattttggccccaccccccttttttttttttttttttttgagacagaattttgctcttactgcccaggctggagtgcaatggcacggtctcagcttgctgcagcctctgagttcaagcgattctcctgcctcagcctcccaattagctgggattacaggcctgtgccaccatgcctggctaatttttgtattttcagtacagatgggttttcacgatgttggccaggctggtctcaaactcctgacctcaggtgatctgcctgccttggcctctgaaaatgctgggattacaggcgcgagccactgcacccagacaattttggtcatttttaaggactgctggcaccattttgtctactttttaaaagtcagggtttttttgtttgttttttttgagataggatctcaccctgttgcccaggctggagtgcagtggtaccaccaccactcactgcagcctcgacctccctagggctcagttgatcctcctgcctcagcctcccgagtagctgggactacaagcatgcaccactatgccaggctaaaaaagtcagttttagcagataactgttgtaaatcaaagcatgagaataaaaaattaggggtgataattatattctgggaggaggagggttgggggagaagcatgcaattatcttcaattatcttctaattattggaggtgggttcatagatgtcttatatatataaacaaattatacattattgaggccaaggcaggaggattgcttgaggccaggagttccagaccagcctggggaatgtagtgagaccccatctctacaaaaaatttagctgggcatggtagcatatgcctgtggtcccagctactcagaaggctgtgatggtaggatcacttgagtcccagaggtttgagtctgcagtgaggtgattgtaccactgctctccagtctgggcaatagagcaagatcctatctcttagaaaaaatacattattatatatctaattctatgtagtaaacaattattaaaatgatacaaagggggttgcagtgagtaaaatccagaatgagtaatcatgtagtattttatgactttggaccactacataaatgtgaagaaaacagtgaggggaaactcttgtattaaatagacctaagattatatatcagcatatcaactgtatgcatatgtatatcttgttggcatcttgatacgaacaaacctcatgtaaaaagatagttattagcaattggaaataaacacttagtggatatctaataatgaggaatttttgctaatcacttctaggagcagtaatgctgttgtggttatgttgaaataaagctccttatttttcattgttgtttactggagtagttcagcatggcatgctacgtaagggggacttggtacaggtgtgggtatagaataaacaagatcagattatcatactcgttaattgaaacaggtgatgggtatttggaggctcactttctctaattggtgacaatttgaacatttctataaaatcaacttaaatcagtttcatcgattactaaacatcttgaagatgcccttcagagtctacatgagctgctctattggctcttaaaaattaattttaattttgatttttttgtagataggcagggccggtgtggggggtctcattttgttgcccagggttgtctggaactcctggtttcaggcagttctcccaaagtgctgggtttacaggcatgagctaccctgccgggcctatcattgactctttcttttgtgattaaacatgcttttaataaataatgattgaattttcatagtaactaatatttctagcagagtgggcagtttttaaattgtttatttttattttttgagatggagtcttgctttgtcgcccaggctagagtgcagtggtgcgatctcggctcactgcaatgtccgcctcctggttcaggcgattctcctgcctcagcctcccgagtagctgagattacaggtgcctgccactacgcccagctaatttttgtatttttagtagagacggggtttcaccatcttggccaagctggtcttgaactcctgacctaatgattcccccgacctcagcctcccaaagtgctgggattacaggcttgagccactgcgcctggcctttaaatttttaatctattagcctgagaactaaaatttaccgtatttcccctctggtggggaacccttaaactgtgttgaaaaaaaaatttttttgtttgagatggagtctcactctgtcgcctaggctggagtgcagtggtgcagtcttggctaactgcaacctccgtctcccgggttcaagcaattctgctgcctcagcctcctgagtagctgggattgcaggcgcataccaccatgcccagctaatttttatgtttttagtagagacgaggtttcaccatgttgatcaggctggtctcgaacttctgacctcgtgatctgcctgcctcggcctcccaaagtgctgggattacaggcttaagccactgtgcctggcctgaatttttaaaattaatgcaaatgcttaaataattcaatattttggggtttttgttttttttttccattctcaaaaatgtgtggcagttgtttttctcggtccctttataagctataaggaaatcatttgaaatgttagtttctggatagtggttctgtgagtctttccccccctccaccatatagtgtaacattttaactatcaattgaatgcttatcagatgccaagcactgttcaggctctgaatgcagcaacaaacaagataacctaattagtccctgttgttatggagtgtgcatcctatgtatttatgtatgttttaggagatggtgaaatgctaatttattttctgatagttatattgaactttaatgacttggtaattaatatgatagaaacactctattaaaatatgaataccttttcttgacttgtaagtatttagaatcaaacccaaatataaactcattctcaaatctcagatggaacatgaccaaagaagcagtagagtattttaattgtgtagctgactgagatagatttttctccagttctttccatgccagaagtttgtatttatctgtgctggatgattataattcatgcctttggttcattcttgttaatgttgagacttttggctcttgtactgataagagcagagcacggggttaggagccagaggtaaacgtcacacagtttaagattagttactgagcaaatgggaaagaacaattctagatatcaaacgctaactgcagggctgggcgcagcggctcacgcctgcaatcccagcacttcgggaggctgaggcgggcagatcacttgagatcgggtatttgagaccagcctggccaacgtggtgaaactctatctttactaaagttagtgggcatctaataatcccacctactaggaaggctgaggcaggagaattgcttgaacctgggaggcagaggttgcagtgagccgagattacgctactatactccagcctgggtgagagagcgagactcccatctgaaaaacaaagcacaacactgcataaaaataactcagatgtttgtctaaaatgaaacttaagagtatcaggtaagggaaacgagaaaaccatttaagggaaataattattctggagtaacatccaaacttccaataattaaatgggtgttggatgtaaattttgaagagtgggtagaaaatccgtgggatccttgagtatgagattcttaaaaagtctttgggaaaacatggcaaatggattgctttgtgtgcgtgtgtgagacagggtcgcaatcccttgcccaggctggagtacagtggcatgattatagctcattgaaactttaaactcctgggctcatgtgattctcccacctcagcatcctgagtatctaggactacgggcgtgtgccaccacaccacgctaattttactcctggccttaagcactcctcccaccttggccccccaaaaggctgggattacaggcatgagccactgtgtattgcctggattactcttaataaacaaaagatagtatcctctttgtgaagtggatatttatttttgtaatatgtatgatcacatgctaattaacctgaactctctatgtatatttacatgtgtacttttgggaaaattttttggtaatatatacaccctccaaaatgaggccagtgtaggtgtgaatacttagtttcttaactctgctgctaatccttactgtgttagatacttgattaaaacagaatagggccaggcatggtggctcacacctgtaatcccagcactttggggaggtcaagatagaaggactgcttgagcccaggagttcaagatgaacctggacaacatagcaagaccaccatctctataaaaaaactagctggatgtggtggcatgcatctgtagtcccagctactccggaggaagaggcaggagaatcccttgagcccgggaggcggaggttgcagtgagctaagaccacgccactgcactccagcctgggcgacagagtgagactccatctcaaaacagaacaaaaacaaacaaaaaaccagattagtacttgcatatatgtagtaaatcataccttcattagtcaggtaaatacagtgtgagcacctttttttttttttttttgagatggagtctcgctctgtcacccagggtagagtgcagtggcgcaatcttggctcaccacaaactctgcctcccaggtcaagcaattctcctgcctcagcctcccgagtagccgggattacaggcatgtgccaccatgcccagctaattttgtatttttagtagagatggggtttctccatgttggtcaggctggtctcgaacttctgacctcaggtgatccgcccacctcagcctcccaaagtgccgggatcacaggtgtgagccactgtgtccggccgcaactttcttttaattgaagcaacatataacagttgtgaaatctatgaattataaatctttttattagggtatattttttaaaccttttatagaaaatactgccaggcacagtggctcatgcctgtaatcccagcactctgggaggccgaggcaggcggatcacttgaggtcaggagtttgagaccagcctggtcgacatggtgaaaccccgtctctactaaaaatacaataattagctgggtgtgatggcgcatgcctgcaatcccagctacgcaggaggctgaggtgggagaattgcctgaacccgggaggcagaggctgcagtgagctgagattgtgccactgagttccagcataggcgacagagcgagactcttgtcacacacacacaaaagaaaaagaaaatataaaacttacataaaagcagagaggtacctgtcctgaagctttaacagttattaccacatgagttattttgaaacaaatcccaaactagcatttagtctgtaaacttgtactagctatagtttggatttttgaatctcttaaactggcattctcttttatttctttggtatattttaccttgatgactgtgcttttactttgtcatgaaaataatgtaaaagtgcttctcttccttccctcctccattttatgattgtagacaggatgtacctgagtttagttaatctaggttttctttgttgttctcgaagggatcaatggcagctgtggtatttgtttgttctcacccttttggggaaagggaagaggcaaaggactaaactaggttatgaatctagactaaactggtgttttcctcagatacttcaaaattgtggattatttgacctggaaagagaagttcactatagttctttgttttttttctgttttttatttttcttttttcttctcttttctttttgagacaggttgtcactctgttgcccaggctggattgcagtggtgcagtcacagctcactgtagctttgaactcctggtctcaagcaatccttccatctcagtctcctgagtaggtggtactacaagcatgcaacaccatgcccagctagtttaaaaaaattttaaaaagatttttgtagagatggggtttggctatgttgtccaggctggtctggaactcctgggctcaggtgatcctcctaaagtgctgggattacaggcataagccacaaggcctgtcctatagttctaattgtgaaagttaagtaatttatttcacttgagatgtcaagctcaattgctagtttttgttttgtttttaatagctagttgactataaattcttcctccttcaaaggaggtgactggcatgtgacttctatggtatagtctcatacagttaacatgcagttgtgttatatgtgtcgccctcttccttcccttatacatacatatatacatgtgtagggaggcatttggactaaggtgctgattcttaacattttctgtactgtgcactcctttagcagtctgaaacctatggatctcttcttatgtttcagtatgtcttattttttatttttttgagatggagtctcgctctgtcgcccaggctgcagtgccgtgatgcaatcttggcttaccgcaacctccgcctcccaggttcaagtgattcttctgcctcagcatctggagtagctgggactacaggcacctgccaccatgcccagctaattttttgtaattttagtagaggaggagtttcaccatgttggccagtctggtcctgacctccagacctcaagtgatccacctgccttggccacccaaagtgttgggattataggcctgagccactgtgcctggcctcaggatgttttaaaatgcataaaatacgtaggattataaaggaaaccaattattttaaaatgtagttagcagaatgttaaaacttggtgataggtgcttagtataataagcaacaagttctagcaacacatctaagtttcacagtaatgagtatagatgataaagatctccaacagtctaatgtggtatgaaaatatctgatttatattgatgtcaaaattacaagtactgtaattctgtggtttagtgccagcattcataattgaaggacgtgttaaatttcatttaggggatagtgaagataaatgtgtaatttcctgccacccacacctcatttttatttccctgaattttatccatggactccttagctgtaacggtcagagtaaggtcacctggactaaggccttgtttgtgtcctgggatgcctaatttgaagctaacggatttgaacttagaatgtagtcatcagataagtgtgttttaaacattctatctgccaattttagtggcttttaaaataagtcataacagtccgataaatgctggatctccaaatggtctctatgcattttatgactttgcttctttgcttttccttcttgggctgtattttcttaatagatattggtttgtaattaatatagagttaatattttaagtagtttctaaacttccatgttggctattattgttttgcttttatgtttttttcttttaaaaaacattttaattcttctgcaggattcggaaacttcagatacgaaatatcccgcctcatttacagtgggaggtaagaatttctgtatttaaaattaagatctaagtatggaagcctattgctgttagttttttcaaagctttttctcctttcctcaactcttgggtgtgctagaacataaaattcttctcctatgacccgtgccttggtgtgggtttttcttagtaagggcacagtgtatcttttaaaaatctgctctttgggataagaaaccaaatattgaaatatattcttgggtaactgggtaatctttctcattcagtcacttcccaacaggattttgttgatttcagttctttctgatgagtttgccaattgtatttaaatatgaagttcctatcttggcaaagttttaaaaagacaaatacctgctattttgtgctgttactttaaaatgttattctgcttccttttgctcagatggtggcactgcactgattgtgtaatatgcataaacacaaactatttagcacaattgaatagcctgtgtcagcagtttccaaagcataataatgatgtcatggtgagaatctgagacaccagtagttgaagggataaaagaaaatgtcttttgactcttcagacaatggaacctgaaagttcttaaaacccaccttggagagggtggtgcagagaaactgcttagcttttatgtatctctaatataaaaaaaatcaagactaactagttttgtgtgttttagactagtcttctaaaatgacatttgatgagtcactaaatcataacccccatcaaaatgcaaagtttggttaaaaggttagtttggtgggaagttgatctaagtctgattctccaaggtttctcagttggtcacaggtgatttgtgctgagaatatttatcttcagaacagtattattgagattaagctttgcaggaaggggttggtttttggtatatgctgaatatattgcaagttatataatgcactaaaaatatactttatagatggaaacggtgggttataagattaaactttttacatgttcctgttttagattaacatttatttagggaattcagtagcttgtgggataggtcctcaagtgttgtaatagcaagattactagttcaatccccttattttaagatgagccatattaaatatgatttaaaatgtaatttaatatgattttttttgttcaggagctacatctggtatgatgtagctttctatgaaacagccaaatggtagaaaccaagtttaagtaaattattagagtactagcatatctgctatgggcagagtttccttttaattcattcataatctcttcaaatttagagaatttagcttttagtttattgcattttcccttattctgggtatttgccgtatctaacttttcttaatttttgtatttcactttactctcctcattgtcctttgaggtagtgtcaagttagtggattatctctgttttcaaatgggcaaatatgggcacgcaagataaagttaattaagcaagagcacatactgaatcgtaagatgcttggaactagactttggaattcttcacctttgactccctttaaaaatttaatgattatttacatattgatcaacaaaaacaattttattgagagttcgttaggaataagatgggctgctgctgttaggtgtttctttccttaaaggcttgagggaacactatttcctttttgagaagggtcactttgtatgtttttgtttgtttgtttgtttgttttttgagatggagtttcgctctcattgcccaggctggagtggaatggtgcaatcttggctgactgcaacctccgcctcccaggttcaaatgattctcctgcctcagcctcactagtagttgggattacaggcatccgccaaccacgcctggctaattttttgtatttttagtagagatgggattttaccacgttggttaggctagtctcaaactcctgacctcaggcgatccaccagccttggtctcccaaagtgctgggattacaggcgtgagccactgcacccagcctgtatatattttatttattcacgctgggtatgccgcttgttttgtgccaaagccttatcataaacagcgataattttgcagttctggacaatttttataatggaagattaggcattgagtccctgattaatcttagaatcactgaaagtggaatgaccggaccttatgtaccttctactttaatgcagtagaatatacatgtcaccacagaggaaatagtcttatctcaataggttcaactggcttcagtcttaatctaactttgagtttacaagaaatacagaagatagagtgacaaattaaatgatgcatcaaagaaacaactagccatgtcctaaatatgggatattccacaggacatcctgttttgctagaggagcagtgggatgaaaaaaggaaggggcctgttacagagtaagactcaagaggataacaaaaaagcactatagtaagttctctgtgagcaatgtaaatagccctgtgaagcagcttggagcacctaaaaaagccttatagttgtattttatttatttatttttattttttttgcaggaaatggggcagccttgaggtcagacttggaattatgtcctagctccactactttctcattgtgtgatctagttatgggatctctgaacaggtttttaaaattctttgagcctcattttcctcttttctaaccaggggtgatgatggtggccccctcattgggttgctttgagcattaaataggattatgcatgataaagcctttaaaacagtgcttggtacatataagtacacaatatgttttagctatgatataataagaacaacaaattcaccagctctcagccttaggttttgtgcttgtctcagtgagatccaggcaggagcacagataacatactcggtatttcaccagggagaatcacacaggtgctgaaaggcgaaagaacaaagagaatccagagtagtgactgtaaggagcagccacggcctgagggttggaaggccaaagaggaagttgaggttttggatcctagagacttggagggaagagccctgagcacctgagacttagatttctgagccatgggagctccttggctatggctggcgcctgggatgtggggaggagagaggagttatacatcttgttcagagtgtccagaggagctagaggctgtaaccaactgctgattcagtgacgccggctgacagacagggacctgcggatgcggtgatgccgactgacggacgggacctgcggatgcagtgatgccgactgacggagggggacctgcggatgcggtgatgccgactgacggagggggacctgcggatgcggtgatgccggctgacggagggggacctgcggatgcggtgatgccgactgatggagggggacctggcgatgcggtgatgccgactgatggacgggacctgcggatgcggtgaagccgatgaacggggacctgcggatgtggtgatgctgactgacgtacagggacttggtgatgcggtgatgccgactgatgggtagggacctggtgatgcgttgatgccgactgacggacgggacctggtgttgcagtgaagccgactgacggacgggacctgctgatgtggtgaagctgactgacagacaggacctggtaatgcagtgaagccgactgacggacgggacctgctaatgtggtaaagccgactgacagatggggacctgcgggtggggtgatgctgactgacggatgggacctggtgatgcggtgataccaactgaaggacgggacctgcagatgcagtgatgctgactgacggatggggacctatggatgcagtgatgctgactgacggagagggacttgcagatgtggtgatgccgactgatggacagggacctgcggatgtggggatgccgactgacggacagggcctgctgatgtcgactgatggacgggacctgtgggtgtggggatgccgactgacagacgggcaagagcatgtcatctctatcccgactcctgctttctagtacccctctggtgccttctattggcagaaactaacaggtaacagctggcaaaggagagattagagtccatagtcctagacctggcatcacaaagctgagaagtacatttggaactgagagcttatttttctttgtttgccctaatgcctcatataccctgtcagtctgatggaactgagagcttaatatcaaggcaaacctctaaccttgaagtaagacaatctcctgccccaattctaggagtcatcttgtaagccagattctgtgaagtcactgaagaggtaacagaatctgggaccacagcagaaacgcttgtgacgtttggtgttttgtaagatctgtacctggagtgttacctttctgttactgttagatctttattatttatgttatctgtattccaccatatactactaaatgatcagaaggggattcctcaagttctctggaccgcatatcttacatgctgtgtcaagcagctttaaacagtttctaaccacttagttttagatgatgataaagcacttatgggtgggcactggattctgctaaatgtttatggcagatgaagatactgggagactaacttttttttttttttggagacagagtcttgctctgtcacccaggttggagtgcagtggcacaatctcggctcactgcagcctctgcctcctgggttcaagtgattctcctgcttcagcctcctgagtggctgggactacaggtgcgcgccaccatgcccagctaattttttgtatttttagtagagacggggtttcattgttagccgggatggtttcaatctcttgaccttgtgatctgcccgccttggcctcccacagtgctgggattacagactaactttctgaaggactcactgctagagaattaggtaggtttgttttctcccaaatatatggaatatagcaaagaaataagggaaaatggtggtttctcatccatcctgttttgcctgaggtacctgaagagtagactcagtgtgaccagactggaaggattcctccacagaaacagtcccagcagacaacgatgtggatgttcagatgccacaggggaagtgtacattagaaggaggatttgagagcccttccttaaatggataagggtagggctttgggagaaagccttagtggagtacttgacattaaacacctttagatattttttcttttgcctactcaatttctcaagtgggctccattttctaaatttaaggaatgtctttttgttgttgttttgtttttgagacggagtcttgctctttcatcgaggctggagtgcagtgatgcgacgacctcggctcactgcaacctccgcctcctgggttcaagcaattctcctgcctcagcctcctgagtagctgggattacaggtgcctgccaccacacccggctgagttttgtatttttagtagagacagggctacaccatgttgaccaggctggtctcgaactcctgacctcaagtgatctgtacatctcagcctcccaaagtgctgggattacaggcgggagccactgcgcccggcaggaatgtctttttgtatgtaaaaaatacacagtaagtggggccagttgcggtgactcacgcctgtaatcccagcactttgggaggccaaggcaggtgggtcacttgaggtcaggagatcgagaccagcctggccaacatggagaaaccccatcttaactaaaaatacagaaattagccgggtgtggtggcacaggcttgtaatcccagctactcaggaggttgagtcaggggaacctcttgaacccgggaggcggaggttgcagtgagccaagatcgcaccactgcactccagcctgggtgacaaagcaagactctgtctcaaaaaaaaaaaaaaaaaaaaaaaaaaaaaaaaaaaggccagagtcttaaggaaaggatttctcagtttctcctaatgttatttccttgaaactactctccagtcaaaagaatcaaaactcctaataagtactcaaaaaatgcccaaagctgggggtaccttccctgaagtgaagcataagaccttatgtaaaggaagacattaggtaaatgaagtggtcctagaggaaagggcaaggaaggttgtcattttgggggctgatgaggaaggtgaaacaatatttccctgtgtttactgtgtggggaaacagcctatgcaccaggttctccatgctggtggggcccccacatcactcatgactggaatgactgttttccgagcaaagatttgaatacgtgatctgacaggtacttatggggaatacatacttaaaaatcacagtcttgctagaaaattcagaacgtttcttggttttacttcaacacttgcatatttgatttttttcctggacttaattgatctgggaagatgagtattaagtgaggctctggtcaaagaagggaaaccaagtattccttatttagaagaaacaagtaggcctggtatggtggctcaggcctgtaatcccagcactttgggaggctgaggcaggcaaatcacttgaggccaggagtttgagaccagcctggccaacatggcaaaacccaatctctactataaatacaaaaattagccaggcatggtagcgcatgcctgtaatcttagctactcaggaggctgaggcacaaaaattgcttgagcctaggatgcagaggttgcagtgagctgaaattgtgccactgtactcctgggcggcaggcgagactctactgaaaaaaaaaaaaaaaaaaaaaagagaaataagtgggaaagtagtgaagaaataagtaaatggaaaagtagtgatgccatgttatctagtctggaggaaaaacgaaacaataccatagttaatataaaatagctcagagagaccccactgtaagccgtggatgaacgtgtgctgagaagtggaaagctgtcttgaggtttgtggggaggtagatgacttcctggggaagagagtaggcagggaccacggagtgagttaggtgacatccctgctggatgttggcatctttaaaggcaggaactgtcattcatcttctgtccaactgctgattgtttttgatgctgtgttaggtgctacttggtccatgtggatacaggaattaatgtcaaatagaaatttgagaagcattttatttacttactttttgagacagcatttcacacttgttgcccaggctggagtgcagtggcgtgatctctgctcactacagtgtccacctcctgggttcaagccattctccgcctcagcctcctgagtagctgggattacaggtgtgtgccaccacgcccggataatttttgtatttttagtagagacggggtttcaccatgttgaccaggctggtctcaaactactgacctcaggtgatccacccactttggcctcccaaagtgctgggattacaggcatgagtcactgtgcctggctgagaagcattttaggtgtaattggcaacataaagctaacaccatgaggtgctttaactcaacagaagaaaacatctgtagaaacagtgacgttgagactgtccatgagctgagcgagaagtagtaatgggagtcagagatgttaaatattagaaataaccagtttaaaggttgcctttatagcagacagcttggagttctaaataaatagcagataaactgcatgttctcggtaggtgcctttcttcttctcagtggcctgactttgagcaggccactcggccaataagtagctgacacgtactaggcacttatgtgccgggtactgaattaacacgttttaatcttcacagcagtcccatgtccccactttacagataaggcagtggtggtacagagaggtgaagtagcttgtctgggatcatgcagctggaaagtgttagtgtctcctcttaatcaggttgctctaacagaaaacttcctcccaaagggttgttcctgtttcttctagttattatgatttggtttcaacatgcctctgaaaagcttgacagtgaagccaatagaaactggatcctccccaggtctggacgtaatgtatggttatgagtgatgaatgaatttcattggggaagttattagtaaagttctctgtttaaagaactgtagacatagagttcttcatgcatggctgctctgggatgggccagactttacatcactagaggtaatctggtgatgggtgtgcaaggggaataccagagttctctacaaccggtatatatgaatggtgtatgaggcaagcatttctgaccccaccctgctccctccatgtttaccccatgtcctttgtgctatgctgcctggacttttgtcctgtgcttctgtcatttttctggatatgatcatcttaaaggtcatcatgccctttatcagttgattgagacagaatcttgactcctatcgcccaggctggagtgcagtggcacaatcacagctcactgcagccttgacttcctgggctcaggtgattctcccatctcagcctccccagtagctgggactacaggtgcataccaccacacctggctatttttttttcttttgtatctttatttttaaaaaaaattttaagatggagtgtcgctctgtcacccaggctggagtgcaatggtgcgatctcggctcactgcaacctctgcctcctgggttcaagcgattctcgtgtctcagcctcctgagtagctgggattacaggcgcccaccaacatgcctggctaatttttgtatttttggtagagatggggtttcaccatgttggccaggctagtctcaaactcctgacctcaggtgatcaacccatcttggcctcccaaagtgctgggattagaggcttgagccatcgcacctggccaaaagttttaaattttaatgaagttcagtgtattcatttgtgccaatctcattttatgaatagtatttttggtgtcctgtctaaaaactttttgcctaaatcaaagttatgaaggttttctcctattgtcttaagcctatggtgcattttgagttaatttttatgtaatgtatgcttcacaggctgtggttttattttttgcatgtaaatgtctcattctaacaccaaaaattgaaaatattgttccttttccattgaattgccctcacacttttgttacaaatcaattgaccatatttgtgtgggtctgtttctggactcttttatcccattgatttatgtgtctgtccctttgctactacactttcttggttacggtatctttataagtcttaaaattgaatagtattattccttcaactttattgtttttcagaattgtggctattgtctttactttgcttttccacgtgtattttggaaccagcaagtctatacacaaaaattctgctgggatgtttattgggattgcaataagttaacaacaaaaaaacccttttggaataattatcaactttactaagttgtctttttatgactggcttatttcacttagtatgctgttcaaccatgttgtagcacaggggtccctaacccccaggcctcagactggtaccatctgtggcctgttaggaactgggctgtaccacaggaggtgagtggcaagtgagcgagcattactgcctaagcttcacctcctgacagatcagtgacagcattagattctcataggaatgcataccctattgtgaactgcacacgttgagggatctaggttgctcactccttaggagaatctaatgcctgatgatctgaggtggaacagtttcatcctgaagccatcccccccatccccactctctgtccgtggaaaaattgtcttccatgaaaccagtccctggtgcgaaaatagttggggaccgctgtcgtagtatgtgtcagaattttcttttgaaagttaagtgtagtattcctctgtctgtgtattctaccttttgtttattcttctgtccatgggcatatggattgcttctaccttttggctattgtgatcaatgccaccgtgaatgtaggtgaataaatatctctttgagactctgctttcaattcttttgggtatgtacctagaagtgggattgctggatgttatagcagttcttcttttcctctccttgaataaaccagtgaaaaagatgttatagcaattatgtttttaattatttcaggaattgccattactgttttccatagcagctgtactgttttacatttctaccaacagtgcccaagtgtgttctaacttctccatgtccacttcaacacttgttattttgttttgtttttttttctaaatagtaggtgaatattattttttaagtttggacttccacttgtttttagtatgtagaagtattttaaatttttgtgtgttgaccttatatcctttgacattgctaaacttactagttctgaaagtttgttttttattttttaatagattgcttgggattttctacttagacaattatgtattcaaatgggcatagttttattcctttatagtctgtatgccttttcttttattgctgtaatgtactgtctaggacctccaatgagagttgacatccttacccttcctcaatttttgtgagaaaacattgtctttcatcatcacataaaatgttagctgtgggttttttgtagatactctttatcaggttgaagacattgccttctgtttctagtttgttgacaatctatatgatgagtgaatgttggattgtttcaaatgctttttctgcatgaattgatattatcatgtagtttttaggctgtaaatgaattacattgactccccccccccccgccccccgccccctgccccccacaaatgttgaaccaaccctgcattcctatgataaactccactttattgtggtattttattctttttgcttggtttaatttgctaacatttttgttgaggacttactgtgtctctgctcatgaaggatattggtctgtagtttgatgttttttgtattgccattgattttgttatcagggtaacacagccttaaaatgtgttgggaaaacatgtttaccttttctggaagtgatttgctgaattggtgttatttctttaagtatttgatagaattcacctgtgaaaccacttgaataatttctctcagaagtttttttttttttttttttggagacagagttttgcttttgttgcccaggccggagtgcgatggcccaatcttggctcaccacaacctctgcctcctggttcaagtgattctcctgcctcggcctcccaggtagctgggattacagacatgcgccaccatgcccagctaatttttgcatttttagtagagatggggtttctccatgttagtcaggctggtctcgaactcccaacctgaggtgatccatttgcctcggcctcccaaagtgctgggattacaggcatgaaccaccacacccagccctttttttttttttcttatgctcaaattcaatatcttcagtaattatagtgttcttcaggttatttcatcttgggtcgtttgtagtgttcaaagaattggtcaatttcatccaagttgtttctttttttctttttttttttttttaataactacatcatcatggacaagttgcataaagctttgtagtattcgcttatcctttaatgtctgtggggtctctagtgatatctccactttttaattctgatactagtaatttttgtgttctctctcttaaaatcttcatcagccttgcagagctttatctgttttattgatttctaataacttcatgatgttgaagctgaatgagcttctctgtctccatgattttgagaggtgaaggtggctgggcttctgggtcaggtggggacttgaagaacttttctgtctagctaaaggattgtaaacacaccagtcagcactcagtttctagctaaaggtttgtaaacacaccaatcagcactctataaaaacgcaccaatcagtgctctgtgtctagctaagggtttgtaaatggaccaatcagcactctgtaaaatggaccaatcagcaggatgtgggtggggccaaataagggaataaaagttggccacctgagccagcagtggcaacccgccagggtccccttccacactgtggaagctttgttcttttgctcttcacagtaaatcttgctgctgctcactctttgggtccacactacctttaagagctgtaacactcactgcaaaggtctgcggcttcactcctgaagtcagcaagaccacgaacccactggaaggaagaaactctggacacatctgaacatctgaaggaacaaactccagacacaccatctttaagaactgtaacactcaccgtgggagtccacggcttcattcttgaagtcagcgagaccgagaacccactggaagaaaccaattccggacacaatttgattagtattttgtttccctgaggcttccctttttgattctccaatcagaaaagcaaggaccttagataccttgcgtggttgtgcacttcctgtaactgtatacatgtccagggctaacgagaggcaaacagacggaaaagaagcaaacaggttcaatccatccccttggaactatagcttcttccctccatcagtgttttagatcagtgatccccaacctttttggcaccagggactggtttcgtagaagacaatttttctttctttttttttttttttaatcagaaaattttgatcatggcttttatttctttgcaacagtcgtccagaggttctgaagagaactcaccggttgtagagtctgtgttaatcacccagcattaatatttccattgctccatcatcatgtgtaagcctgtccacagcattcttctccagaagcaaacttgctcaacctttagtttcacatcagtgaaggcgaattctttcaccaagatggacttgtttgttctcaggaaatccatacagccctggttgaagagttcagaaactctttttatgcattaaaacaattttttcatggttggggaaggggagtggtttcgggatagaaactgttctacctcagatcatcaggcattggttagaatctcataaggagtatgcaacctagatccctcgcgtgcgcagttcacaatagggtacgcacttccatgagaatctaacgctgccattgctgatctgacaggaggcggggctcaggcatttaagcctgctcacctcctctcaccttctgctgtgcggcccggttcccctttcttgcttctccagcctaaactacaaggcttctcctaagatctgtctgtatccactaacaacttgaaagttttttgctgctgagtctaggctggggcatagcagagggaaaaaaagaagcaaatcacttcagtttctgtagtactatagagttcctagtctgtctgttatctttactttgagtcttcaaattattgtttgatactttctgtctagattttttaactgctttcagtgggagaaacaaggtgggtgtgcttattgaaatttgtctggatctagaacctggaactaaagtttaagttgtttctttgaatattgttttttgatgccttttaaatttcaaaagaggtgaatttgaatttttcatttctcaagaacagagtaactactcataagtgatttgcttttttcttgtagataacctttggttgaattgagactgaacaggacttaccctcttaaaagaaatgcgtgttcaatttttccatgtgactcagcactagagatgtgtatgcagtgctcatcattttaaatttaagtatataaaaaccttcacttgttgctcttttcctgtctttctacctccagttttaatgaacaaaatatacaaggttaagactggggagggcaaaggtctcctggtagggttttagaacagtaaaccaattgggagtgacagggcactattaatgctgtgtctaattttattatcagcaaccagaaaagcaagagttttctcagtactaaggccatccccacccccaccccccacttgccgtattttgatttcctgaatggcctactttgtcttactcaaaacacaatattactattcagtaattactattcagtattactttccatgtggggatgagaaaggctataatttactgcgatcttgcctagatgtctattgtatatattcacaaatacctttcctcagttttttattccaatctggtagacaaaggtggtgctcagtaagttaagtgttggttgaattgagggtgtatgatgcttttcaaagcttgactatcaacccagatagagatttctgtgttcatcttgctggattttttttcttgttttgtgtccactactcctagactctcacatgtgtccaggtatatatacaaagattgaaattgtttaattagcttactctggctaatggtaatgactgatatttcagatttctttttaaaagaaggcctatatttgatgtgtctatctttcactcatttttatgcctactctcatattcttagctcatttccttctctttagtactctgcctttgggttttagagtaacttaatatcacacatgtgggttgtgtcgattatgagcagagcaatatgcgaacctcttttttttttttccatttgattttttcaagactctgtcacccaggctggagtcaggtggcacgatcacgactcactgcagccttaaactcttcctgggctcaagcaatcctcctgccttggcctcctgagtagctaggactacaggcacataccgctgtgccccattaatttaaaaaaaaaaaaatttttttttttgttttacaaacagggtcttgctacattgcccaggctggtctcaaactcctgagcttaagcgatcctcctcccttgacctcccaaagtgttgggattacagtcgtgagtcaccgtgcctggccaagtacctctctagatggattctcttcttgttatattcttagagccaaccctagatatagaagggaattgtgctattcttatttttaaaaacaacaaagtaattgggaaatggaaaaacttgccaaggtcttgcagctaccattggctgaattaggatttaaactaggcagaacctccttttttagctgctactgtatctaaactgtatattcttctgtcatctcaaacgtggaaataaggatgacttctaatatctcctgcaagttcacttacgcatttttgacttttagcaccaatttcatcagtgtttttattgagatctataatttcctcctatgtaatgttccaattacaatcctgaagtgaaattcacagaaaatatagccacttatatatatctataatttaaaaatcaatgtaatgtcctagtaataccagaaaggagacataaaaattatttatacaaaaaaatttagtacataaatacttaggcatgatcagagtttaggcataatgaaatagctaagtgcttgtaccatatgtagaataatcctcagtggaccaatactggtgttgagacaggaataatatacaggcaatgcaaagttgtgtgctctcagtttagtggttttctctagtgataagcagaccaaaatataatagtatcttgatttacatgatacagttttggaagatgcagtatatatgaaaactgagcaataaatattttgtcaggttatagggtcagataaatgggtttcccctgtatctgaatatcaaggaccttcaaaggctgtgcaggacatgaggccacctctctttattgtgtgaagctgtactgcacacttcaggatgtgtgacatacctggtctgtgactatcaaatattagtaaaagactcttttcctaatcccaaaagatccacagatttctaaaaccacttccttaaggggtgaagctttctccattgagaattactgttctaaatcattccttccttagctgtgttgaaggaccagttatttttaaatttctaattgattactgacttttttgtaaaacacaatgaaaataaattattacaatgaaattttaaagtcagccaaaagacaagctgatttttattattagattcaacagacataaaattcttgtcagtctgctataaaaatttgtaaatgcttaatctccacttataagtttgtcttgtcatgatatggtctctatcttcatctcactctttttcttcccacagtcacccaaaatgacggtatgttcctaaaatactttcccgtggaaggtgtaagttcccctcttcctggccaaatgctcaaatgttttactcccatcacctcctttgttttgcataagtatcactttctataaaaattatcatttaatgatggaaatgaacttaactgcctttaccatcagcagtctctttttatccatgataaaatttgcagagtagtttaacaggcataactcaagctgtttatttcttcttagctttatatacttacggataggaagtcatgcagtacaagtgtgcaaaagttctgcaaagtatatgttacttttgctgatcacatacaggtaaatccatcttagatgatctgatttctaatacaactcaactctaaaagtctaaaaatatctctgagctatgtattaagcaggtggttttggacttagactgcatttctttgtttgtttttgtttttgagacagagtcttgttctttcacccaggctggagcgcagtggtgcaatctcggctcactgcagcctctgcctcctgggttcaagtgattctcatgcctcagcctcccgagtagctgggacttcagggacacgccaccatgcctggctaattttcgtaattttagtagagatggggttttgccatgttggccaggctggtcttgaattcctgacctcaagacctcaggtgattcacctgtctcagccaaccaaattcctgggattacaggctttacaggtttcagccaccgtgcccggcctagactgcattttgcttcatgccaatccctagggcagcagtgactttttttttggagacgagtctcgttctgtaacccaggctggagtgcagtggtgcaatcttggctcactgcaacctttacctcctgggttcaagccattctcctgcctcagcctgtcaagtagctgggattacaggtgactgccaccaagcccagctaatttttgtatttttagtagagacagggtttcaccgtgatggccaggctggtctcgaactcctgacctcaggtgatccacctgccttggcctcctgaagtactgaaattacaggcgtgagccaccgtgcctggcatagcagtgacttttcaaatcttaatttcagaagacttcctgctgtattttttgtactgtgagtttgaatgatggaagacaattcctaatacaaggcaggaagggtcctggattatcagactcccggcagttcatgatgctgcctccatgatgctggcagccatgatgttgatggtgaaccccctcagcagggggcccgcaactgttcctctggtgggtctgtgtgaaggcaagtactgctgggaaggggtcctactactcggccacagtgactgaatcttaaatatggatggtgtccttacttttagttactctgtatcagcagaaaagttacaatttttaaaaggagaccatttcttcaatcatggtttaacaattagggttttgggctgggcgtgatagctcacacctgtaattccagcactttgggggaggcaggcaggtcacttgaggtcaggagtttgagaccaacctgggcaacatggtgaaacccccgtctctactaaaaatacaaaaattagccttgtgtggtggcacgtgcttgtaatcccagctactcgggaggctgaggcacgtgaattacttgaacccaggaggtggatactgcagtgggccaagatcgtgcctctgcactccagcctaggccacagagcaaggctccatctcagaaaaatagggttttgacagcatcttaaatacttctgctcttccagctcactcattttatacacagtcattacactgcgatgcatatggttggctttggtgtgtgcttgtgtaggtatttatggttggatccatgcacacagtcatgaggtggcttttgaagttgttctcgtgtgaaatggaaattcttgggcatctaagtatttcttaattttcagtgggtggaacaagtacagccagattgaaggatgtgcttttatcacgtgccttgctttctgaggctgggtcagccttagtcagaatggccccttttggttgtaatgttggtgtggcagacagtacttaggctgccacaccaacacagagatatgaagaacctctgatagcattgtcctcaaaatgttaccctggaggagcaggacaaggtcagctgtggctctctaagtccaaaaccacctgcttattatatagcttagagatactacttcttctaatggtgaaaactccaattacttttgtaccaacctaatactttgttttagactttcacagaattgaattgcattagaaatcagataatcttagatgcatttgcctatttgtgatcagcaaaaagtaatataatactttggagaactttttcacattgttttaatgcatgatttactatcctggagaaacaagatattggaaacacaaatgtttctttagttgctcagctcctgtgtgcctcttagatgtactgagaacatgtttaaggatgcaaactttttataccatgtatgccttatccactagccaaggacctggtgtggcattgaagtaaagatatgacaacttgttccaatgttggggaaaaaaaaactggctcatatggctcagtgggagatggtgtagaaatgtgattcctttcttaggaattttaaagtgactttttaaactctctactttgggagttttcaaacatacacacattgagaaaatagtatactgaaccccccatctaccgaccttaatgatagtcaacattctgcttttgttttactgatcaatattgcttcactgtttttaggtggaggagaggtgtattattttagagcaattcaatatgagtgatggtatagaaaatttacattgctaacataaaataagaataggtatattagtttcctatgctgctgtaacaaattaatcacaaacttggtggtttaaagcaacagaaattaatttttgttctagaagccaggagtctgaaatcagtctctgtgggttaaagtcaaggttgtcatgagaactggctccctctagaagtcttaggggagaatccgtttgcttgcctttcccaggttctagtgcctggctgtagtccttggctttcatggtttcctctttctttttttttttttaatttaatttaattttattattattatactttaagttttagggtacatgtgcacaatgtgcaggttacatatgtatacatgtgccatgttggtgtgctgcacccattaactcgtcatttagcatttggtaccaaaacagaggtatagatcaatggaacagaacagagccctcagaaataatgccacatatctacaaccatctaatctttgacaaacctgacaaaaacaagaaatggggaaaggattccctatttaataaatggtgctgggaaaactggccagccgtatgtagaaagctgaaactggatcccttccttacaccttatacaaaaattaattcaagatggattaaagacttagatgttagacctaaaaccataaaaaccctagaagaaaacgtaggcaataccattcaggacataggcatgggcaaggacttcatgtctaaaacaccaaaagcaatggcaaccaaagccaaaattgacaaatgggatctaattaaactaaagagcttctgcacaacaaaagaaactaccatcagagtgaacaggcaacctacaaaatgggagaaaatttttgcaacctactcatctgacaaagggctaatatccagaatctacaatgaactcaaacaaatttacaagaaaaatacaaccccatcaaaaagtgggcaaaggatatgaacagacacttctcaaaagaagacatttatgcagccaaaaagcacatgaaaaaatgctcatcatcactggccatcagagaaatgcaaatcaaaaccacaatgagataccatctcataccagttaaaatggcaatcattaaaaagtcaggaagcaacaggtcctggagaggatgtggagaaataggaacactgttacactgttggtgggactgtaaactagttcaaccattgtggatgtcagtgtggcgattcctcagggatctagaactagaaataccatttgacccagccatcccattactgggtatatacccaaaggattataaatcatgctgctataaagacacatgcacacatatgtttattgtggcactattaacagtagcaaagacttggaaccaacccaaatgtccaacaatgacagactggattaagaaaatgtggcacatatacaccatggaatactatgcagccataaaaaatgatgagttcatgtcctttgtaggaacatggatgaaactggaaaccatcattctcagcaaactatcgcaaggacaaaaaaccaaccactgcatgttctcactcataggtgggaactgaacaatgagaacacatggacacaggaaggggaacatcacactctggggactgttgtggggtggggcggggggagggatagcatttggagatatacctaatggtttcctctttcaaagtgtaccacttcagcctctgcttctgtcctcagattgtcttctctctgactttgcctcctctctcgccccttttgtaaggatccatgattacataaggctcacccgggtaatcccatataatatctccacctcaagatacttacttataccctcaaagtcccttttgccatataaggtaacactcgcagtttttaagcattaggaggtagatatatttgggaccattattcaatttaccaccagtgtaatcagcactcaagtgtcaaataaatgctaataggaccacagccttgagagtggggactctaaatactcagtggtgaaatacattaagataaagttcttcagtacctagagggatttctatgcagaatacattttgtcatttcatgtaggggatgcagcattcctattatgagatgacaagatagaaggaggcatgtgttggtgtaaggccagttaggtgttgaaggaggcatggcgtatggctagttagatgatagaaggaggcatgtgttggtataaggccagtttgagaccttagaggagacggctgcagttcaacatcagagctgagatggtgctagttcatggctcctgtctcaggcttgacactgacagttgacaacacggtgctctcctgggccttaggccattctgtcaccctccctgagctgtggagctgagctccttccctgtccttgcttctgcctcttcttagaagcctttttgaatttatcagagtgcctactatgtgccggaggagaatttgctgcacaagacaactttgatgtcttatccaagtcagcttctctgaactcgcaaaaaaacagattccttctagctctgattttcactaaatgtttctgaggtcttggttattctccacataaacctggagacatacttttcattaaaatataaggcagaggtatggggtttctgggtctgaacctcagaatagtcgaatggaagacagggtagggactttgagggcagcttcttactggctatgagactttggataaaagtgacaaccatacagagtccctttcccatctgtgaaaatgggattaacaaaaaaaagtcctttcagggtcaatgtgagaaccagcgaataagacaagtgcctcgccctgctgcactgtgaattaactttttttggaggcatttgtcctttggctgaaattcacatgctgtgtgctccagtactgtgaagtactttacttcctcaaccccatccttctcttagcttcaggactttttgcatacattttctttgccaagaatccatttgctcttttttttcccccccaacagtcttattttgttctggatcctttccatctttctttattctcaccaattatttagccctcaatttagacatcattcctaccacgcttggattagacatctctcctgtatttctcccatacttaacactatggtagcacttaacatgtaggcttgcattatctcatgtattttttttttcttcagaaaactaggtttattgctacacaatctgccagtaattccagctattttgggtgatttcattatttgacttagcattgtgtgtgtgtgtgtgtgtgtaagtacatatttcagaagtcagagtcttctctgttgcccagtgcagtggtgagatcatagctgactgctgcatcaaactcctaggctaaagtgatcctccctcctttgcctcccaaagtgctggggctataggtgtgcacccctccctgccccctacccccaagccagcactttatatttaattgtcttatgacttgtgtctgtttctcccaccagagctaaggtgggtagggctctgtcctcccatgttatcaaagacccagaacaatggctggtgtggacttgctggtcagtattcactcactgaaagtgtattggttgggaattttttcaactctgtaatgggttattgggttaaaaaaaaaaaaaaaaactcactggatttttttgtgtaggggtggggtagggggatgggtataagaaaataggatataaatttgttgtctcgggtcattgaggtttgtatttttgttattttcttctttttttgagatggagtctcgctctgttgcccaggctggagtgcagtgatgtgatctcagctcactgcaacctctgcctcccaggttcaagcagttctcctgcctcagcctcccgagtagctgggattacaggcacctgtcaccacgcccagctaattgttgtatttttagtaaagacagggttttaccatgttggccaggctggtcacgaactcctgacctcaagtgattcacctgcctcagcctcccaaaatgctgggattacatgcgtgaaacactgtgcctggcctgttggtttttcagttaatttttttctttttttgggggggtgggggtagagatggggtctcgccatattgcccaggctggtctcaaattcctgggctcaagctgtcctcccacctcagcctcccaaagtgctgggattataggtgtcagccactgcacttggcccgaggtcattgagttttattgatgcagaaatcactgaagttcttacaaatgttttcgtttttttgtttctttgtgttgttttttattttttggtggtggcaaatggaaatcttggtgccagctgtgttggcccttcactagcagggatcagatgttttggaaagtatattgcgggtgttttatcttgatctggttacttgctttaaatagttcaggttgttttggttaggctttctaatagtagttgatcataatactcagctttctattttggggaaagtttaatttcttattaaaaaaactttaaggaaaacctcagactttagtgttgaaaaaatgagtcacaaagaagtcagaaacatcagtgagggctgctccttatggctgtgaaattgagcaggctgtgcctccagatgccagcctcattagggtggattaatgctaagctcctctgagcttacacccatcattactccatgttcttctttctcagcaaatctgatgcccatcaattctgagcatgttctgtgcacttccagtattccattattgtttaccactacttgaagttgcccagctgaacaaacatttctgacttcagataatttacatggtatctttcccataaaggacatggcttcattgtgttaatttctttcttgcttaactaaacaagcaaacctttcttttgtcacagctttgtttctgtatggtaggaattctattctgacgtgctgtttaattaatgtttgaaaacaggacctttgcttatatgcttcccttggctaccagagacagctttgtagcgcatgatggagcctgcataatttctcactgactgtgtttgccttggtgttgtctgctacggagtttaagggtcacctctactatatattgttagaatatttaacttcaccactaacttcataccaatttattttcagtcttaatttttcctggctttatttttctctcatggtttgttgttgttttgggggagggtaggcgcaggggagacagagtctccctctgtcacccaggctggagtgcagtggcatgatcatagctcactgcagcctcgaccttccaggctgaagcgatcctgctacctcagcttcccgagtagctgggactacaggtacgtgccaccacacctggctaaattttgtaatttttatagagacagggtttcgccatgttgttcaggccggtctccaactcctgggcttatacacttagcttgccctggcctgccaaagtagatgtgttaaaaagtcttgctgattataaatagcgttatcattttgggaagtagattttttaagttgtgcaggtgtgtctgtagctgaaagaccttgttgtgtgaactagattacctttagaaacctataacactaataattttttttttaatcacacaacccctatacctgtctgaaagattatggtatacacaagtgtaggaattactgtttatttgccttatcagaaagtcttgaaagcattatggatttgtgtaccctcctaataactcgactggcctcttaagtatccagtccattggtgaaggtcactgctgggaatccatggtacttgttcagcctccttccttccgcagcaggagggactctcaaggagagactcttctcactgatcctagattaggccgcagaatccttctcacacaggctgtggataatcacagccagttgtttgcagttggcatgcaaaatgaacatgattgccccccttgggctagatgatcttttaagagcctgttcatttcaacttccatgtttattttagctcctttgagaatataaaaattctcccaatgtgtgaagagagcacattcaaatggttcatcgtctgagaaactctccagaccactcatctgtccctcccagattcccctccactgacccctctcagcctgtttccctttgggggcacggtttccgagccccttagagtagggttcagaattgagcatagtacttgctacaggtctaaactgtgcttattgcagggtgggatcttagctgtccttgacatttgttgacatttgttcagtgaatagaagatcacatgcccgtattccttaggcatgagatgatcatcggttacgattgaactagcttttagttattaataataacttgttattgatttacatgttacaaggtatgtatgggagggaggcttttgtgaacgagttgtctgatttaaccacgttgcctggtactagcatgaaggaccattctgagtgaacattggtgaggtgatagcacagttctgtaggtaaagggtccttctggaaggccactccagcgggcagaagacatcttgagttggatgaaagcaagttctcttgatcacagaagcaaaggtgggttaattccaaggacgctaatgagacttgctgagtgtcccctaaggaagtcagatatcagagtgtcctctagaaactcctaagaaattgatgagtggccaccttatagcaattgggagttatatgccactcactttaattttttaaattagaaatgtttttggcacagtggctcatgcctgtaatcacagtactttgagaggccaaggtgggaggatttcttgagcccaagagttcaagatcagcctgggcaacatgataaaaccccatctcttaaaaaaagtacaataatttgccaggcgtggtggcccacgtctgtagtcccagctacttgggaggctgaggtgggagtatcccttgagcctgggaagtcgaggctgcagtgagccgtgatcatgcaatcatactgtggcctgggtgtcagagcagcaagaccctgtctccaaaaacaaacaaaaaaaagtgtttgtgttcactgtagaaaacagaaaaaagggcttaaaatcctaccattcagagttaactatcattaatagttgtatatttgtgtgtgtgtgtgtatgtgtgtgtgtatatatatgtgcatatgtgtgtatgtgtgtatatatatatatacatatatatgtgtgtgtgtgtatatatatatatatatatgatgataagctgtccttgtctttttttttttcttccaaatggttttccatttgtgacagcactacttactgaatcagccttttcttgaggtcagcctttgtgctatccagcactgtgacatgttcgcagaaagtgttgcctttctcatttgaggcttagctaagcttgaggaagtcttggttcattagggttagtgaagaagggactgatggttctgccctcattttggccacatctgccatactgtggacagtactggccatcagtttacaacattcatgaatgcagagaagagtagtctctccttctttactgcttaccttaaatactttctgtaggttagctctgttggttagggtgtgtagcgggtgacaccagtattgtgtgttttaatctgggtgcattatcttttatgtcattaatatcctagaagagctattaataacacttgctgggttgttcgattttcagttttgtttcagatgcttagcaatttacttattgtttcttgaactaaatacattgaagagtaaggcctaaaagtagtggttcatgaacattcacttgtaaaaacagaaacattccttctccttgcctcaagttcttactcattttgatcttgccattctaccttctgtgttacaaattattcaactagggtgtgtactgggcctgtctacagacaatgatcagtgctttttatcattttaaaaagactttttcatttgcaatcttttggatgaaacatttctcaggttattctgcctttggtgatacttgattctaagtagatgtcttgtagtaccttagtcattgtaatataagtcccagtttcatgttttgtttggggctcagttccaaagaagttaaaaattaatcagcactggcttccaggaatagatcagaaagtctgagtgtctaaacccattacagctgttaaagctgtccttgcacccgtggaaagcgagagtgtcatggatgggttgtggctatgtcagtaaccttacaactgagattttaaaaggcaatgacaaggccgggcacggtggctcacacctgtaatcccagcactttgggaggctgaggcaggcagatcatttgaagtcgggaattcgagaccagcctggcgaatgtggctaaaccatgtctctactaaaaatataaaaattagctgggtgtagtggcacacgcctgtaatcccagctactcaggaggctgaggcacaagaatcgcttgaacccagggggtggaggttgcagtgagccaagatcgtgccactgcactctagcctgggtgacagagtaagaatctgtcttaaaaaaaaaaaaaaaaaaaagccaggcgcgatggttcacgcctgtaatcccagcactttgggaggccgagacgggcagatcacttgaggccaagggttcaagactaccctggctaacatggctaaaccctgtctctactaaaaatacaaaaaattagctggcgtagtggtgggtgcttgtgatcccagccactcaggaggctgaggcaggagaattgcttgaacccaggaggcggacgttgcactgagccgagatcatgccactgcactccagcctgggcaacagagcgagactctgtctcaaaaaaaaaaaaaaaaggcaacaataaatccaaggtgacaaaaacagctgtaaagtttttagctgtcttttcaaaaacgaaagttgtatgctgtacagttgtggtcttggcattcctgtgctgcctatacacaagctatgaagagggagaaaagggggtaaaggtggttgtgctgttacaggttttgtatttaattctagctggcatgtgagggatttcattcatgtgccagagtgggaggtcctggagtggggttgccctgctgtctgaatcttcccaccagctactcctaacgagctctggtggtttaccctaatctagcggcactctttgctttcctgtagctcagtggcttcatctgttttcttgtcttggtcagtcaagggacagatctacgcttgtttagttggtattttggcttcaaactgatttttttttttcttttcagaagcctcagttaaagaatgacttaaatatacttcttccccattataggtgatacaggctcgttgaataaaatttggaaagtaaagttcaaaaatatcttggcatattacctttcatacttctatgcaggtatacacacaaattgaattagatcagagtgaatttttaggctatttgatattaacaaaacttttatagaaattctatgttgctttatactttcccccactaatggacaagacattgtttttccatatcctccccagcatacttcatgctaacataattcaaaatattagccaattttgtctgcaaaaactagcatcgttatttcacttggcatatttgcctatctttgaccaatagtcaaaggggtgtgtgtgtgtgtattttagagacagggtctcactctgttgcccaggctggagtgtactggctcagtcacggctcactgcagccttgacctcccagtctcccaagtagctgggactacagatgcatactaccacacccagctaattttttttttttttttttttttacagaagggatctcgctatgttgcccaggctggtcttgaactcttgacctcaagggatcctcctgacttggtctcccaaagtgctggtattatgagcatgagctaccacacccagcctgaccatttatttttgactctcagttctattcatggcttcttttctccaactgtatatgtctgatattcttcacactttttgggcaaacagttacagtgtgttgattaaagatttatcatccaatttctttttcccatctgtgtagtcttgtaatttaaaaaaaaaaacagtactgaatatattgcatgtaatttcctgcttttttctcacttaaaccttaagccttttcacacattaaacattgggagttagtcgggtatggtggctcacccctgtaaatcccagcactttgggaggctgaggtgggcagatcaccaggtcacgagtttgagaccagcttggccaatatggtgaaaccccttctctactaaaaaatacaaaaattaggcgggtgtagtggcgtgtgcctgtaatcccacctactcaggaggctgaggcaggagaatcacttgaacctgggagatggaggttgcagtgagccgagatagtgccgctgcactccagcctgggcgacagagtgagactctgtctcaattaaaaaaaaaaaaaaaagggaataattctcacttttgttctgatttataacaacttaaatcgttgaattagtaggtctttttaaaaaacagctttattgaagtatgatggacataaacacatctttaaagtgcacgttttgataagttttaacatacatatacacatgtgaaaccattaagatttacctatgatgtgtgagtcaagagcctattccctttcatagctgagtagtggtttgttgtgtagatatactactatttacttgtttacctgttgaacatttgggctgtttccagtttttaactactacaggtaaaggtgctatgaacatttatgtgtaggtctctatgtggatgtttgcttttgtgaggacccacttgtaacccccagagatagtatgaagattattttaaactaaagacatttgagattcaacagatgcagaaagaagcctaatcagaaattccttactttaactaaaggcagaaacttctgggaatgaggctgctaaaaatctcctcccttggggaatgttcttggactggaaaaaaaaaaaaaaaaaaaaagatggagaagaccactcatctgcataaacaaacattacgacaaaatttatctctgttccccttgaaaccgatttattttcccatagaagccttttctcccgtatcctttttcctcggttaattgagtttgtaaactcccttttttagctgtttagagtactgcttttgtgcacttccatatgcgtatgaaaaagttttggttttttcctcctgttcatctgtgcattgtcagttgaatacgtaggccctcaattactgaacctaagttgataaaggagaaagtttttcttcctggtatattcatttctctcaggtaaatacacaggggtggaataactggatcatatatttaatgtttttaaaaaattctaggccgggcacagtggctcaagcctgtaatcccagcacgttgggaggctgaggcaggtggatcttgaggtcaggagattgagaccatcctggctaacacggtgaaaccccgcctctactaaaacaaaaaattagccgggcgtggtgtcgggcacctgtagtcccagctactcgggaggctgaggcaggagaatggcgtgaacccgggaggcggagcttgcagtgagctgagatcacaccactgcacttcatccagcctgggcaacagagcgagactccatctcaaaaaaaagaaaaaaaaaattctaaacttttccatagtagttgtgccactttatgttctcaccagcaggtccagtccttgacaacacttggtggtttaatattagccattctaaaattgctctgcatccttgccataggtgtgtagtatctcattgtgtgagtatgtgtgtgtgtttataataactttattgagatattcacataccaagtggcttctttctcttagtataatgctctcagtgttcatgggtattgtagcaggttttcagtgctttgttccttttttaaaatcagataatttaaatcagataatttaaaacaaattgtagaataaccataggtttacagggaagtagtacagatagtgtagagttcccacacaccctagacccagtcttctctgttattaacattaatacttgagtatggcacatttgtcacaattaaagaaccaaattattatttcatggtttatagtaaaccaaattccatattgttactcagatttccttagttcttacctaatatcctttatctgttccatgatcctgtctgggacactatttcattgtcatgtttccttaggcttctcttgactgactgtgacagtttcctaaactctccttcttattgatgatctggacagttttcaggaatattgatcaggtattttgtcaaatgaccctcagttggaacttgtgtgaagtttttcccattattagactgggtttatggactttctaggaggaagacttcagataaaatgtcattctcattatatcaagggcacatacaagcaatatgacttaccactgatgttgatgttaaccaaccaacctacctaccttccttccttcctttttctttctttctttcttttttttttttttgacagagtcttgccgtgttgctaggcaggagtgcagtgacgtgatctctgctcactgcaacctccacctcccaggttcaagcaattctcctgcctcagcctccccagtagctgggattacaggtacttgccaccatgcctgtttaatttttgtatttttaggagagatggggtttcaccatattggccaggctggtctcgaactcctgacctcaggtgatccacctgccttggcctccaaagtgctgggattatgggtgtgagccagcatgcccagcccactgatgttaaccttgatcacctggatgaaatagtatttgttagtttgcaccaccacccctccctgccaatactttgcacaacccgtacttaagtagtggagaattacgctctatctccttgagggtggaccgtctacataaattatttggaatttctctccttggagatctgttcaatcttccctatttgttcagtcatttggcttgtggatatttattttgtactctgagctatagtctaatactactttaactattttgctgttctgatgttccagctttggctgttgggggctcctgtgtccctttggtcactccatcattgtgtgtttctgtgtgtggtggttttttgttggttggttgcgattggttttttctttttgagtacgtactttctggcactacaagatatttcaggattatcttgtagaattgctgcttcagtccttgaaatagctatttgtctaaggagctttggttccttttattggagaatggctcaggcactccatctgccttggcctcccaaagggctgggattagaggtgtgagccagcacgcctggccaatatttcacatcttaaaaactttatgaaatggataatttttaagcatttacaaatgtagagagaatagtataataaatctccccatgtacctatcccctaacttcaattatcagcttaaggccaatctcattttctctatatctatcccacctctctctatcagataatttgaaacaaatcttagataagtaatttcattagaaattatttcagcatgtatctctaaaagatatgggcttaaaaaaatcaatatcatcacatataaaaaattctcataaaccatgaagtctgttcaaatatcttagttggttcacatttgaaaaattgtattaggatccaaataggctggatgtggtggctcatgcctgtaatcccagcactttgggaagcagaggcaagacaactgcttcatcccaggcatttgagaccagctttgggcaatgtggtgagaccctgtctctctttctaaaaaaaaaaataataaaaaaataaaaatagatgggcggtagggggaatccaaatgaggtttatattttgcagttagtcgatttaagtcccttgacttttaggttcccattcctttttttatcttccccccaccccctaccccattggttgaagaaactcttttatcctgtcatgtttaggttggctgacttcatccttgaagtacagtacatgttcctcagtcttctgaattcttgtgaatcggtggttagatttagagcagtgatctcaaccttaaattttaaaaattctaatgtccaggctatgtctcatactaatttgaatttctagtcttaggatccaggcatcagtatttttagctcctcaggtgattgtactgtgctgccaagattgagaaccacagtagatctgggcatattcagattcactttctttctccctcccttccacttcccctctttctctttaagcaagaatacttcatagatggtagtacagacttctgtcaggaagtacatacttggttttctctttttgtaatgttagcagccatagatttgagagctccattatttcataaagggaggcaaaaaggtcattttccaattctattattctttcatttattaattgaaacacttctataaagagaaactcccagatactatttggttactgccaaaatttaatttctataagaaaggcattaatgtttgattttacagatggcttatcaacttataatggggttatggtcctgataatcccattataagttgaaaatattgtaagttgaaaattcatttaatacacctaacctaccaggtaggatatttttgttttgttttgttttgttttgagatagtctcactctgtcacccaggccggagtacagtgttacgatcctggctcactacaacctttgcctctgaggctcaagtgatcctcccacctcaccctcctgagtaggtggaaccacaggcacgcaccaccacacccagctaatttttgtattttttgtagagacggggttttgccatgttgcccaggctggtcttgaactcctgggttcaagtaacctgcctgcctctgcctccccaaagtgctgggattacagtatgagccacctcgcccagtgcctaccaggttgttttataaagatccatttatggccattctttttaaagggctgcataattggaaaagactaatatatcttttgttggggttgtataaattgtttccagtctcattcttataaataggactttgttaaactgctttgagatacaatttaaataccatacaattcacccatttaaagtgtacaaatcagtggtttttagtgtattcacaaatacatactaccacaattaattttagaatatttttgtcacctcaaattctgcacccttcagatattgctctcttgttctttccccccactgaacccctatcaccccaccccacttagtcctaagcatctgctaatctttctatatttccctattctgtgcatttcatataaatgcagtcatataatatgtggtcttttgtgtctggcttctttcacttaggaaagtgtttacaaggttcttcaatgttgttgcctgtatccagacttttattctttttttttttttttttttttgagatggagtcttgctctgtcgcccaggctggagtgcagtggcacaatctcggctcactgcaacctcttcctcccaggttcatgccattgtcctgcctcagcctcccgagtagctgggactacaggcgcccaccaccacgcccgactaagtttttgtatttttagtagagatggggtctcaccgtgttagccaggatggtctcgatctcctgacctcatgatctgcccgcctcggcctcccaaagtgctggaattacaggtgtgagccaccgcgcccggctccagacttcactctttttattgctgagtaatactccactgcataaatataccacgttgtttatccgttcgtcagtccatggacattttggttgtttccactttttggctatagtaatgcttctatgtacattaatgtacgatttcttgtgtgaacatgtgttttcatttttcttgggtatgtttctaggagttcacttgcagagtcacatagtaactttatgttttaacattttgagaaattgccagactgttatccaaagtggctgcaccattttacattcttgccagcggtataagatggttctaatctcttcattttctttgcaaacacttggtatgatctgactttttgattatagcctactgggtgtaaagtggtatcctcttgtggttttcgtctgcatttgcctgatgactaatgatatcaagcatcttttcatgtgtttattgagcatttgtagtatatcttcttagacaaataatctgagtagacatttttccaatctgttaatggattatttgtctttattactgagttgtaaaagttactcacatacttgcttgttagcctgcatgtaaacatctaaatccatcagcctacgtgtcctgatttttgcgctacacttccatcactattccctgtatttaataaataattagattattttgataaactagtctttaatactatgtagttatattgtttccacacatggctttgcttaggtgtgtttgtttgtttgttttgagacagagtctcgctctgtcacccaggctggagtgcaatggcgccatcatagctcacctctatttcctgggctcaaatgatcctcctgcctcagcctcccaagaagctgcatctgtaggtgcaagccactgcacctagctgattgatttttttttttttttttttttttttggtagagctaggtttttctgtattgcccaggatggtctcaaactcctaggctccagcaaatctctaccctcccttacccctccacccctgcgttggcctctcaaagcactgggatttacagacatgagctaccacacccagccttgcttaagtattgagtttgttatgggcttctagaattttgatctttatacttacttgtctgaggtgtcactaatgggcaaggccatttttgttttaccataaggtgtatagcaattggataaaaattaatggtaggaggatagttattgagatggcagatgaggcactgattgtgatataagtgaatttgtatttagctgaacttttggtcatgattaaaatcctgacagatgtagtgcttgaatttgtttttagcaattttactgcttctgtctataaaatatgttaaacaatgagagaatatttctcttacgatacagttgaaatcctaggaaactttatcttggaaaaaaaaaaacctggtaagatcaaatttcattttactcaaactacagtgttttctgaaagatgcaggagttgctatcctgccaacctgttttgttgtattcagagataataacctgtgtagtgcccattacatagtgaagttttttgttttttgtttttttaaaacagcatctctgttgcccaggcaggagtacagtgctgcaaccacggctcactgcagcctcaacctcctgggctcaagtgatcctcccacctcggcctcctgaatagctgggaccacaggggtgtgtcaccacacctggctaatttattttttgtaaagatggggtcttcctatgttgcccaggctagtctcctgagcttgagtgattctcccgcctcagcctcccaaggtgctgggattacaggtgtgagccactgcaccaggtcacatagtggcattttaatgaacagtgcaaatgttacatctttgcccagtgattactgttaattttaaactttggactttgacgttaaaaattaagttttaaggccgggtgcattggctcaagcctgtaatcccagcactttgggaggccgaccgaggtgggtggatcatttgaagtctggagttcgagaccagccctgccaacatggcaaaaccccatctctactaaaaatacaaaaattagctgggcgtggtggtacgtgcctgtaattccagctactcaggagaccgaggcaggagaattgcttgaacctgggaggtggaggttgcagtgagatgaggtcatgccactgcactgcagcctgggtgacacagtgagactccatctaaaaaaaaaattaaaatttaacttaaaattttaaaatcagccatcactttaatgaacatataagcatatacaagtagagagtatataataaatcctcatgtacctgtcaaccagcttcaaaatttatcaactttctgtgcttgctggtatgaagagcttttgaagaatcattttccttacaaggtggtgactttttgagaaacgggtgtagcctattgagcactgactttagagtcacgtagtgtgggttcacatcctgactcttctcgtatttcctgtcccgctgggcatgtggcctttcctctttgaaactcaatttttgcatcttgaaaacagggttaatatctgcctttgaagattgttcagatgactaagtggaataatgtgtgtgaagaatccagtgtgtttggtggctgattactgtgtggatatagagacttctgggaggagggatttctccattgctgtgtgggagtcccaaagtctatagctctgtgctagggcctgttctagatacagctgtgaagttgagtctgatttagacatggacaagtgaatggccttccacagtaaaaacaagcccctgggttaggttggaggtgggtgcttactatggaagatgggagagaggtgtattaatttatcagggctgctgtaactaatttccacaaactgggaagcttaaaacctagttctggaaaccagaagtctgccatcgggtgctggcaagacttcctcctagcctctagtggctgtgcccaatctttgctgttccttggcttgtagctgcatcatcccagtctctgcctttgtagtcacgttgtgttctccctgtgtgtgtccgtccaaatttccctcttaaaaggatattagtcattggattagagctatattcagaggtactggtgaatttttaaagggcgctattcatcccagtacagggagttaaccaagactggggtgatcagggattgtgtcctagaagtaagaagacatagtgtgttctagtttaaaggtagttagtagggaatcagttgggagtggatgagagtaatgtatgacagtcttgaaccatattaaattgcatggatgccactcatcggccaagaagcatggtgggcagtaggccgggcacggtggctcatgcctgtaaccccagcactttgggaggccgaagcggatggatcacgaggtcaggagatcgagaccatcctggctagcacagtgaaaccccgtctctactaaaaaatacaaaaaattagctgggcacggtggcaggcacttgtagtcctagtactcgggaggctgaggcaggagaatggcgtgaacccgggaggcggaggttgcagtgagctgagatcgtgccactgctctccagcctgggcaacagagcgagactccatctcaaaaaaaaaaaaaaaaaaaaaaaagaggcatagtgggcagtctccacggtttttacctcaaaattcacagtgcagtgggtattcttttgtattcacggctgaacattaattttgaaatagcctttttatatttaaagacattaccaagttacgactttcccaacccatcttagaagttgacattcaaattctctgcatcccctgacctctcaccagttagctgaccatggcttgacctctcaagtgcacctgtgtaagacttcactcgttaacaataagagatgcatggaattgccccgtgtatagccagtgcatggatgtatattttgtagggaccaaatataagctataagagcatataggttccaaaccaagtatggactgggagtggcgagttgcagacacaactctggaatcctgctgttgaggacagaagcaggcacatggggaggagcagtttgaagactagaaaattgagattttgttttgtagtatctttaaactccaggtgaacttggttggtgaatagagcttctgtgagggcaatttactgttttatagaattgatttcctaaaagatttgccattaactgaactgtcttctgctaaccataacttctccttgattattaatggacccctgttactcattaaaacctttaaaattacttgagaatgcctgcttctagtcccagttcattcgcaataggtgctatccaaattggtacccaaatattttctaaacaacatgaagtggaatcacatctgaggggtaggatctgagtgaaaagttggattaatagaattctggaccaaaagcagtacttgtggacttaagcagttttttaactacagcagatataagagaacatggctgggatcaaaaaatgcctttatcttgaatacacactagctgagacagagcaacagtgggtgtggggaaaccttggtttgccttgtagaactacctgctccaccccaccaataaatttcaaaaggaaaaaatttcaaagacatttgtaacactgataatttgtccacccattgttcaaaagcagctgaacttattatgaaacacatgtccatcataggaaacaaatgctaatggagggagggactccactagtccgctttcttccatagaactctgaccttgtcctagcagtgtgttcaatatgccacaatgagttggtgtggtaagcatctttttttcctctgcttggtctccaaataattcatacatttggttctgctcattcaattgtgtttctccagtactcttccgggggagccttacgaatagaagagaaggccaggcacggtggctcacacctgtaatcccagcactttgggaggccatggtgggtgaatcacgaggtcaagagattgagaccatcctggccaacatggtgaaaccccgtctctactaaaaatacaaaaattagctgggcatggtggcgtgcacctgtagtcccagctactcgggaggctgaggcaggagaatggcttgaacctgggaggcggaggtggcagtaagccaagatcatgccactgcactccagcctggcgacagagcgagactctgtctcaaaaaaaaaaaaaaaaaaaaaaacaagcaaaaattagcctggcatggtggtgcacgcccataatcccagctacttaggaggctgaaacaggagaattgcttgaacctgggaggcagaggttacagtgagccaagatcataccactacactccagcctgggagacagagcgagactctgtctcaaaaaaaaaccaagaagagaaatgtctattttcctggcatttttttttttttgaaaactatctaaaggccagtgtaattcagatttgatatttgttttcattttcttcctgattctaaaattatatactccttgtagaaaacttgaaaagtgaaaagaaaaagtctttctcccaatggcaacattattccgtgactaatagttcagtttaatgattaggcatttttcaacatcgttgggtcttgcatgtataattttatatcctgttttaaacatttttaatttttttaaaaatcgaactatatttgatgtcataaaattcacctttctgaagcatacaattcagtggtttttagtatagtctaaaggtttggaagtatcaccactaatcttaagacattttaattactcccaaaagtaaccctatagccattaacagtcacttgcccctcctatcttccagtctcctcccaggccctagaaaccactaatctactttctgagtctctagctttgcctattgtggacatttaatataaaaggaatcatatatatgtggccttttatgtctggcttccttcacttagcataatattttcaaggtgcagccagattttagtaggtacttcattcctttttatggctgggtaataattattgtgtgaatataccacttactgtttatccatccagcagctgatggacatttaggttgtttccattgaatgatgctgctctgaacactggtgtacatgtttttgtgtaaacatagattttcagttcttttgggtgtatacccaggaatggaattgctagatcatatggtaactttttgaagaacaaccagacagttttccaaagaggctgtaccattttacattcccaccaacgatgtctgagggttccagtttccctatatcctttgcctaaacacttgttattatttgtcttttcaattatagccatcctagtgggtgtgaagcgataagtcactttagtttgatttctgttaccctactgactaatgatgtcgagcattgtttcatgtgcttattagtcatctgtatatcttctttgaggaaatgtctattcacttcctctgcataaaaaaatgggttatttggccttttagtgttgagttttaagagttctttgtatatgctagatgtaagtcccttatcagatatatgatttgcaaatattttctcccattatctatgtctttgcactttcttgatagtgttctttgaagcacaaaggttttatttttttgttcttttctttttagcacagttttttttttaaattttgtcataaacattatgtaattggactccttaagtttataatggatgttttttctgttctatgtgtaactggtaatttacttaaccattcctcatgtttaaccattaccacagttgtgaacatatctgtggatgaatttacacccacattcctgctgatttctttagtgacaattgaacagaaataaaattagcaggtcaaagattagcaatctttcaaggtttttttatttagttagttaattttggtctttgagacaggtttcgctgtgttgcccacgctgatcttggctcattgcagcctccgccttctgggccaagccaacctcctgcctcagcctgtcgtgtagctgggactacaggcatgcaccaccattcccaggtaattttttgtattttttgtagagatggggtcttgccatgttgcccaaaatggtcttgaattgctggactcaagcgatccgcctgcctcgggcctcccaaagtgttgggattataggtgtgagccaccgtgcccagcctcaaggctttttctttctttctttcttttttttttttttttttctttgggagatggagccttactctgttgcccaggctaaagtgcagtggtgtgatcttggctcactgcaagttttgctttcccggttcaagccattctcctgcctcagccacccgagtagctgggattacaggtgcccgccaccatgcccggctaatttttgtatttttagtagagatagggtctccaaactccggacctcaggtgatccgcctgccttggcctctcaaagtgctgggattacaggcgtgagccaccgcgcctggcctcaaggctttttttaattgctaaatttattttgagaaatatctcaagtaacactcctcccagcagagtttaagacttcttccagtgatcccttgttagtgctgtatgttgatgttagcatctgttagctgtgattcctttgcccttttgcaagtggagctgctgtgttttcccaaaattatttgtgtattttaaagtcagttttaccaaatcatgtgttttcatgtagtgtggtattcttaactgcacctattgatgggatgttgagaactgctcatgctaaattcaattctatagcataagtcggtagtgagagattgagttttcttttttccctttattgaactagtttaggaattttattataaggccccatagagccagaaggataactgctgcacacctgaaggactaattcttgtaggaaacattcctatcattattgactttggaatctacctcttctcctcctccagttgcttttattcttacttttaaactaagctttaaataggggtagtgggtaaaatgccagcatctgggatggtctgctactgcttttggagaccatacaatcgtggacatttatcacctcatttagaaaattcacttcttattctgtgattttaccagaattatgtttggagttgtaatcaggctttgttctgaactgctgtctttccctttttctctagtaatttatagctgtttggagtggtattcctgcctttctgctaaaggagtaagctagttactaaaactggtgtttgcttctaggattctctagcctttgcattttgttttagcggcgaaaagcctagaagggggcctgggcagtcagtgctgtcctagttctttgcttgactcccccagactgtgtggcatgttgggggaccctatgcctgaagggggtggaatgaaagaaagatagcagatcaatagctgggactcccacctattgaattccatgtggcagttccaaaggtttgcatttaccaacacggatggatcaccaagatgacagattggggtggtgggggagggtagcaagataaggaatgtcatacttaagcaagttacttaaaatcgacctcagtttattcatatatgaaatggggataattgctacattctgaggcataaataagatggattatataaaatgtttaaaacagtatttgacactctagtgtgaaaatttaaaactcaacaaatattgctctttgggtatatatgtgaatatatgagcatatacacatacctttttaaaaattgagaaattcacataatataaaattgttgcgggaagtcagggaccctgaacggggggaccggctgaagccttggcagaagaacataaactgtgaagatttcatggacatttatcacggaacctgccgacatgtgatgtctcccccagacacctagctttaaaatttctctcttttgtactctgtccctttatttctcagaccggccgacacttagggaatatagaaaagaacctatgtgaaatatcgggggtgaatttcccccgatatcaaatcattttctttttatacttttacttatttatcatcatcatcatcgtcactattggagacagagtctcactctgtcacccagggtggagtgcagtggcgtcatcatagctcactgcatcctcctaactctgggttcaagcagtcctaccaccccagcctcccgagtagctgggagtacaggcactcaccaccacatctggctaattatttttatttttgtagagatggggtctttcctatgttgcccaggctggtctcaaactcttggcctcaattgatcccttgcttcaagtgataacttggcctcccaaagagctgggattatggatttgagccaccatgcccagcctctactatactatttttatataagggacttgagcatctgtgaattttggtatccaaggtagggggttgctgaaaccaatccctcacagataccgagggatgactgtttatatgtaccatgttttgttttatccattcattagtcagaggatgcttgggttgctttcacctttcaattattggctattttgaataatgctcccatgaacatgggtgtagaagtacttctttgagtccctgtgttcagttcttttggacgtatactcggttagtgcatttgtgttgctgtaaaggaatacctgaggctgggtaccttgtaaagaaaataggtttatttggctcacagttcctcaggctataccagcatggctccagcatctgctcagcttctggcaaggcccagaaagcatttactcatggtgaaaggtagaggggagtgggcatgtcacatggcatgagagggagcaagagagaaaaggaagttccagcctcttttaaaacaaccagatctcatgtgagctcacagagcaataaatcacttgttacctcaaggatggcaccaagccatttatgaagggtctgcccccatgaccctaacacctcccacctggccccatccccaacactggggatcgcatttcagcatgagattcgaagaagacacaatgttcaaaccatatcaatacccagaagtggaattgctggatcatatggtaggtctatttttaattttttttgaggaactgctgtactgtttttcatagcagctgcaccattttatccagcaatgtatgagggttttgatttttccacatctgtgtcaacactcattattttcctttgtttttctttttatgatgccccttgaatcatattttccttctttttaaaaaattatggccattctaatggaggtgaagtggtatctccttgtggttttgatttacatttccctaatgactaatggtgcagagcgtcttttcgtgtgacacacacacttctaaaaacacctggagagaccccaccaaagcgacagtggtttcttctaggggttgggggaagtccctgttttgaaagcaggtggttcaaaaaccacctaacattgaactattttgaatgtttttatgagcatttctgtgagtaaaatgtagcacaagttaatgctggctagtaccttcttctgactaagatgtatagaagtatcgtatttagtacttggaacatgagcaaggggatacatgggagttaataaagctcttaacctgcctatggacagatttgattttctagtgcaggtaatggccgagtaaggattgaactggtttccgtcggtgtatttatattttatttaaattgcatagggaaatgaggcaacttattagaccaagtgattaagagtatgggctctggaatctgtgagctggagtttgaatcatttctccagcatttatctgtccaagttctgacactgtgaacttttctgtgctgcagcttgcccatctataacatggaataatgttgcctcatgggattgtgtggatttgagttaaagtagataaagcatttgggacaatgctgctgccagaaagcactcaaatgttagcagccctgattcatgactgaacgaaggctggtgtggttggagagaagagaatggccttaaaggatgagtggaacacggccttcagggcacttgttagggatctcttagagtttatagtagggtgtgacttgttctgctcggcttttaaaatcagtctagttccgtattattctaagtgaagtaactcaggaatggaaaaaccaaacgtcgtatgctctcactcataagtgggagttaagttatgaggatgtgaaggcataagaatgatacaatggactttgggtactcggcggaaagggtgggaggagggtgaggtataaaagagtacatgttgggtacagtatacactacctgggtgatgggtgcaccaaaatctcagaaatcaccactaaagaacttattcacgtaagccagacacagtggctcacacctgtaatcccagcactttgggaggccagggggggcagatcacgaggtcaggagtttgaggccagcctggccaacatagtgaaaccccatctctactaaaaatacaaaaatcagccgggggtggaggcacgtgcctgtagtcccagctacttgggaggctgaggcagaagaatcgcttgaaccccgggtggcggaggttgcggtgagccaagatcgtgccactgcactccagcctgggtgacagagtgagactccatctcaaaaaagaaaaaaaaaaaacttattcatgtaaccaaataccacctattctccaaaaacctattgaaataaaaaataaattaaaaataaaaatcagtctagctcagcattgccaaagagaaacataacgtaagccccttaagctctggattcggtttttccactgtgacttcagtgtggctggattgttggactgttctctctcagagagtccagtgtggccggataacttggactgttctctctcagaggctctgatcacatgactcctaggagtcctaaagcatcatctcctccccatgttagaggatctaacttgtgaacattgaaagtggctagaaagttgggacgctttgctccgtgtggtatgatggaggctgagcttccctctggggcttttcgatgataaaggggatatgcagcatggtttacaatcttattaatggtctggtctgtggtgctggctttcttaacttgacagtcattttcacaccagtgtgaggaatggtttgagtgttatccaagtaattacggtgctaacattttagagaaatatacattaaggtggatatttctttattttgttttagaattatatatcaatatttaactggaaatgattatttggaacctgcaatacagattgttcttcattttgtaatatagccatttctcacaaatagatgtaaaagaacagttcctgagatgatcttgcccatgacagataagtagttcctgtttgtataaactgtgctgagctgtttgaaggatgttcccttcatctccatatccctagcgctaagggtgattctgtggagactttttgcctctcttgttgcaatgagtagtagtcaaggtgactcctttctagaaacccctccccaatgactgacattggctttggtgcttggaagggtgtgtgtgtgtgtgtgtgtgtgttggcaaggtgtttgttggggcaagtaagcattaaatatcccgctttgcattttattaatactttaatctcactgtgatttttgtaatgcttgttccacttctatatcttttgtataaattcctgacaaatacctgtttgcttatattattatggacttttaaagacacctagaactggctgggcgcagtgactcacgcctgtaatcccagcattttgggaggccgaggtgggcacatcacttgaggtcaggagttcgagaccagcctggccaacatggcaaaactctgtctctactaaaaatacaaaaaattagctgggcgtggtggcacacgcctgtaatcccagcttctcgggaggctgaggtggtagaatggcttgagcccaggaagtggaggttgcagtgagctgagatcacactgctgcacaccagcctgggtgacagagcaagactctgtcttaaaaaaaaaaaacaaaaaaaccaaaaaacctagaactagcttcctttgccctgtagaacaaaaaaatagtgtgactcctttttaaccttttattgttcatcacagatcctgagcagtgagttcaaaggtaagacatggccccttcccttatgaggtttatgggatagtgcagctctgtgttagagccacattgaaggagtaacccatttccagagagattttcaggatatatattggtacacagactataatgcccgacattgttgttccatcttctgaaacacataaggcaaatgtaacagtcaaataaaaaagatttggaatctaagatcgtatgtatgataaattacctgccagcttaagcatggaagtcagtgtgactctgaaaactagattactgtgacacacctgacaatcacatcactatggttaataatcactagtctagtgggaaaataaagatcaggaaagagattataaagtgacattgctttcatttccaagaatgggtattagggagatgacgagagaggtactttacccagttttgagggcgtgactagagcataggtgtgggaagtatgttggatatatggaagagagaagtagtaccaggtaactgacaacctcttatgccatgttgaagtttggacaagttatactggcaatttgaaaccacagaagggtagtaactgctggcaggaggatatagtcatggagtgttaggctacaggcaagcatgctaatcagacttggttcagatagcccaggagtgatgggacttgagcagtgggtatgcagaataagcagtcagcagaaggcttatctgcagaacataaattatctacctcacgcccatagtggtatcaactaaaatacagccagttttgtgagggaggtggggatatatctggtatgtggctgagaaaatctgatcacgttgcaggtcaaagacagttttttaaactgtctttattgcagtgatctctatatgtgtcaataaactaggctactagattgaagagaagcatgaagaaacttgtcatgatggtgatagtttagtgagtgtatacataatgtcaaagtgaatcaaatttcttgcagtttattctgtatttcaatgatactgttactgaaccaaactggttctgtttgtccatgtgcaatggaaagcaaacaccaaagcataggttcttttgtaaagagaaaagttcgtggtaagactgtcaagcaaggagacagtcaggttcaaatctgtctcccccagctgggggctgggacatattttatagacagagggtaatgaggtatgatctgattgaatcttacaatgatgtgatgccaggaggtgtgatctgactggatcataccaggaggtgacaccagggctcaatctgattggatcatggatcatgtcatgtggtgtccacttcttaatttggtcctgtctcggtccaggcacttaggttctgcttgtggttgcatgcgtggttcatctggacaggctcaggttacagaacttgcaacctggggatccatggcaactgaagaacaaatcaccattttgtcacacaaagctgaaccagactaggccggttctgtggatgatgcttggccaaaaggccaagaagtgatcaataatacttcagagtttaaaaggcaaaactaggccattacctggtaaagttgcttttagtatttttttaacagctttattgagatataattcacatactatgcaattcaccatttaaagtgtacaattatttttttttaagtttttttttcttttttttttgagacaaagttttgctctcgtggcccaggctggagtgcaatggcgccatctcagctcaccacaacctctgcctcctgggttcaagtgattctcctgcctcagcgtcccgagtagctgggattacaggcaagcgcgaccacgcccggctaattttgtatttttagtaggtgcgaggtttctccatgttggtcaggctggtctcaaactcctgacctcaggtgatccgcccgctttggccttccaaagtgctgggattacaggtgtgagccaccgcgcccggcctagtatgttaatagatacgtgcaaccatcaccacatttttaggacaccttcatcacctcaaaaagaaacatttaactgtcaccctccactttcactttcctcagcccatagaaaccactaatctactttctgtctatcgtagagttccctattctggacatttcatacaaacaaaaatcatataataagtagttttttgtgactgttttcatttagcataatgccttcttttctttctttctttctttctttctttctttctttctttctttttttctttctttcttttctttctctctctctttctctctttctgtcttcgctatactaacaaggtaaccataatactttcaaggtctgtctgttgcagcatgtataagtacctcccttttatggttgaataatattccattgtacaaatataccacattttgtttccattcatcagtcagtaagcattcattcgggttgtttctacttcagactattatgagtgatcttaattttgtaccattacattcaggaagtgataatctttgcatttttcatgtgattctttctgtactgtttatacatttgaatgaactttgtttttttgtttttttttgtttttaaatagatggagtctctatctgttgcccaggctggagtgcagtggtgcaatctcagctcactgcaacctctgcctcccgggttcaaggattcttctgcctcagcctcccgagtagctgggactacaggtgcgtgccaccatgtccagctaatttttgtatatttagtagagatggggtttcaccatgttggcccggctggtctcaaactcctgacctcaagtgatccacccacctcggccacccaaagtgctgggattacaggcgtgagccaccgcgcccagccgtggatgaactttttttttttaaaaaggctgaacatttgagggtttcacgtcctaaatacataacgggggaattctagaaagacattttctatgaggctttactttgcatttataccccttcctccctcccctgtcgttggaatttaaacttacctaagcatagagaaatgtttcctttctggtttaagattttatttaggtatgggaacttgtgaaagtgttggaaatatagagtggaaagctttttgttttttttcgtggttttttttttggcctttaagactgtttaaaagaagtatttgtggctgacatagaatgattagcagtactgagaggggacaagaatctaggagacaaaaacaggtgcataagtagcttatgtgacaggtaacaggaacactgtcttatcttcctgtttaatgcagaattaagcaaaatgcggccggacactgtggctcacacttataatcccagcatttgggaaggctgaggcaggcagatcacttgagctcaggaattcgggactagcctggccaacatggcaaaactttgtctctactataatacaaaaagtagccaggcgtggtggcacatgcatgtaatcccagctactcaggaagctgaggcacaagaatggcttgagcctgggaggcggaggttgcagtgagccaagatcatgtcactgcactccagtaagactctgtctttaaaaaaaaaaaaaaaaaaaaagcaaaatgtgagaacttaccaagtgtaagttgtatttattctttgagagttcagtgggctggagtggcatgataccatttgataggccttgatataaaagagcatattcaaataatggcctgccttaagattgatgggattactatagtacagttcaagtcatttgggggttggaaatccttttgagatttgggaatcttattaggctattgacagccctttccctattctgttgtcattacttccaagccttgtacatgaaactttgagtaagacatcaaagatccactgaaatccatctatggggctatgtaaaatctcctaagttgtgttgttaaattttttccacagctaggtaccaagattgattctgcacctatttcttctaaggattagaggggtttttttgcttgtggtttttttttttttttcttttttactttgttttaaagccatgcttgttgaagtattattcacagacaataaaactcaccatttaaaaaaagtgcacaggattgtagtttctagttatctttctaaagactttacatggccaggtgtggtggctcacacctgtaatcccatcactatgggagaccaaggtgggtggatcacttgaggtcaggagttcgagaccagcctgggcaacatggtgaaaccccgtctctactaaaaatacgaaaattagctgggtgtagtggtgtgtgcctgtaatcccagctacttgggaggctgaggcaggagaatcgcttgaacctgggaggcagacgttgcagtgagccaagattgcaccattgtactccagcctgggtgatagagtgagactctgtctaaaaaaaaaaaaagatttacacggaagttgacaaccaatagcatttatctattcttaggaatagaatatttaactatacaggcaattttgttttgaatatatgcagtgaaaattttaatgtatatttctacttgtgtgtgtgtgtggttttataactttaacatatttgatgatcggtggctagttctcatcctcattgactgactatagatttttgaaagtggtaacaggtacataggtaatcaaaatatggagctcgtttggtgaatcttcattttcattacatttcctggacagctgttcacagattgtggtataggacgttccttattcctttggcccagacaactttgttgagcctcatgtcagtgaacacatctccttcataacaaatttccagatctctttgaatgcccaggggcagtcttcttgaagcccactccatggatacccttgtaaatgatgatgcattctcaggtcatcaccttgttggtggcagagcggcccttcttgtcacaacccttcttcgtagaagccattctaccaggcctaacttggaaaggaagagcatgaaaggattgtcccccgattttttttaagttaaaaaatttacctgtatcatttgtatgtgtgtgtatataaatatttatcactttggcactgtagcttttgaagaacatttgttgccttgacattattgtaggtttagtcggtattgtttatagatcacaggtgtttaacttttgtagtgttatctctaagagtaataaaagttaaggtggcataaggtaatctgtgtggagactaatatacttaattactgaacaaattgcttttcagaagaattaagaaggatgtttatttaattaaacttattaaattggcaattacttcctactccctgaacccctcctctacccctgcctccatccaagttgctataaagctctactatcagtgtggctttcatttaaaaactaaattttattttgagacagaatcttgctcttttgcccaggctggagtgcagtggtgcaatctctgctcactgccacctccacctcccaggttcaagcaattctcctgcctcagcctcctgggtagctgggattacaggcatgcgccaccactgcaggctaatgtttgtatgtttagtaggtatggggtttcaccatgttggccaggctggtctcaaactcctgacctctagtgatccacctgcctcggcctcccaaagtgctggattacaggagtgagccaccgtgtctggtcctaaaagctatattttaaataacatattaaactgtcaactacctcctagtccctgaacccctccgctacccccacctccatccaagttgctgtaaagctctattattattagtgtggctttcatttaaaagctaaattttaatggtagacatacttttcctcctgacttcattactgaaggtggaatgaatttgttagaattctgacttaagtatgaagtaaaacatttttcgtattgaaaaaatttcatttttgtttagaaaataagtaggttgcccactgcaccgccaccccccaccccccaacctcccgcttttttttttttttttttttttttgacacaaagtctcgctctgtttcccaggctggaatgcagtggcgtgctctcagctcactgcaatctccacctcccaggttcaagtaattctcttgcctcggcctcccaagtagctggtattacaggcacccgccaccactcccagctaattttgttgttttttctttttttttttagatggagtcttgctctgttgcccaggctagactgcagtggcacgatctcagcccactgcaacctccgcctcctgggttcaagcagttctcctgcctcagcctcctgagtagctgggactacaagcgcgcaccaccgtgcccaactaatttttctatttttagtagagacggggcttcaccatgttgatgaggctgctctcgatctcctcacctcgtgatccacctgcctcggcctcccaaagtgctgggattacaggcgtgagccaccgcgccctgcgaatatttttgtatttttaatagagacaaggttttgccatgttggccaggctggtctcgaactcctgacctcaggtgatacacccgccatggcttcccaaagtgctgggattacaggcatgagccactgtgcccggccacccttgtttttaatttaaggaattatgtgttgtatattttatctttgaatggcaacgtgagaggtttcttaatttttggcgtttataaaatgtgtctgtgatcaacatcacatggcaaattcacctataaaacagacaagcacttttacagagtactcttcctataagatataccaggatttcctcctatgaagtattcacttcactcatgaaatatttgaatgtctttttgtgatttaagaatagctataatcagagacaaagattaatgtgcttctgtgtgtatacctcatgcaaaagaaatttaccaaataaaaattaaatttacctcatgcaaaggaaatttaccaaataaaaataaagggcatttcactcataaataggtattaaccttatttaaaagaaaaaccaggccaggtgctgggtcacgcctgtaatctcagcacttggggaggcccagctgggatgatcccttgaatctgggagtttgagaccagcctgggcaacataccgagaccctcatctctacgaaaaacttaaaaattagccaggtgtggtggcatgcacctgtagtgccagctactcagaaagctggggtgggagggttgcttgagcccagtggttgaggctacagtgatctatggtcgtgccactgcactccagcataggtgacagtgagaccctgtcccaaaactaaaaacagaagctcaccccagacaaaccttgttatatgtttcaaactggaaacagtagacaaaagcctaaaatataccacataagataaaccttcctttagaagaaattgcttaagtttagtagtaaattaccataaaatttgttttctatttcctggcacctgaaaaacattttcaaggaaccgcccttttaactttgcagttaggctagggctaagtggctcacgtctgtaatcctggcactttgggaggccagggcaggaggatcccttgagctcaggagtttgagaccagcctgggcaacgtagtaagacctcatctctacaaaaaattttaaaaattagctgagggtggcggcgtgcacctgtagtgccagctgcttggatggctgaggtgagaagatcacttaaactcagaaggttgaggctgcagtgagctgtgatcatgccactgcactccagcctgggtgacatagcaagaccctgtctcataaataaataaataaataaataagaaaatttgtagttaaactgatgagtaagtaatttgctataatttacagaaacttactttgttttgctatagctcttagaagctaaggacacctgaatttggtttatattgatgagacgtacatctgcagttgatattataataaacttacagttactgttctaacagcctctccatttggataacatgcatagtataataatacagctacaggaaagatggtaaaaacatagacagcttcaaattgtacatttcccaaccccgtgtagacttagaaatgtttgcttcatttcacacttttgctgtctatgtatttatgttgggctttaaattccactccaggtagagtatgcactgtgctgtcttcatttttctagcctgccttgagcaatctgttttgtaagaaccattcgagctgtaaaagaagtcctttggaaaagaacatcttatagataaaactttagttttttttttctctttttattttactttattttttagagatggggggtctcactatgttgaccaggctggtctcgaactcctggcctcaagctatgctcccatcttggcctcccaaagtactaggattacaggtgcgagccaccgcgccctgttaaactttagtttgtaacttggttccttgtctagtgactttgtttacaaggagaaagtatgatgatgtgtttgtgtatgtatgagaaatatatgctctttctccttcagcctcaggaaccaggcggctgtggctttgcatacttttctgagccagttcttggttagccataggaaatgagattaatgtcagggatctaggagagggcagaagagacaagtctgagtgtgatatttgtggtatccatcccttagttctgcagtccaaagccccagataattttttggctcttttccatcacaattacttagtgattttaagacatattcctgcccttgataataacttgggaaactcaaaatttataattttctctccccctcctgataggtgctggatagtttactagtccagtatggagtggtggagagctgtgagcaaggtacatgtcttctgaattgctttcaaatttgtaaaaggaaggaagtagaaagaaaactaacttttattctcttcgtttttctcttcctctagtgaacactgactcggaaactgcagttgtaaatgtaacctattccagtaaggaccaagctagacagtaagcagcttgaagcttttaatctatatataataactaagttaagtacagtaacatattttgcggatttctcaactgagaagggctggtaggtggcagagagaaactttattttacaaaatttgaccctgtaatcgtgcctttctttttaagtttgaatgtctagtaaaaatctacattggttaaagttgtattacattttcaatatatctttaatgccaataatagagtggtctagtatgaaactgaatcacaccctatttgcagaagctctgggccttggtattgttgccaaataacataaagtctctccccgtctccccctcttgtatgacacatatattatggctattttatctgaagctggtaagttggatcatgtgttaaacaacagtgttaaatgataagtcttcttactcactggttacctgattaccattgtcatttaggagcgtgcagacattggattaatgtaatttgctcttagatttatggaaaaaaatatattccagtgcagtaaacaggcaatacttgacagatcaaacagtctcccctaggaaaagataattctataggctggaaaagatctaataaactgagcactagagagagaaatgggggtcccacaaatatggcctttaacagatctgcccagaatatgaacatgaaagaatggcatacaaagtgctcagtagcacagcactgggtgttagctaactatggaagcctgaactacctacctccagataccatactggcaggagcaggctgactgtcctctgtgtcagaaaggtgaaagaaaagaccacactggctgactctgagccctgaaggggaaaagtaaaacgagctgcaagagtaggagctcagctaggttactataggcagtactcactcaggagggactatgaaagaaaagactgagaagaagatggaaatgtgtataaggtaaatggaactttatttgtaaaatcaataacactcacatggttcaaaatataaaagatttgaagatgcacatagtacaaatcttcctcccagtattattccctaactaccttatctcttgggagataaccatgtggaaaacaaatgctacatgtatgtattcctccttttacacaaatgataccataacatttgaatgttttgtgtatataaatatattttttatagttacatagtatttgattgtacagatatggcatgactttgattaatcgcagtttggatatttaggttgtttccagtctcttgcagttatgaacaatattgtagtgaatctgtttttgcatgtcgtgtgtatgtaagcatgtatccacatgataaattcccagaagtagaactgcactttaaattgtgttgtagagctggagctagtttaaatttccatcagcattgtgggggagtctttctccaattctccctaacacaggactttatcaaactttgccaatctagtatgtgaaagtgatatcttgtgtttttcacttctcccataagtgagactggaggcttttaatatgtttaaacacattctgtatttcttctgttggtatcctttgttcatgtaaaattttttggcaatttatataaggtctcggacattatagaaattgtggtatgagtcataaaacaaatttatttttctttctcttctttttttgactaattttgttctttagttgtatcatgtaagaagaccaggaaaattttaccttttataccctcagtagaactggggataaaagtgagggcagggagaaagcagaggctccatattgttttaatttttatttattttgaggctgggttatgagactggcagtctttttttttgtattttttttgtagacatggggtttcaccatgttgcccaggctggtcttgaactcgtgggctcaagcgatctgcccatctcagcctcccaaaatgctgggattacaggcatgagccgctgcacccggccatgttttactttacaaagatttatactgaatacttggtagagccaagtccctgttggaaaatataggatgatgtgataaacccaaggatatttggagattgtcagagacctgttgttgtggccttatttgaaaacttaaattagctaaagggaaacaaaatgcttatttaatagttaattagttgaatgggagaacataagttggagacataagctatgtagatttgaagaggcataagatgaactttggtagggataaagtaattgacattttagccttcctcctttaaaaacaaaaaaacaaagcattaagactgcaagcacaggaaaggtagactggctagtcaaggcagaattattgctgaaaagaatcctaaccacgacagcaaactgaatgtagacacactggtgttctcaaaattctttagcgtagttgttaagagattggtaggcttctgttgatcccaaggaggaaggaaaaggctgttaagaattgtataatttagtaattaggtaacttaaataaattaggcattttgattagggaagtagtcttcatgtcctttgttctaatattcagtcagttaacatttattaaatactaaatactgaccaaaagttgccaataagaatatttggagagggactacctaattttagttcctccctgtcaagcggccttataagagtattgttctcactccctctgcaagaattcaaagattgagaaaattagaaagcaatgaggtatttttaaaagttaatctaaggagtggaaaactcagttttgtgttacagtggtaaaaaaattatcagttttctaataagcttttaaaagggatatggaatatgttttcattctgtgaggagaattaattttatttgagaggcattgggtgtagcagagaaagcgtaaacaccaaagtcaggtagccctgacttagtaaccttgacttctgagctttggttttctcagctacaaagtgaagattaaagagaaacaaatatttgtgcatatatgcatgtatttatagtttaacccactggttctgggctgcttggagcagtttgaagtggcttgagcctggacttccaatgaaccccataggcctgctccatgggttccaaacatgacagcctgctgcctaaaccaacctggtgtcatttctccatgtttctcggtagccacccaaagctcaatctttaggtgaaagggctatgctggtaattctcagttttctctttgtaacatctgttgtttggaaggctatgtgaccttgatgtacttgtgaaagtatgagtgagcttggaggttaagagttcaattccagagcccagttgcatggaacagactgtgtgccaccacttttctagctgactttggtcaagttaatctgttatggttcagccccatttctaaaatgggaataactgtagtctttagctaatgaggctactgagaaaaactaagataatgcctccaaaacatgtttcataatacctgtaaggtagagctcaaaagttagcagctattatgtatttttccaacatgtttgattgctgcttctgctcccctgttattgtttggtatacttcatttccagtgatggctggtcactgatgctgaggagccaggcagctagttttaacgtggttgtagctgcctctgttagttaaagctctatgaatgtcacttaagaagagtcctcaaatacggctgtatctttaagacagaacttaacgtggaaattcctgccaccttgtggctaaaataaatcaaaggttaatagtacacatattttagaaaatattaatacatgtgttcattttaggcttaagtcttgaattattaaaataaaaatttgacaagtttaaatttcatttcattagtttcattaaaaatggaagtatgtgtttagtgaatgcaccttttcttgttcctcagagcgagagaggctcacctatttccttccctcttccagagatgttgagataagccagtcaaggacagacattactcatgagaggatttgtcatgtgtgacaaagaaataaccccctagaaaatgtgtagacattgagttcttatactttcttttgtttggggttatcctgatgtttatttttgttagggaataggaatgtttattcatactttgaaacttcaatcattctgaggcaggagaattgcttgaacctgggaggtggaggttgcagtgagccaagattgcgccattgcactccagcctgggcaacaagagcaaaactccgtctcaaaaaaaaaaaaaagaaagaaactatcattgcagttcctttgtatcattgtgaagatctgtataaggtaaatatggttatgtttagaagtgtttgaagcaacttggccagtggctaaaggtaagaaaattcccatttaaactttaacaattatgtaaataaaagatttattttggaaaaagaaataaagcagtgagacaaagggattttttgccattcagggataaccactgttaaatttgccatagagttttgtagactttgtcccatgcattataactttcagaattacaaagatcattctgcagagttttgtgggtttttcattcagtgtatttatactgattctaatctctgcatagtgttggatcctcaccacagtttcctatcccgtcttctgttgtgtgtcatctagggtatttgcccataccgttttgttttgttttgtttttagaaccaatttagtcatgaagccttacatttgggcttcatccatatttattgcattacggtacatccttaaaatcatattacccaggctttcaataatgattgccaaattgtcaacctcttattcttgatacaaggagataattgaatttatgacttttcaataatgggttaaacctcattttgtgaggaccctgtattatatacagggtgatatctgggaataaaaaagaagagatttttagacatggaattttatttattttagtattattttttgagacaggttctcattctgttgcccaggcagacttgggagtgcagtggcacaatcatggcttaatgtagcctcaacctcctgggctcaaccagtcctcccacctcagcctcccaagtagctgggactacaggcatgtgccactacacccagctaatttttttttttttgtagaggcagggtctcactgtgttgccgaggctgatctcaaactgcggggctcaagtgatcctccctccttggcctcccagagtgctagaattagaggtgtgagctcctgcacccagccaggcatgaaattttagagctgaaagggaccatgaatctaatcttttagttttatagggagatggctaatgccaaaaaggaaaatgacctttggaggataacgtggttatttaatgttcaagctggactagaattctggtctctagtccgtattctttttccactattcagatctgtatgtgtggactcctgggtacgtttaacttgtctgggtctcatttcttctccttttttctttctctttccccctcttcctcaagttgaactatttattgtctctattgaggcccattcagctctaaattgtgatctaccccaatgaacaatttttttttttttttttggagacaaagtctcatttcatcacctaggctggggtgcagtggggcaatcttggctcactgcaacctccgcctcccagattcaagcaattctcatgcctcagccttccaagtagctggaattataggctcacgccaccatgcctggctaatttttgtacttttagtagagacagagttttgtcatattgtccaagctggtcttgaactcctgacctcaagtgatccacccatcttggtctcccgaagtgttgggattacaggcatgagccactgcacctggccccagtaaacttcttatcaatacatttaaattctaccaactggcaaaattactcatcatcttctcagcgacccttaaaatagcaccaagagcaaagagttaagtaatgatgacaggatcctggtctggcgctgtggctcacacttgtaatccaagcactttgggaggctgaggcaggtagatcacttgaggtcaggagttcgagaccagcctgaccaacatggtgaaaccccgtctctagttaaaagaaaaaaaaatacaaaattagctgggtgtggtggtacacgcctgtaatcccagctacttgggaggaggaaggagaattgctcaaaccaaggaggtggaggttgcagcagtgagccgagatcgcgtcattgcgctccagcctgggcaaaaaagtgagactctgtctcaaaaaaaaaaaaaataaaaataaaaagacaaaaccaggctcctgagtaatatacatgttggataaacatctttaagttctgtttaactgaatacatatgtgtcaaataattatgacagtcgttcatctcatgtcttgcatctacggtgggtttggtgaaaatactaaaattttttttcctcgtgaactcagcagatcaccatatgacatagatgaataacaaactttgtgcctagaaagattctagtagttgacttaaattcagtaatttaggagctgcaatcatgagaaagccgccattctgcatgttaggttcctcctgtaccttttcagctgtgtctgactgtggatggagcactgtggtttgaggggttaggaactctgcttagatggcaattagacagtcaggtacacacagtagtggctgtctgcattctgcctggaacagcctgagtttggagccattggggcccagaaggtacactggggactagagccccgggccacctgacctcttcagtgagagaatcttttcttttccccacaaagaaaaatctttttaaagcagcacaataaaagttagaagttagtttttgccaagttataaagttgtttcttgtgatacatgtgactatttagatggttctagaatatagaagcatctggtaactgacgtgtgtaccttttaccccagggagaatgatatctgtatgtgtctatctcactcaagaagagagttatctaccatttttgtaacattaatgacttaatttactagtcaaaatatacttactctcttctgaagctggcaatacgccatttataatgaaaaagcctagattaccttttatgcctagatgtaattgatgccttcagtgggttcaagtttcctgattttttgaaagaaccttcagtgatctgtttattcccgactttaaaaacatttaaggtcaggtgtggtggctcactcctgtaatcccagcactttgggaggccgaggtgggtggatcacctgaggtcaagagttcaagaccagcctggccaacatagcaaaacccatctctactaaaaatacaaaaattagctgagggtggtggcgtgcgcctgtaatcccagctactcaggaggccgaggcaggagaattgcttgaaaccaggaggtggaggttgcagtgagccaagatcgcaccactgtgctccagcctgggcaacaagaacgaaagtccatttcaaaaaaaataaataaataaagctgttttgaaagaatctgtagttggttgactcttctgcatctccaactttttataacaaatatacaccataaatattaaaatatatcagctgtcgtcttcctttagaaataaccaaaatattttaggtcccttaatccacattcccttaagaaaaaaaggggacaggaggaaagtacagcgttaacttaacgttctgtcatcaaggcattggcaaaataagtgtggcatgtgtcagctatcatcctctgaagcttatgaaaagaatgccctctgacatagaaatcacatggaaatatcgcaagacattgtatttaaaaacaagccacagagcagtgtacatcacaaccccaattatgcttttaatgaaggaaccgaatatgaatacatgtgtttgtaaacatatagaaaggactggtccatttgtagaagtactgcagtgagcagcagttctgggaagggccttggagggttggtgacggtgccagagcaacctcttgctactttctgcatgactgatcttttacaataagagttcattcatgtgccagagaaggtaggacagtgatagaagactgaagtgagaaaccgagaatcattctgggccggagaatgtcagcgagccctctgtctgcttgcccaggtctgccttccaggtcctagccctcagtgacctttttggtactagaactgtcacccactccacccccttttttctatttaagaattgagagtagatttgcaaataaagcagtgtataagccggaaatgaccacaccaagcaactagaaagagaccattttatgcctgtttttctttcccacctggggtgaactcagggccattggaacagaatctgagcaaagaacctgagtgacactgggaagtgtggggacttctttctttttgtttttcattttgttgtgcactggggagttaaaaagggatgtattgttaggtgtatgtttatgaaatctgggctatttcgtctctactagtttattattttcccttctgaaaacataacacacacacacaaaatgaatacaaaacaaagcaaaacaaacaaacaaaaaaccccagaaaacagaacacaacaatttggatgaatattacaataaattaaaagtttccagatatgagaaaatacatatcatgtatactcatatatatttacataaaatttttaaataggcagaattaatctatggtattagaagtctgcaaggggtaggggggcagtgactaccggaagcaggtactgttggggcttccggggccctggtgtgttctagttctggatctggatgtgtgtgttcaccttgtgaaaattcactgaaatttatgctcaagatttgggcacttttccttgcatgttaaaataaagatcaagaatgaaaaagaggctgggtacagtagctcatgcctgtaatcccagcactttgggaggccaatgcagcagatcacttgaggtcaggagttgaaaaccagcctggccaacatggtgaaaccccatctctactaaaaatacaaaaattagccaagcatgatggtgcatgcctataatcccagttacttgggaggctgaggcacaagaatctcttgaaccccggaggcagaggttgcagtgagccaagatggctctattgcgctccagcctgggtaacagagcaagactctgtctccaaaaaaaaaaaaaaaaaaaaaaaaaaatgaaaaagagagaaactctcccccaaatagtgtggtagaatgggcacactcttttttttggtttatcaccacccctgcctctttgctccaaatcagatcgtaaaccacaaagtcagggactggctcataataggtactgagtgtgattggtagaatttaatactcagaatagtctcttgtaaatggtttagagatatttgtccactggttcttaaaatggttttaaatacttcatattttagaggctgaagtgaaggaagtatatatttctgatgtctcttccactgtggtttggaaacattagccaaggcaagaagcccacttgcttctctcttgctgcttagctattcctaaaccgttagtaaccttatgggttaaacttaaccaagagtttgacaaaatgttttttgtttttctatttttcattaggagatggcacataggttccctttggaaacttgtggtctttttccccactgtgcctgtctcaaaggaaaatgtgtgtgggtggtggtggtgcggggtgggagaggggaggattatgtgtgttgcgggtttgctgcttgtgctggggcttcactcagaagtttagagctagtaatgctgagtagaagagatgggtgttgctttgctaaaagatgtgtcatatagcctgattccttttcccacccctgccccttttcaactttcagagcactagacaaactgaatggatttcagttagagaatttcaccttgaaagtagcctatatccctgatgaaatggccgcccagcaaaaccccttgcagcagccccgaggtcgccgggggcttgggcagaggggctcctcaaggcaggggtctccaggatccgtatccaagcagaaaccatgtgatttgcctctgcgcctgctggttcccacccaatttgttggagccatcataggaaaagaaggtgccaccattcggaacatcaccaaacagacccagtctaagtgagtatgctgagtgtgtggtgggtgttcatgagaattccccttggaatcttagtaacagtgtgtcgttctggtacttggtgcccttctgaacacagccatgaggactccttgtacagtacttgggaatgtgtaaaaatcttgcagtatcttggtgttcatttcatataaatctggagctaatcctcattctcaaagggaacgtcagattttcacacatgaatggaaaacaaatgatacctaatcctcttctggttggggaagctctggaagacagaaaggcagcttccaggttgtcctctgtcccaccccttaccccccacctgccctcattgtttttggaagtaattttctgggtccaatccattttatttgtggcctcaatacagaggtggtttttcagtcttgccttactcgaataaagaatcgctcatcttatttgtccgaatttttcctctgattaagccatgtaattagaatggctttttcttctggatattttttgatggttttaattggtgggatttaagggattggaatattcccattcaaatgttggagctaattatcaggagcagaaagcgggaactatttgttttattcactactgtagccccagggccaaggccagggccctgctacatagaaggatcttttatttgtcaaatgactaaaatgactgtatgtgaattatgtttgaagcctttcatgtgtatctaagatacttctcagttctcatgcattatatgttgttttgctttagaaaccatactgttgtacagtatgtggatattttttgacccaaagaagcttggtgacaaactcttccccccatacctagctccgtaacgtgctacgaggcacatcctgttactactgtatttcctgaagaacctgtgagtgtgctgggaagaagaggttgtatccaaaaataccattgtgcaagccttgagccagctacagaagtggcaagattatttttccttttaaatttagaaaggagaattcttttttttcagtgtgatccaacgaaataagcttaatctttctctaaaagttagaactgcactgctgtgtatactttatgtgtttgttccagcaggcctaagaggacatgcatgttcatcataggcaccatgcctgcattggactagctgacccatttctcatgtagaaccaaaaagaactgtactgagtggtggtccatacccacctgctccctgcagtggcatctgatcctgccttcccctgctttgaagcaggagatgttgggtgctggttacctgaatgcaaaattaatcgccctgacctcatcatgtaggagtgggaaagacaactggaccataacctagtcagtcggcctggctttaatcttaaaatttaagggcttcttgcttcccttgatccaccgttacctgcagaaattcattatatggcttcccttccttctcatgtagcagattagaattgttccttttcgagctactcatttccctgtcagatgaaagagctgtgacttaaattgaactgtttgttttacttaaggcaggaagatggggataggggaagggaagcaatttttgttatatccgatgattcatttgcagagctctgccagtggatttaattaactcttgacattgaaattagtcattatcagaacctcgtttctggaatggtctcagagggccattctaatctccaaagccacattcctttctctcaggggatcggagcttagtaatccttagcacagtgaaagggtgaaaataaactgcaaagagggatgctaatgtgttgctggaagacaggcatccctgaaagtgactggggattgaaacagcagccgggaagatgactcctaagattgggactgttatctaagacactatttttttattagttatttttaggtagcccttaatttgtttcatgcccttatttttagttttatcttttactcttgaggtaaatcttcagatttcaaccaaacatttaggaaaatgaaagccaaatcttgattttattggcatgatcaagtggtcactctcatggccatgagttatttagccctttaagtgtttgaatggccaaaggaactcaacaaatacttaattttcccaaaaacacatatttttgagtagctaattttctttcttgtacttattaaaaaatggcaggcttattttatatttaattcaaaacatataaatatgtaaattaaaaagttaccattcgtctcacctgggtagctgttggtaagttggggatgtatctctataggatttgttgcctgtatctactaacatgtgtgactttaaaaaagaaatcatgtcatgatgtgaattgcattatttcacttaaggactttttactgtgttggtacttgtaattttaccacattttcaaaaacatctgtatgatatgaatatactgttatttaaccatctcttcccgcaattagataattctaattttctatctgttagaaacggaactttcccatgccagtggttctcaactacaaatgatcatctctctgccccaacccccgtagacatttggcaatgtctggagacatttttagctgttagagttgagagagaggcatgctactagcatctagtaggtacaggccagggaagttagtaaatttcctacaatgcacaagacaccccatccacaacaaagaatctggcccaaaaagtcagtagtgccaagggtaagaaacatcactcttgacccatgtatgagactatatctgtagatgttaccaggagtagatgttacaagaaatacagttcttgagtcacaaggtgctcagcattttgctgaccagtttgctcctaccaaaagtgttgagtgtgccttgttacccatcatcttgcccatatttaattttttctatctcaatttttgcaagtctagaagaaaatgacattcttttagctggcagacatataattactagtgaaattaaacatcattttgagtttattggccacttgcttttcttgaagtagaattgccatctgtccaggttccattcctatcactgttcgttgcagactttcctctatcaaggaggcaaaatgtgggaagaaccttgcaaaggggaagcagattggtgaaatctgctcatccaatgaatgaagaatgatatactgtgcagaataagcagttcaacttggcttatgggattccaactcctctcttggcatgccctccagttcctatttgttttagagcagattgaatccaggctctttgtcatgagacatttgttctgtggcatctgaaaggaagctgtaagcacaaacagcttgggtagaatgaaaagatgtccccgcttggttggattgaggaaagagaaaggggaatgttcctagaattaaaatttgcctcttaaggcattaatgttgacagcttattgaaagtttatgctcttgagggaagtgagtcatctgctttgccctgaagccctatgactttgcatttggtaattacagactccactgtgaatacacgcttactgctctcgttttcctctctgcttgcgcccactatcagaatcgatgtccaccgtaaagaaaatgcgggggctgctgagaagtcgattactatcctctctactcctgaaggcacctctgcggcttgtaagtctattctggagattatgcataaggaagctcaagatataaaattgtgagtaaagaagattgtcctgtgaaagaggttgatatttgtgctcttgtatttttgacatctctgacacaattcttgggaattgccaacaaacagagggaaatgatatcctgatgagctacagtggttggcactgttgatctggttgtgaagtgtatgtcttttaatatttaaatattttcattcacatttgaacataggcgagtggtgataacggggaagagaaatgcagctatagaagaaggcaacttggggaacctaggaccaggaggtatcctggattaacccaaaacaggagccccaaatcttgactcatcctttactcggagctcattggagctctgttcttgtccactgcctggccccaccttggagcagcagggagtgtggaggtggggaagtgcctaagtctcttctaaggcaaactggagatttatctgggtaatgcaggcgggaactctatttcttccacaggaactttgagtgaaggttgggttctgtgccacgtttagcgtacagaacagcgctgcactgaaagtagaatcgagagtaaggcactggagttagtgtggggacctcattaccaaccttaatttgtagagaactttaaatatgttttagtaatattatatgtgggtgccatatcataagaatgtaattattaaagtaaaaattttaaagaagaattattttagtatagagaaaaataggcctggtgtggcgactcatgcctgtaatcccagcactttgggaggccgaggcgggtggatcatgaggtcaagagatcaagaccatcctggccaacatggtgaaaccccgtctctactgaaaatacaagaattagatgagcgtggtggcatgtgcctgtagtcccagccacttgggaggctgaggcaggagaatggcttgaacccgggaggcggaggttgcagtgagccgagatcgcgccactgcacgcctgcctggcgccagagggagactctgtctcaaaaaaaaaaaaagaaagaaaaaggaaaagcccaccatctattaaccacaatgacattttaaacagttttatatatatatgactgggaaattcagaaagctacaaaatgaaaagtgaaagctccccttcctgttcttatgcccttcccccaaagtgtaaccactgttgtttcttctgtttccttctataaattatgcacatatctccaggtgtatatttgtactggatggtactgttttttatttgtacgttgtgttctggtagtaggggtttaggaatatggttttgagtaagagactccatcactgaagatatttcctgaagtgaataaaataagaactattttagaagttaacttctgtattttttctccccttctattcatgcattgctagaatgctggccaattgtcagcaagttttaagctgtacctaacacagtgcttcccagatggtaggtaggaagtaaatgtttaatgagtgaatattgtctttttacccacgaataggtttacttattctaattttatggccacttttctatttacagcacagaagagatccccttgaagattttagctcataataactttgttggacgtcttattggtaaagaaggaagaaatcttaaaaaaattgagcaagacacagacactaaaatcacgatatctccgtgagtgctcctttgcttttgaataagaaaactttccaacactgtaagctgcatgttgtgtattgggcttagcttcccactttacagctgcttcagctagcctgtgctgccgtacttacacatggtttctcaaatacagcttgctgcctgttaggtttctgacccgtattgaaagcattatctgcttctggcaggaggaaccaaatgctttacattcatgttttctaaagcagtcttaactatgttttatgacatttattcccaaagttggaatatataacccagtttattatccattgtcgtgtaacgcattatcccaacatttgacagcttaacacaatgtgaacattaattgctcagctagtttttgtgggttaggaatgcaggagcagcttagctgggtggttctggcttggggtctcacaatgctgctgacaagttgatgctggctgttggcagaaggcctcagttcctcccacatgggcttctccacagagctgcttgagtgttctcaagacatggcagctgtcaagatggaaactgcaatgtcttttatgacatagcctcagaagttatactctatcatttttctaatgttgtttacacaagtcagccctatttggtatgtatgtgtgggactacagataactgggtgacaggaatcaccttggaggcaggctaccacacttagaatctgtggatgctctgaaattacgtggaaaggtttttctgagggtggccattcttagtttcactcagagtactcaaaaaggtgggaaaagattgatgaactgaggaagagtggtaggggaaagactgcacggtgtttgtgtacaaggagttttcaaaggaggtagtaaggaagcaggaaacttctgtttggttgtaaagaaagggggaaaaaaaccccacaaagtggtaaattcaataagtaatactactttgtcttaaatttacccccagaaaggggagagttttaaaagaaaaaaatctcaaaagttattctagaagcagctatttttaaaactgtaatacaaaatgcttggcagggccaggttgagactgaattagaattatagacttctttttaaagtagtctaagagaaatagtcttcattatacaaatgtttacatttttaacaagtttgaggaaaatgttaaggaataacttcccattcatctggctcaaggttagcctgtgacattatactagtagtgaaaatgagaacttcaggaagatgaaggagatttgtaccaataatccatatcctctcaatttatgtacttagttctgttttccatggcacatgtctcccattgcttttcctctcaaggctgttgaccagcataggcttaggtgttttcaggtatgatattcagtggcttttgaaggttcagcaggacctaggtcccgcagggagtttctgaatatttctgccactatctaacgtttttgttatctaaatggcatcggtgaaccattttaaattttagtcaagatggattgatattcctccagcctacttcaatctaaattctaaagaaactggtaaaaactaagtttagacacaggaattctggcttgtgtttttggaatatttccatgctttctccttgcttggtgacccagaaaatgcaattgcacgagaatgccaattatgcctagaattggttaatacagactaggaacatacttatgaaaggttatgtacttagggtatttggtttcctcaaaaactatacatctttccagtcattttttaattcactgttcaattgtgaaaatggttcaactttaagcggttgagaagtaagctttatttaaaatatggacttgattgaactatatgtatccagtaatcgttagttgagaaaatgggagggcaaatattttcttctctcttgcagctttacagtttcggatttacgtcttttggggcttactcatttcccatcatgttttaccacccacttttacatattaccaggctccacagtttgtttttaattgccgtctgtggctgaattattagctgtcttcctccaattttcattctttttctttcccttctttttcattctgcagattgcaggaattgacgctgtataatccagaacgcactattacagttaaaggcaatgttgagacatgtgccaaagctgaggaggagatcatgaagaaaatcagggagtcttatgaaaatgatattgcttctatgaatgttagttttgttatgaagggcatgtctttattttaacaaatagttaaaacaatgtttttaactgcattaatattgaattcttttgtggcattatcactagaagtagttctagttgatttttagcacctcagcaagtaccctgggatagtagggaagatactggctttgacattaagctttgctgtctctgtgactttagcaaattattcagtctttgagccttagcttccttctgtctgaagtaaggctagtgtctacctacaaaggttaatatagtacctctcttacaatgttaatttgagagagtttaatatagaagaaatgttacatgaactggatttgaatcacagctgaaccatttatgagctgcagctctcttctcttatatgatttactcagtctctctgaggctcagtttactcatctgtaaaatgggactactgcctaccttgcattcttattaggattacaatagatataatgcatataaaagttaatgttaagattacaggtttaaaacttggttagccatataaaccttggagatacaagaatttcaattgataaaacaatctgtgtagtgcatctgaggctattaaagcaaattgctgacattccttaatcagtgaaatggtgctgaaaatggaatacttcaaaagcctgtcttaaattttaaagtaaatgactttaaaaaataattttttttcaattgggccagtcatctgaaacacaaaacctgagacgagggaaatgtgcaaatactgcgtttgtgagaagagcctagaatgctagccattttacaccccacgtgacttcttgccaacctgcttcaattctcactgcttggctccaaatgttctggaatcaactgggattaaatctaacccccttaggccttttaaaaagattttcaagtacactcaaatctcccttccaccgtctacattacgtcctcaacccttataaaattaaacaaattaaaataccctttctggctcctatttccattccagtgatatgtttacttgcagtagttacatggggatgggtcctgatttccagagggctcaactttgaggcctctagacccatggttgctaagttttacccagcaagtaaagatctcttaatagctggtttgcttttcaatgaaccaatcttacttgattacctcttcaactctgatacattgctttttgtctatatttagtttgcccacagcatgcagaatacggttttgtctaagtcctgtgggctagtcataagggaaaggaaagcttcccttgagatatcttaatgcagctgtggaccaaggagggggcaaaccagcacacagattttaaaataccaagggatataaacagatgtaaacgatgtactcaagtagagtcccatggaacatctgctttgagttatacaatcatttctttattagacaagagatcagtttgaatactgtcacttaaaaatgctcactttcccttgattcttttaattgtcaaattaaggggcctttttactgttgcagcttcaagcacatttaattcctggattaaatctgaacgccttgggtctgttcccacccacttcagggatgccacctcccacctcagggcccccttcagccatgactcctccctacccgcagtttgaggtaagataactggccttggctttctttgtgattgggcaaaatcttaatgtaaacctagtccccgcgtgatcatctgtttagatgccaacatatgctctccagttcttgctaatggagccttcttatttggccctttgtggagtagacatgggattattttgcagtttttggatagcggggttgtcaacatgtgttttcaaatatcacaacaaaagtttgggactttgaggtggcaggggaagaaacttagtaattgtttttcttatttaaaaaaattttttttcttttttcttttttcttttttttttattctaagttctcggatacatgtgcagaatgtgcaggtttgttacataggtatacatgtgccatggtggttatttaaaagtttttggagacacagtcccactctttcgcccaggctggaatgcagtggcacaatcttgactcactgcaaccttcacctcccgggttcaaatgattctcatgcctcagcctcctgagtaactgggattacaggtgtgtgccacaccacacccggctactttttttgtatttttagtagagacagggtttcgccatgttgttcaggctgatctcaaactcctggcctccagtggtctgcctgcctcggcctctcaaagtgctggggttataggcgtgagctattacctggccagtaattattaaatactaaaggaaaagattttttaaaggcttctttcatctttgtcacctgaagtcaatggctttgaaaggtcaggagtgactctgtgtgttttccatgttgagtgtacttttttaaaccaaagagataagatagttttgtgcacaattatattgtgtgtgtgcgtgcatacattaagcagatgtttattttgtaaagaggtaggttatataagaaataaatcttaggccaagtgccatggctcacacctgtaatcccagcactttgggaggccgaggcgggaggatcacccgaggtcaggagttcaagaccagcctggccaacatggtgaaaccccatctctactaaaaatacaaaaaattagccggagtggtggcaggtgcctgtaatcccagctacttgggaggctgaggcaggagaatcgcttgaacccaggaggcagaggtggtagtgagctgagattgcgccattgcactccagcctgggcgacagagcgaaactctgtctgggaaaaaaaaaaaaaaaagaaaaagaaaaagaaagaaatattttatacttgctttttaagaatagcagtttccttgaggtcagaaataggagactagtgatggtatgaaaataatcgcagcacagcagacacctgatggaataaattattttgaaagtagttaataattcagttgcattatcgataatcggaggtattcatgtgacattctaggatcttccttcatgaatttgttttgacatctctccctttttgtttggctcacttacttaatattaatattttgagtgatacctcttacaccaatttggggaaatgtccaggtggaataggttggtgattccactgtattactacctagaataaatatgtagagtaaaatgacattgaaattgtacagaaaatacagatggctcagattgtcccccttttatccttttaaaaatgaaaatttccttttcctgtccttgaacccaccaaactgattggggttctaagcagttgccctcctgccgtgtgtgtttctgcctttactgtcagcagcatcttgtctcccctgcaattcacctgccgtttctagtatgttttggcctggaaatcatgtaacagaatgatagccatcaaaatttcagctacaagtgaagtgtgcatagattcattacgtgccccctgaagtggctggcatgtttttactttgatgctaaaggggactggtagaaagaaccctggagtcagagcccaggtctggcccactgcctctgacacaattttgtgtcactgaaggtcagactccttggctctggatttgttttctcacctgtataataaaaaaaacctgaactataagaattgtgtctaaagcctttaaggtcacacatttctagtttctacagaattaaataatatgaaaggtttaaggaggaataggggagaatgagcctaaaataggaatctgagagtacatctagggacttaactttgaacatgtccactagtttatgtgtgtgtcataggattggtttagggcaggtgtgtccccaacacttctgtataaaatgacacttactaaaaggtacaatgagctgatcatgtgacgtaactctgtgctaggaaagctcgcatctaacccacatttctgctggttcccctaaattagctttctctctgggtgggttgcttaacctctctgtttcattcccagtttgtaaactgaggtgtccctttaactctttttttctctctatactggtgacatgttccaatcaacaaagcttttcacattacaagtgatcacagaatagaacattcttggacatcagtcttttacacttacatggatgcttcagtagccaaaattcctagagtgaacttgtaggtaactatttttaaaatatgtagataagactgcatattctctggatttagtcatttttctgacttatggtatagttctgtgtatcaggttcctatgttagaaaaattaagaatgctttgagagaagtgagatcatattaagaacttatatttctccagcacttctacagtcttaaatgtctgaatgacttaaatcagtggcagttttgttttaagaatgggaggaggaggtcggtgatgtttacttaaataaaagttgagccaagagtaaatgtaaggaagatgtcactggaataggtcatcttgcttctcctgtcatttaagctaaatcaaataggtgcaattagaaggagcaaatgagaacagaagttgcagaagctgccaacagtaaaaacactgccacagggcaagagctgcaaagatgtaacagtctggtggtttcaaggacaggcaaaggaaattcgcattcttaaaggaatacaacaacatggacagtcttaacaatctgtgttctttgcagaattccagtggatattttattctacatgtgttccaggcagtgatacaatggagttctcaactttataactgaatattttcctaaatcatttatccaaatcatatatttccctaaatcatatattactgtttttatttcttattttacattgattgacaatctgtaaagttcagcattaattattccctgccttaaggggaaaaaaatgtttttcccatacttaaattataattatcccagacaatttgaatgaaaatccctgggggtaggggtgaggcaaaggtatcaattttgaaagctcccgagatgactccaatgtgtagccaaggctaacaacaactgtttgattagttaagaacttgtgtcccacttaaataaataaaaatctcagtgggagcaggtggaagctcaaaaatgtgtagtttcataaaggtcatcaggagttttatgctacccgtttattgtcaggaactgttcttttcaagagatggggactcactatgttgcccaggctggaattgaactcctgggtgcaagtgatcctcccacctctgactcccaagtagctgggactacaggcacacaccatcacgcccagctaagaacttctgttctacaaagaatgtttactagtctttggaggggcgcttcaatgttgaaaagaacagtttctatcagtaccaattgcaagggagaaaaagttcaggataagcacaaatacatactagttgtgtatatccctttttctaccttgttctatgctttgaagagtgaaaaaaaactcacctctttctctctggaccacctgccatcccaactcgtaggaaatatcatgccaaaaacctctgtgggatgttgccgttatgtctgtttttacccttctaactctattttggcatactacatgtatcaggattaggtttgggtatgtattgttactagaaaaaaaaatggcttaaattcgttttcctttttcatgagaagagttcaagggtagacaatccaaggctggaagtggttccaccatatccttcaggactggtgcttctatctgccttgtgtgccattccctggcccaggataactgctcaagctccaactattgggtctgtttccagccaacaagaaggataaaggattgctggatgtggtgacagacacctgtagtcccagctactggggaggcggaggtgggaggattgcttgagcccaggaatttcagtccagcctgggcaatgtggtgagacctcatttcaaactgaaaaaaggataaaggatcaaaattggcagcatccttatttaaggacactgcctgaggatagcttttcatacttctgtttgcctcatgttggccagaacataccactggctgtgtctagctgcaagagaagctgggagacaatccctgtgtgagggcagcaatgtgcccattaaacacaggatctgttactaaaggaaaatacatgttggggacagctatttgtctgcttcactggatttggcactattgcctgttaaaggagcctcccagagcctggaagagaggaagcaagcttttaagttctctcaaaaagcagaatctaaattctggaggagaaaattccatattccagattcccattcctgtggttattttcatctaaataaagagaaaacaccattattcagaaaatcatattgtccctggatacaattagagtaaattctactttcaaacagctgctaggcaattttctggcttaatgttcaggggaacaattctttaacaagtgttgtttgagtatataacttcaagttgcagggggtggggggtggttgcaagtactcagttggaatagctttgccttcactatttttagactttgttctttttctaaaccgaaatcactaatacttaactattttgtgtacctagtggtcaccactttttgaaatacaaataaactattgtttttaaaggcagtaaatttcccaaagctttaccagtttctttgcttatcattgcttcttttttttttttcttttggagacagagtcttgccctgtcacccagggtggagtgtggtggcgcaatctcggttcactgcaaactccgcatcctgggttcaagtgattctcatacctcagcctcccgagtagctgggattacaagtgcgcagcaccatgcctggttaatttttgtatttttattagagacagggttttaccatgtttgccaggctggtctcgaattcctgacctcaagtgatccacccatctcggcctcccaaagtgctgggattacagacgtgagccactgcagccggcctattctttagcaagaaaaatgaagccaaaaagaagcaatgataacaaccaggcgttgcgatgagccgaggaggtggaggttgcaatgagccgagatcgtgccactgcactcccgcctgggtgactaagcaagactctgtctcaaaaaaaaagaagagaaaaaaagaacatactgttttatgtttgtgagggtctatgatgttatttaaaaaaaaaaaaaaatggtttagaaagttaaagatggacgggcattttgctctcagcacttttaaactgttcctgaactgcattctggtatctatacttgctgatgagaagcttgctgttcctttgaagctatcacagattacgtactaagatcgtgtttatccttgatgtcttgtaggttaacagtgaacttctgcttttattttaaatgtatattgcctgtcaagaagtaggttttgatggctaaatgtttcaaataattttttttttttaatatatactacttcctttttcttttagaattgttgcatttctctactcatgttttctcattcctgctttgtagcatgaaagtagaaatgatgcatctcttctttggataaatcccttgcctctattccattctagaactttgcctactagttcccccacaatattctcttcttcccagaacttgccaggttgagtctccccagagccaaagagttggttcttccaacagacaaaaagtctctagttcctgcctagcagctggctcgtacagtacttaactggcaaacttcgagtttataaatgacaggaaacgcgcctttcagaaatgctcaaacagtagggaagaaggaattggcagctagtgaagcagagcaagagctggaattggcatagtgcgtgtcgccttagctggatggtcttggcagcatacagttggattggcagaagtaatcccaagggctgctggcttcagttttgatagcctctttggagtcttctcagaagtctccaaaatgatagtgtaatcttaaaatggctagctttctgcttatgaaagaggcaagagagattagcacttttttaggcttaaggtactctttaagaaacaaagggccaggcgcggtggtttatgcctgtaatcccagcactttgggaggccaaggtaagaggattgcttgagatcaggctgggcaacatagggagaactctgtctctacaaaaaaaaaaaaacttttttagattagccgggggtggtggcctttgcctatcccagctacttggaaggctaaagtaggaagatcacctgagcccagggaggtcaaggctgcagtgatccgtgattgagccactgcactccagcctgggtgacagagtgagaccttgtccaaaaaaaaaaaaattatgagttggaaggaattttttaaatcagatgagtgtttcagggagtctcttagtcttcctccttaagatttctcacagtgggtgcaactcttttgttggtaaacaatttctaagtaagtaactcactgtgcacatttattatctctgagaagccttggttatctagttatggtgaaaaactttctttgcctttttttttttttttttttttttaatgttaaagacttcaatattttgttcaggtcatggagttgagtaaacttagtttcagttccagaccaaaatccatttaaaaacaacaacaaaaaaacccaggagtatctattttacaagccaaagggaaaccgtggcatccttccaggtacctggaggctgatcatgttggctgacatgcatgtctccatgcctttgtgatgtcttagattttgtcccccacaaagtaaatacacttaaccttactgtttgctcatacttgtatgtcttcacgatagatgattaggaattactcattggcagacttcaccagttatgcaaactttcagttgagcagctttgttcttctgttatttcaagccgtagttgagagtctgccaagaagtccaaaggaagttttgccgataggcatctggcacaaatccattgggaagcagcttatgtcctgtgaacatccttcagtcccaaagaatgtatccaagaaaaggttcagacaatgcaactagaccttaacttaaatggaaggaatgtgtaacaagactgggtaacgctaatgggccttttccaacctaggtctcatagacttaaattcaggtgaaaaaggcttataacttttgctctgcctgctgagttttgcaagtaaaaatttaaattatctgcctatttggggtgtccaaatcctgacacaggcttgttctagcataggcttattttagtctcgatttcttttcttttttattttttgagacagagtctcgctctgttgcccaggctctggagtgcagtgtcatgatcttggctcactgtaacctccacctcccagattcgagcgattctcctgcctcagcctcctgagtagctggaattacagtcacgtgcccagctaatttttgtacttttagtagagatggggtttcatcatatcagcccagctggtctcgaactcctgacctcaagggatccgcccgcctcagccttccaaagtgctgggagtacaggcgtgaaccacagcacccggctcatggcttattctgaatcccatataagaatgaagtgtaccagagagccaatttaatgattggcaaaagttgacagcatatttatgtgagctgccttacattcccagaggaaaattttcttgaaaagtaatctttggttaagaagatgcttcatggataggaaattggagcaaagggaattggacgacgttcagaaatgtcttcaccaagcctcagacatctgatgagtcaacttttcttcaagacatgattgccaacagcacacatcattgtctgtcattctagggcagcatctcctggtgtggaaaaacacttagtttgcttctaactctgctgcttctatttgacaagttctgttgcttctgttttcattccaggataggacattttaaagtctacacattgattcttcatgtatgtgccctttttttctgttacattttggtccttttgacccttatctactggccactattccttttccaaagcttcacacaacatttctcttaagtttatgcttaagcttcattttgggtttgttatttctcatcagcaaaacaagaacatggacagcccttcatcactatgtcagaaagataactttgtttttgtttctcacaacagcagccttggacgtgttccaggctaagacacatgcatgttcgggccaggctttcactctgaggaggatgctgctacattagtgttctctggggatatttaggaattgctctctgaaaccagtaccaggaatagtcattttttaataagtaaatgaatagtttttctctcatagtcatgggaaatcatgcaactaactttttaaaaaattagctgcgaggaagcttaaagccagatttgtataacagcatttttggcttcatcttatcttgagtgttcagttccctatgctcttatttcttcacctcctttgttttatctttacagattatgtgtattttataagcagcataaaattctttttggaacaaagcccaggaaacaaataattacacagtcatgacaaaatactgtggggtaaatctgggaaagttacacattaggtttagtttgaccattgaaaaggtctttatcaccaccagcttcccccaagtatattgttcagaagaacataatacggacattcttagtgagataaaatatttagatcccacccttaattttttttaaaatggtcaagattaacttaatggtcttgatacaaggaccagaatgatgaagtaatgctaacattgagcacagttgatagtcagtgttggcattaattcacttggtctatccagttataaaataaaaaaggccataaagggataaatgacacatggtaattgtgtgacacactgggggctgtgagttatatagtatcttccaaagagagatgctgttcttctgacttaaatagtgaagaatgaaataattttattttgtgttctttgttggtgaagagaaacagaagtgatctggccaagctgtgcaggacaggcccctaacacaaatctccacataatagtttagtaggaaggcaagtcttcttctgatgtatgtgttctaaaaatgctgaatagccagaagggagatttcatttagctaacagctatattaatacttgcagtgtgttacattatcctagaaaacatggagtatgccagagaactttgccaagttgtaaacaatatggtacaaatttagtacatctgtttatacaggtgctgaagaaacaaatgattagagatgggtgggtgattagagatgatgaattgaattttgggttaactcttacataaataagaggtacatgatggggattgaagatataaaggaagagacaatagagtttaagtgattttcatttgtaggaaactagttgatatggtttggctgtgtccccacccaaatctcatcttgaattgtaattcccacttgtcagtgggaggtgattggatcatgggggcggatttcccccttgctgttcttgtgatagtgagttctcatgaaatctaagggtttaaaggtgtgacacttgccccatcccttactctctctctctccctcctgccgccaagtaagacgtaccttgttacccatttgtcttccgccacgattgtaagttttttgaggcctgcccagccaactgagtcaattaaactccttttttttttcttttttttttttttctgagacagtttcgctctgtcacccaggctggagtgcagtggcacaatctcagctcactgcaacctctgcctcccaggttcaagcagttctcctgcctcagcctcccgagtagctgggactacaggcacacgccaccacgcccagctaatttttgtattttcagtagagacggggtttcaccatgttgcccaggttggtctcgaactcctgacctcaggtgatccacccaccttggccttccaaagtgttaggattacaggggtgagtctaaactccttttctttataaattacccattcttgggtagttctttttttgtttgttttttgtttttgtttttgagacagagtctcactctgtctcatctgtacacacccatcttatgcacgtttaagatactttgcaacttaaaagtttcaattcctttatcttcacctgacagttatttagctatatctgaaggtgctttataaagattttcagaaagttcagttttccatttttcactaattcatgtaatgatgcaatcaaatttttaaacataaacttctgtgccttggtacaaatacttctaagaatttatgtaatagaacttctaagtcaaagagcacaaacttttaaaattgacagacagttccaaatcatcatggtcccaaatcatcatggtagtacatgtattttatggtcaataaatttattaaagaaaggaagaaatcatcttagtataaatcatgcctttcacttttatgaaaaataaagcagccgggcgcagtggctcatgcctgtaatcccaacactttgggaggctgaggtgggcggatcacttgaggtcaggcatttgagaccagcctggccaacatggtaaaaccccatctctactaaaaaatacaaaaattagccgggcatggtggtgtgcacctgtaattccagctattcgggaggctgaggcaggagaatagcttgaacttggaaggcggaggttgcagttgcagtgagccgagattgtgccactgcactccagcctgggcaaaagagcaagactccgtctcagaaaaaacaagaaaaagcaatgtatgattctagaccgtatgtctagtatatattagtctgttttcacaccgctataaagaactacctgagtaattccagcactctgggaggccaaggcgggcggatcacctgaggtcaggagttcaagaccagcccggccaacattgcttgctttcagttgttgctttcagttcttaatcttcagtccacccctatttttcaaaataaaaataactgactgtctctggatgccctttttagcattttgatgatcataggtttaagcttttgccaactacgcaaaagaaatttcttttgactcacaggaagtcataccaaggccaatcaagggacttgtgagaggagaggggaaggcagcccctcgagtgacagttctagtgggcacttttctttaaagctttcatgtatatttttgacagctctagagaaatatatatataatataaatattatataaatatatattgtataaatattatacattattttattttatttttttgagacagagtcttgtactgtcacccgggctggagtgcaatggtgtgatctctgctcactgtagcctccgcctcccaggttcaagccattctcctgcctcagcctctcgagtagctgggattacaggtgcctgccaccatgcctggcttattttttgtattttcagtggagatggggttttactatgttggccaggctggtgtcgaactcctgaccttgtgatctgcccacctcggccttcccaaagtgctgggattacaggcgtgagccaccgtgcctggcagctctggctgtattttaaagcatatctatacccattgagagcttcatactggtttatgaatctggcttaggagatagagaaacccaggtttgaatcgtggctccaccaggtggtgtgtgacttcaggcaaataacttaacctctctggctcagttttttcaattctaaaatgagaatgttgttagtttctagaaattggatctgttgtggggtacaaatgaggtcatgcacagcacctcacacagaggagacccaaactgatcttgccacatggctgctgcatacactcacccttgtcaaagttatttttgcctcaacctgaatttttatctcagcatgctttttacccatctccactactcttatgtgaaaacaaaggcagtattcaaaggtatcataaatgtattaactggagtcctactggaatggaataactagaattccatagactgagcaggggcctttttgtatgggaatttaatatttaccaattttaaatgttcaggcccttttgactcagcagttctacttctaagaacgtgttgcagtagaggtattcaaacagggcacaaattttatgtacaaagattttattgaaacattgaagttggaaactatgcacacacactgtaggtgaggtaaatcaactgtggtatatctatttgagggaatactcttgtcaaaatgcagtagggacgtttgagtgaaaaaagatatccaagttaaggtaaaaaagcaaattaggatgttatttattgtatccattccttgttttaattttttttttttttgagacggagtcttgctctgtcgcccaggctggagtgcaatggcgtgatctctgctcactgcaagctccaccttccgggttcatgccattctcctgcctcagcctcccgagtagctgggactacaggtgcccgccaccacacccagctaatttttgtatttcttttttagcagagacggggtttcacggtgttagccaggatggtctcgatctccggacctcgtgatcctcctgcctcagcctgccaaagtgctgggattacaggcatgagccaccgcgcccggctcttgttttaaatttttactacattttttttactcatagaatatgtctgcctgacctttctggttttccatgtctgtcttttcactgggcttctgtcattcttcttgagcatttggcttgaaagaacgaagtactgaagctgtttgggtatagcacttactttaggttaggtaggtagttgattgtagaggtctaaattacttggtcatgtataagtttttgtgattaaccttggtaattcctagacaaattcttgctattttcagatttgttagcacattgttgtactttaatttttctcttgtccagttatcctttcccatttcaattttattggaaaataggcaaaagttattccttatattcaaagaaccagcccttttgttatttctggagtgtttttgttaaaaatattttcttcagaggaaaccaaaggcttaaagttgtttaaaaaaagtagttaagggccaggcgcagtggatcacctgaggtcaggagttggagaccagcctgaccagtatggtgaaacccaattttactaaaaagacaaaagttagctgggcatggtggcacacgcctgtaatcccagctactcaggaggctgaagcagaagaatcgcttgaacccaggaggtggaggttgcagtgagccaagattgtgccactacactccagcctgggagacagagcaagactctgtctcaaaaaaagaaaaaaaggaaacaattaactgaatttttcctttaaagatttaagatgatagtagttgagatttttcttgaaaaatgtaaacaaatgaggtagcagaaaggatacagcccaactacttttgagtgggattgatttttcacctgtgtcataggtgggcgtctagagagacaaagagactctcagatttaaataaacacgattaaaattcctaccaaacagggtgagtaaactgtgacctacggaatggcctcctggtaagtctgcattgggggacaagcgagtggcacggcctgtgtgtctgatgtggggttctgccgttggtgatcagtatctctccatggatttatggtgcttagtgctctgctctttgcctctgctctgggctcacaggaaaaaggtggaaccattagtgccactagtgatctccatgtgggaagagtgatgtcatttggtagtccgacattaaatggcacaaattggtttctacatctagtaaagctgtcagagcccagtgttactgttttctttggctgatttttgaaaacggcttaaaattttaaagatttctacctagttcctgagatttttgaaagcaaaactgttgctctgcggttgtttgagactttttaagaatttcaggacgggtgcggtggctcacgcctgtaatcccagcactttgggaggccgaggcgggcggatcacgaggtcaggagatcgagaccatcctggctaacacggtgaaaccccgtctctactaaaaatacaaaaaaattagccgggcgtgatggtgggcgcctgtagtcccagctactcgggaggctgaggcaggagaatggcgtgaacccgggaggcggagcttgcagtgagccgagattgcgccactgcactccagcctgggccacagagcgagactccgtctcaaaaaaaaaaaaaaaaaaaattagaaattaggatctgtcttatggctgtgtgtatacatactacagtactgatgggttaacttgagtacttgggagctgaatttatagtattatgcaataggaatctaagattcaagagaatcccatgaaagtgtttatcaagtagttcatgtctaagttgtgtaagacaaaatatcttcttttttaattaattaattaattaatttatttattatactttaagttttagggtacatgtgcacaatgtgcaggttagttacatatgtatacatgtgccatgctggtgccctgcacccactaactcgtcatctagcattaggtatatctcccagtgctatccctcccccctccccccaccccacaacagtccccagagtgtgatgttccccttcctgtgtccatgtgttctcattgttcaattcccacctatgagtgagaatatgcggtgtttggttttttgttcttgcgatagtttactgagaatgatgatttccaatttcatccatgtccctacaaaggacatgaactcatcattttttatggctgcatagtattccatggtgtatatgtgccacattttcttaatccagtctatcattgttggacatttgggttggttccaagtctttgctattgtgaataatgccgcaataaacatacgtgtgcatgtgtctttatagtagcatgatttatagtcctttgggtatatacccagtgattggatggctgggtcaaatggtatttctagttccagatccctgaggaattgccacactgacttccacaatggttgaactagtttacagtcccaccaacagtgtaaaagtgttcctatttctccacatcctctccagcacctgttgtttcctgactttttaatgattgccattctagctggtgtgagatggtatctcactgtggttttgctttgtatttctctgatggccagtgatggtgagcattttttcatgtgtgttttggctgcataaatgtcttcttttgagaagtgtctgttcatgtccttggcccactttttgatggggttatttgtttttttcctgtaaatttgtttgagttcattgtagattctggatattaaccctttgtcagatgagtaggttgcgaaaattttctcccattctgtaggttgcctgttcactctgatggtagtttcttttgctgtgcagaagctctttagtttaattagatcccatttgtcaattttggcttttgttgccattgcttttggtgttttagacatgaagtccttgcccatgcctatgtcctgaatggtaatgcctagggtttttatggttttaggtctaacgtttaagtctttagtccatcttgaattgatttttgtataaggtgtaaggaagggatccagtttcagctttctacatatggctagccagttttcccagcaccatttattaaatagggaatcctttccccattgcttgtttttctcaggtttgtcaaagattagatagttgtagatacgcggtgttatttctgagggctctgttctgttctgttccattgatctatatctctgttttggtaccagtcccatgctgttttggttactgtagccttgtagtatagtttgaagtcaggtagtgtgatgcctccagctttgttcttttggcttaggattgacttggcaatgcgggctcttttttggttctgtatgaactttgaagtagttttttccagttctgtgaagaaagtcattggtagcttgatgaggatggcattgaatctgtaaattaccttgggcactatggccattttcacgatattgattcttcctacccatgagcatggaatgttcttccatttgtttgtatcctcttttatttcattgagcagtggtttgtagttctccttgaagaggtccgtcacatcccttgtaagttggattcctaggtattttattctctttgaagcaattgtgaatgggagttcactcatgatttggctctctgtttgtctgttattgatgtataagaatgcttgtgatttttgtacattgattttgtatcctgagactttgctgaagttgcttatcagcttaaggagattttgggctgagacaatggggctttctagatatacaatcatgtcatctgcaaacagggacaattggacttcctcttttcctaattgaataccctttatttccttctcctgcctgattgccctggccagaacttccaacactatgttgagtaggagtggtgagagaggtcatccctgtcttgtgccagttttcaaagggaatgcttccagtttttgcccattcagtatgatattggctgtgggtttgtcatagatagctcttattattttgagatacgtcccatcaatacctaatttattgagagtttttagcatgaagggttgttgaattttgtcaaaggccttttctgcatctattgagataatcatgtggtttttgtctttggttctgtttatatgctggattacatttattgatttgtgtatattgaaccagccttgcatcccagggatgaagcccacttgatcatggtggataagctttttgatgtgctgctggattcggtttgccagtattttattgaggatttttgcatcaatgttcatcaaggatattggtctaaaattctcttttttggttgtgtctctgcccggctttggtatcaggatgatgctggcctcataaaatgagttagggaggattccctctttttctattgattggaatagtttcagaaggaatggtaccagttcctccttgtacctctggtagaattcggctgtgaatccatctggtcctggactctttttggttggtaagctattgattattgccacaatttcagctcctgttattggtctattcagagattcaacttcttcctggcttagtcttgggagggtgtatgtgtcgaggaatttatccatttcttctagattttctagtttatttgcgtagaggtgtttgtagtattctctgatggtagtttgtatttctgtgggatcggtggtgatatcccctttatcattttttattgtgtctatttgattcttctctctttttttcttgattagtcttgctagcagtctatcaattttgttgatcctttcaaaaaaccagctcctggattcgttaattttttcaagggttttttgtgtctctatttccttcagttctgctctgattttagttatttcttgccttctgctagcttttgaatgtgttttctcttgcttttctaggtcttttaattgtgatgttagggtgtcaattttggatctttcctgctttctcttgtgggcatttagtgctataaatttccctctacacactgctttgaatgcatcccagagattctggtatgttgtgtctttgttctcgttggtttcaaagaacatctttatttctgccttaatttcgttatgtacccagtagtcattcaggagcaggttgttcagtttccatgtagttgagcagttttgagtgagtttcttaatcctgagttctagtttgattgcactgtggtcagagagatagtttgttttaatttctgttattttacatttgctgaggagagctttacttccaagtatgtggtcagttttggaataggtgtggtgtggtgctgaaaaaaatgtatattctgttgatttggggtagagagttctgtagatgtctattaggtctgcttggtgcagagctgagttcaattcctgggtatccttgttgactttctgtctcgttgatctgtctaatgttgacagtggggtgttaaagtctcccattattaatgtgtgggagtctaagtctctttgtaggtcactcaggacttgctttatgaatctgggtgctcctgtattgggtgcatatatatttaggatagttagctcttcttgttgaattgatccctttaccattatgtaatggccttctttgtctcttttgatctttgttggtttaaagtctgttttatcagagactgggattgcaacccctgcctttttttgttttccatttgcttggtagatcttcctccatccttttattttgagcctatgtgtgtgtctgcacgtgatgggtttcctgaatacagcacactgatgggtcttgactctttatccaatttgccagtctgtgtcttttaattggagcatttagtccatttacatttaaagttaatattgttatgtgtgaatttgatcatgtcattatgatgttagctggttattttgctcgttagttcatgcagtttcttcctagtcttgatggtctttacgttttggcatgattttgcagtggctggtaccggttgttcctttccatgtttagcgcttccttcaggagctcttttagggcaggcctggtggtgacaaaatctctcggcatttgcttgcctgtaaaggattttatttctcctttacttatgaagcttagtttggctggatatgaaattctgggttgaaaattcttttctttaagaatgttgaatatcggcccccactctcttctggcttgtagagtttctgctgagagatctgctgttagtctgatgggcttccctttgtgggtaacccgacctttctctctggctgcccttaacattttttccttcatttcaactttggtgaatctgacaattatgtgtcttggagttgctcttctcgaggagtatctttgtggcgttttctgtatttcctgaatctgaatgttggcctgccttgctagattggggaagttctcctgcataatatcctgcagagtgttttccaacttggttccattctccccgtcactttcaggtacaccagtcagacgtagatttggtcttttcacatagtcccatatttcttggaggctttgctcgtttctttttattcttttttctctaaacttcccttcttgcttcatttcattcacttcatcttccatcgctgataccctttcttccagttgatcacatcggctcctgaggcttctgcattcttcacgtagttctcgagccttggttttcagctccatcagctcctttaagcacttctgtgtattggttattctagttatacattcttctaaacttttttcaaagttttcaacttctttgcctttggtttgaatttcctcccgtagctcacagtaattggattgtctgaagccttctctcagctcatcaaagtcactctccgtccagctttgctctgttgctggtgaggaactgtgttcctttggagaaggagaggcactctgctttttaagagtttccagtttttttgctctgttttttccccgtctttgtggttttatctacttttggtctttgatgacggtgatgtacagatgggtttttggtgtggatgtcccttctgtttgttagttttccttctaacagacaggaccctcagctgcaggtctgttggagtacccggccctgtgaggtgtcagtgtgcccctgctggggggtgcctcccagttaggctgcttgggggtcaggggtcagggacccacttgaggaggcagtctgcccgttctcagagctctagctgtgtgctgggagaaccactgctctcttcaaagctgtcacacagggacatttaagtctgcagaggttactgctgtctttttgtctgtctgtgccctgcccccagaggtggagcctacagaggcaggcaggcctccttgagctgtggtgggctccacccagttcgagcgtcctggctgctttgtttacctaagcaagcctgggcaatggcgggcacccctcccccagcctcgctgccgccttgcagtttgatctcagactgctgtgctagcaatcagcgagactccgtgggcgtacgaccctccgagccaggtgcgggatataatctcctggtgtgccgttttttaagcccgtcggaaaagcgcagtattcatgtgggagtgacccgattttccaggtgccgtctgtcacccctttctttgactaggaaagggaactccctgaccccttgcgcttcccgagtgaggcaatgcctcgccctgcttcggctcacccatggtgcatgcacccactgacctgcgcccactgtctggcactccctagtgagatgaacccagtacctcagatggaaatgcagaaatcacccgtcttctgcatcgctcacgctgggagctgtagactggagctgttcctatttggccatcttggctcctccctcccgacaaaatatcttctaatatttctagaaacatttgctgattgggtatacatactgggtttttcctttcttttcttttttgttttttcttttttttttttttttttttttgagacagagtttcactctcacccaggttggagagcagtggtgtgatctcagctcactgcatcctgaaccacctgggctcaagtgatcctcccatctcagcctcccctgagtatctgggaccacaggcaagcgctaccatgcctggctaatttttgtaatttttgaagagatggggttttgccatgttgcccaggctggtctcaaactcctgggctcaagcagtccacccaccttggcctcccaaagtgctgggattacaggcatgaactactgtgcctggcttttttttttttttttttttttaaacaaaagcatattactggcttcttcagttgtggctcatttcaataactatttcttgtaatatgtgtcttggaactagcttatccttggaagtgtttttctcactatattgttagaaggtaaacaaagtggaaaatgcataaattatgtgcactgcttctgtactttagaactgttagttgactggtagcattactgaaccttgaaccttgaattggcctttttaggagcccagtcactgtgaactcttgagcaaatgtgtcctttatccctgcaaggactatttgaaaagagacccaggaagggcacaactggcttgaagtgggaagtagtgaaggaatgaggtacatagataaaatctatttatgaatgacctttcaggagttagcctacaaaatattttctaattttttcatgtataaaatgcaaagggggctgggcgcagtggctcacgcctgtaatcccagcactttgggaggccaaggcgggtggatcatttgaggtcaggagttcaagaccagcctggccaacatggtgaaaccctatctctacaaaaaaaaaaaaaaattagccgggtgtggtgacaagtgcctgtaatctcagctccttgggaagctgaggcaggagagtagcttgaatccgggaggtggaggttgcagtgagccgagatcgtgccattgcactctagtctgggcaacaagagtgagattccatctcaaaaaaaaagcaaagggaaggcacagatggaaggaataaggaattctgtgggaaagcatcttagggcatcttaccactaaagtgaattagctctctcctaatcctgtcctgtgcttggatgtgataactattgaatgacagtggtaaggtttcatacaatttagtcatatgtaacaaaattcagcttttctcttaaacacttcactgtgtatgtgtttaaggagtgaaacctacatagataaggtgtggagctggcgtccttgagttctgttgtgtttgatatgtagcccagaatttcatttacttgttaagaatctaccttgagagtggtagggggctcttacttaatttttaatgcaagcatgtcccgctattctaatatgattaaactttacaacatctacatatcttttaaatccataactcagtgacattttaaagtttaaggcaacagtagagaaaagtgaaattttaaataccactgttttcaggatgactgtatgagatcttcttgacctattaggtaaggtctggtcaacttcttatggtagcttttccttaaactttcctggtattcctactgcatgagaaggtgtccttcctaaagctaatgttaacaaaagcctgatttgtagcaaataaacatgggtgtcctggctttcttttctaacagcaatcagaaacggagactgttcatctgtttatcccagctctatcagtcggtgccatcatcggcaagcagggccagcacatcaagcagctttctcgctttgctggagcttcaattaaggtactgttctaccagctgtggttctctggttctttaagtaagttacagaaatatgaatcttcttgccactttataatttgaatagaatgtaaaagacactgttagggttacataaggatatgaagaaacccccaaacaacagtggcttacaccaaggaggctaacttctctgtgcagaaaacacagttaggaggtgaacatccgggctgggtgttggctctgcccccaccaagtccttggacctaagttccttccaagccaccttccccaggtacggccttggtccctcttggttccagattgacaccattcagtgctccaggaatcaggtctgttgcccagccagtaggagaggagaacataataaagagcttttcttctagggaggtttcttgttagctactgtgggatatttctacctatatttccattgcccagaacttggccagacgaagttgaaggggcaaaatacaggctatgcacagtcagctaaacattttgtaactacagaaggtaacataccagaggacaaataatggtgtctgccgtaatagataactgtgtgttctgaagattctgtattttgatgccttatttaaggaaaataaaggttggccaggtgcggtggctcacacctgtaatcccagcactttgggaggccaaagcaggcaaattgcttgaccccaggagctgaagaccagactgtgcaacatggtgagaccccatctctacaaaaaaaaaagtgtaattagccaggcatggtggcacacacctgtagtcccagctgcttgggaggctgaggtgggaggaacacttgagcttgggtggttgaggctgcagtgagctatgatcacaccactgcactccagcctaggccacacagtaagaccctgcctcagacaaacaaaggcatgtggtgtgcagtatccttgaaacttagggtacagagattcctagagtgtgttgcatacacaggaagcccaaggagccctgatgcaagtgggccaaggaccatactttgagcaccactggtgtagtgaacacaggcaatggagacagacccagctctccctctagctctgttagctgtgtgatcatggtccagataactcaatttctccagccttccatttccgcatttgtgaagtggaggtaatactacttcatcaggacgtggtgaggattagctgagagacagcacgtggaggtctccattagggcccggcacagaataagcatatagtatatgcaggagggaggcctaaattgtgaacccacaggaattgctgcctctccctaatttccttcacgaaggctttaattctgcatttcagccagtcacatgcaaatgttaggctggttggcccaagatgcctatcagtgatacctgaaagtatcataacttgttgttgggtctgttacagattgctccagcggaagcaccagatgctaaagtgaggatggtgattatcactggaccaccagaggctcagttcaaggtatgtgctctagagtatgtgctatgtccacaggtaacaaatgcacaggtagtccataacctggcgtctcccttaaatatgtctaaatctcagaaagagtcaatggaaattcttatctaagagctgagtagaatcacactcaaaattatatttcgaaattaaccaaaagtctttaattttaagagttctgtactggttgctggatttacctgtctctcaaaggttaattttgcttaatggtttgtaatcctatgctaaggtgagaccttaaaatttacaaacctgccaggttaatatgccttggaaacttgttttcagatgttttccctcctgtccctgagattgcctagacttgaattaaaatgccccctttttccttacccttggattatctctgttagaccctgcccatagactctacaaatctctctaatccctgggatcttagagataggaatggcaggagctcttgtagcatttgttctggtatgaaccattgcacgtttagtgggatttgaggtctttggggctgcagtgtgcctttcaatgtctactgagagatggtagagctgagacttggcagccaggctgctagttcaaatcctagctctgccatttgccttgtatgacattgggcaagttacttaacctttttctgtaaaaccagggataagagcacctacatcctaaggtagtttaaggtttacacaatatatgaaatgtttagaaaagtgcctaacacatgggcagcacaaaattagcgtgctgggggtattcaacagactatggatgaatcagactaagaccatgccaaattcataaatatattccttttagtgtatgatttctcccacaaaatttagtatgggtgtcttgtcttagaacatttagtggctgtgtaagaagacaactatttaaccttaagctgtagttttttttttctcttttttttttttttttttttgagacagagtctcactctgtcgcccaggctggactgcagtggcgtgatctcagctcactgcaaactccacctcctgggttcaagcgattctcctgcctccgcctcccgagtagctgggattacaggcatgtgccgccacgcccagccaatttatttttagtagagatggggtttcaccatgttggccacacactcaaactcctgacctcaagtgatccgcccaccttagcctcccaaagtgctgggattacaggcatcagccactgtgctcctggccaagccttagtttttttagccttaaagtgtaacagtaactagtaacagtgcatacagttctctccccaccccacctctctcccttaaatcaaacaaaaaaaatcactttctttgacttctattttctctgggccattttttcactaaaaacccaaagctgctttcacttatgtgaagaatgggaaacgaaggaggtgctttgagatgtgggtggttaggtgaagaaagaaaatcatgtgaagaaatttattccttcacagcagccttgtgatccaggcagttcaaatcttaactcagaattgttgaaaactgcttcctatcccaaactctcagggtcacttttagtttgaaatcttaaaagataaatacaaacatgtctttccttggtgctgagcttttagtcttataagtagaattactgtcctgcaactcctatgatgtttgtatgataggaacttcaaagttctttccctgtattcactaataaaactcatgttttatagttaacttaaatgtaacacttaagccatagtagttaaattttatttatgtgattggtgacaatgctaaatgaatgttttactttagagatctaaggaatggtaaaccacctaccccgtatttttccttacaaattcaagagcttcagttttggaggatagtgtatatccctagtgtctttttgactgtcttaagtaatagtaatatctacgtcattggcctgaggcattaaggatcattggaatatagggtatcaagatgaattttgttttgtcggtagtgccctaaaatgagctcagctttctgaatcagtgaacgcgtgttgggtactattgttttttgtggtttaccctggcagcttgtcaaaccaactctcaggctcctttctgctttgctgtatgtaataggttgtttatatataataggttgtttatatagttgcatgcagtaggtgataggatgtattgactctaaatatcagaagtgtcttggccaggcgcggtggcccacgcttgctatcccagcactttgagaggcctaggtgggtagatcacttgagtccaggagttccagaccagcctggcctacatggcaaaactccatctctactaaaaatacaaaaattagccaggcatggtggtggatgcctgtaatcccagctacttaggaggctgaggcaggagagtcacttgaacccaggagacagaggttgcagtgtgctgagatcgcaccacagagaaagagactctgtctctaaaaaaaataaaataaaaaaataaaaaaaaataaaaggcagggcacagtgagtggctcatgcccataatcccaacactttgggaagccaaggtgggtggatcacctgaggtcaggagttcaagaccagcctggccaacatggtgaatccccgtctcaactaaaataacaacaaaaaattagctgggtgtggtggcgggcacctgtaatcccagctagtttgggaggctgaggcaggagaatggcttgaacccgggggtcggaggttgcagtaagccgaaaccatgccattgcacttcagcctgcatgacagggtgagactctgtctcaaaaaagaaaaaagtgtcttaccttgatgttgtagcctctttaaaatattcaaaggaaaaaccacctttctaagagtatgaaacacatttaaattgaaaacatttttctcagcaggtttctaactggcccatgtagatgtgagcttgacttttagtgagcttggcatagctgactctgcagttctgtctcttttgctcaaaaaaaatgtgaccaggtgtggtggcttgcactggtaataccaacactttgggaggccaaggcaggactcttgagcccaggagtttgtgatgagcgtggcaacatagcaagacccccatctctataaaaattagtggcgcagtggctcacacctgtaattctagcacttttggaaggctgaggtgggcacatcacttgaagtcaggagttcgagaccagcctgaccaacatggtgaaaccccatgcctactaaaaatgcaaaaataattagccaggtgtggtggctagtgcctgtagtcccagctactcaggaggctgaggcaggagaatcacttgaacctgggaggcgggggttgcagtgacccaagatcgtgccactgcactccagcctgggcaacaaagtaagactccgtctcaaaaaaaaaaaaaaaataagtcaggtgtggtgttgcatgcctgtagtctgctactcaggaggctgaggtaggaggatcgcttgagcccaggaggttgaagctgcagtgagctatgattgtaccattgcactccagcctggacaacaggaggaccctgactccaacaaaaaggaaagaaaaatgcaactgatgtctcatggccagcatgagaagttttacctatcacaattttagtacgaatggccatttgcccacaaaaattcgtttttattaggttattaattgcctttaactgttttcatcagaagaatatggtttatccttctttcaccaagcattcagttgcctctactgtgatgggcagtagttattgtcaaccttttaggacttctaactgctctcttctatgttattttcaacaatctatgaaatgtagatgtatcactgcaaagggctatcccacttggatttgggccatctttcaagttaactgaccttttccatttcatacatgaatgacactaataggatgtgttttcatctgcaggctcagggaagaatttatggaaaaattaaagaagaaaactttgttagtcctaaagaagaggtgaaacttgaagctcatatcagagtgccatcctttgctgctggcagagttattggaaaaggaggcaaaacggcaagtacttcagcaaaacctgtgcagtggtatgaaagggaaagcgttgaaaggtacttaggagttccaagtccccgaattttggctaatttataaaaagcaggaccatcttgaccaaggtttggagaagattgccttttgtttcctgtctgagtgttggtgccagctattagtgaaagtaatgcatctctttcagatcactttgtgtgagaggattgtcctatatttataaagggcatttaacgttctcctgataaaactttagctttttatggaacagacacttaacaggaattttaaaaatttcatctacagcttgttacatctgtaatggaaaaaaagcaaactgtttctagtctctaatacatataacttgtaagtgggtttcaaagctatttataattttgaagtgattgagtacatacactttggaatcagactcaggatttgaatctggttttgccattcacttgtataactggacaaatcagtttctttggatgagccttaatcatcttgaagtggggataattctaataacctcatggaattaccactggattaaatgaaatttgtaaagccatacatagctcactgtctggcgcacagtaagtgcttaggaagtaaggttttaaaactgccacttaatgtgatttatatttatctctttcaggtgaatgaacttcagaatttgtcaagtgcagaagttgttgtccctcgtgaccagacacctgatgagaatgaccaagtggttgtcaaaataactggtcacttctatgcttgccaggcaagtgggctctaaaataagctattgtatctttctcacgtggaagcaattctcccacaggtgctcctacctgatagaattagttaaggttgtttgatgcttaagacttttcatctcccttttagcgggtgatttcagagactactagcaaactgactagtatgtatctttaatcatcaaatggatttctatttgaaattgttgaaatgaaggagtacaataacttttagtagcttttgatcaagtggaatttcaaagctctgtccttttctaggttgcccagagaaaaattcaggaaattctgactcaggtaaagcagcaccaacaacagaaggctctgcaaagtggaccacctcagtcaagacggaagtaaaggctcaggaaacagcccaccacagaggcagatgccaaaccaaagacagattgcttaaccaacagatgggcgctgaccccctatccagaatcacatgcacaagtttttacctagccagttgtttctgaggaccaggcaacttttgaactcctgtctctgtgagaatgtatactttatgctctctgaaatgtatgacacccagctttaaaacaaacaaacaaacaaacaaaaaaagggtgggggagggagggaaagagaagagctctgcacttccctttgttgtagtctcacagtataacagatattctaattcttcttaatattcccccataatgccagaaattggcttaatgatgctttcactaaattcatcaaatagattgctcctaaatccaattgttaaaattggatcagaataattatcacaggaacttaaatgttaagccattagcatagaaaaactgttctcagttttatttttacctaacactaacatgagtaacctaagggaagtgctgaatggtgttggcaggggtattaaacgtgcatttttactcaactacctcaggtattcagtaatacaatgaaaagcaaaattgttccttttttttgaaaattttatatactttataatgatagaagtccaaccgttttttaaaaaataaatttaaaatttaacagcaatcagctaacaggcaaattaagatttttacttctggctggtgacagtaaagctggaaaattaatttcagggttttttgaggcttttgacacagttattagttaaatcaaatgttcaaaaatacggagcagtgcctagtatctggagagcagcactaccatttattctttcatttatagttgggaaagtttttgacggtactaacaaagtggtcgcaggagattttggaacggctggtttaaatggcttcaggagacttcagttttttgtttagctacatgattgaatgcataataaatgctttgtgcttctgactatcaatacctaaagaaagtgcatcagtgaagagatgcaagactttcaactgactggcaaaaagcaagctttagcttgtcttataggatgcttagtttgccactacacttcagaccaatgggacagtcatagatggtgtgacagtgtttaaacgcaacaaaaggctacatttccatggggccagcactgtcatgagcctcactaagctattttgaagatttttaagcactgataaattaaaaaaaaaaaattagactccaccttaagtagtaaagtataacaggatttctgtatactgtgcaatcagttctttgaaaaaaaagtcaaaagatagagaatacaagaaaagtttttgggatataatttgaatgactgtgaaaacatatgacctttgataacgaactcatttgctcactccttgacagcaaagcccagtacgtacaattgtgttgggtgtgggtggtctccaaggccacgctgctctctgaattgattttttgagttttgtttgtaagatgatcacagtcatgttacactgatctaaaggacatatatataaccctttaaaaaaaaaatcactgcctcattcttatttcaagatgaatttctatacagactagatgtttttctgaagatcaattagacattttgaaaatgatttaaagtgttttccttaatgttctctgaaaacaagtttcttttgtagttttaaccaaaaaagtgccctttttgtcactggattctcctagcattcatgatttttttttcatacaatgaattaaaattgctaaaatcatggactggctttctggttggatttcaggtaagatgtgtttaaggccagagcttttctcagtatttgatttttttccccaatatttgattttttaaaaatatacacataggtgctgcatttatatctgctggtttaaattctgtcatatttcacttctagccttttagtatggcaaatcatattttacttttacttaagcatttgtaatttggagtatctggtactagctaagaaataattctataattgagttttgtactcaccatatatggatcattcctcatgtataatgtgccccaaatgcagcttcattttccagataccttgacgcagaataaattttttcatcatttaggtgca

SEQ ID NO: 434 - DNA, 41196 bp, Homo sapiens
cacttaaggagctcgggccagcgcgagggggagcagggaggaagcccggctgctgcggacctcctcggacccggacccagccccagcccggccccagccagccccgacggcgccatgcggggtccgagcggggctctgtggctgctcctggctctgcgcaccggtgaggccccgctgtgagagccaaaggcgggcgggggtcccggggcgccgcggcccggctgagcaggtcccggggctggaaatgtgcctgagcctgcggctccggggcagtgagacgggggaggcaggggctcggggtcgagtgaggacggcggagggaactagcactgaagcgcagacggggaagtctggaaggcttcttggaggaggcggcctcgaacacccgaggcttccgacgctccaaggagaagcgcgggctgaggcgtggtggggaggcctcggggtgtggagaggagctcccggagggcggcccctcccgacgggcgcaggaactcaggaagactttgggggctcggagcagctctttctcccgagcccccgcgggagaagattcagagggactgaccggcaggcgcgggagtccgcccgggggtttctggcacatgcagggatggaggtggagacggaggccgggtcccctcgcgtcggcgccccggggagtcagggcccgggatggtgggacgggaggcgggacctcggggagcggctcgcggggatcgcgggcggcgaccgccgaggggatggagttcgtggcaccgctgtggccgcaggcgacgcactcatcaatgcaaacgatgaagccaccgccacccccgccccgtctgaactttgcagtttcccgcctgggtggtggggggcttggagcgctgcggaggggagggcagttcgacttcccaggcctccgccaggagtggggaggggagggctgtggcggaagcttcagtctcggcccttgggctggtggggctgccacgggagggtgacctggtttcgggcggagtcatgcgtttccctccctcctgcacaggcctctggcagtgctggctggggcagggtgaatggcagaggagctcaggcctgaaagtcatcggccccaaggggctccagcaccccttcctctgggcccctagcctgggagctctcggggactctgacccggtcagatcctgaggcataagcagaagtccactgaggatgtgggtgtctcaggctctctacaagggggtttactttcaacacagaaggtggggtttttatctgctctctcagaagatgaagcaggctcagagaggcttgaacctaccctgatgggtcctcagcctcccctctgtgcctgccgtcttcccttggcagggcctggcactgtgcccaccgagggtggctttgcagccagcatcatcgcagacactccccgaggggacagggctcctggagggcagcccacccacagccccctcacctcactctcccgtcccagttcatgaggaaggcccagggacactgctgggtgagggaacctacacgagcaccctcttcgggaggcctggagaggggaagaagcttccacttccagggcctgccgagactccctagccagtgctcccaccaggtgggggtagctgagaagcgacctgtagaccctcccattcctccataaagggccgggttctgagccattccatttgccagcagccgtgctcctggtcagagaggccctgagcacaggaataccagcccttcccctgtctctgcgcctagtgcctccctgtgggagggcagggctgccctagaggactggctgtccaggcgaatgggctcacacagaactgctggagccaccctccatggtgggccggggctgggcagggcgggggagccgggcctcacggtcccctgcccgcagtgctcggtggcatggaggtgcggtggtgcgccacctcggacccagagcagcacaagtgcggcaacatgagcgaggccttccgggaagcgggcatccagccctccctcctctgcgtccggggcacctccgccgaccactgcgtccagctcatcgcggtgagtcctctcccttccaccctgccagacaagagggctgtgactcaggagggagcacacaacagccccattcaccaggaaaggagccgacctcgccctgccaggcccggccgataggatctcccgagtctccctggccacgaggccagcttgcctcccgccgggcccaggccaggaggtgggagcctcaggaggacccgctgctcagagggcgccagcaaagaaaggcacctgagaggcttcccttccacaaggcccctgccaagggggcccagatggtggcggcccctcagtggccgcaggcggttacttgctcatcttgccatggggctctccagaatggggcttgtgtggtttctggggaaggaggagcaggggctggactcccaggtgggtgagcatggggtaggagagcaggtctgctgagaactgctaaatgacactgacaatcctccgaggcaccaccagagagtggcgtccctcctgggtgggtgcaaagaaagctggcttttcattccagctctgccccccatatgcccccaagacctaatccaatcacaggcccacactggggccaaggctgtgggtcaggctccatgtgagggcagaaaccccaagcacagaccaccttagagaaaaaaagctagaaaacctagggtagcagtagaggcgcagggtggagggacagaaagcgagggagactcacttgtcactgcgcaccgttttctgctatctgatttttttactatgatatctgagtcctgcaaaatcaatgattagtattttttttttaacattattaggaaaacaaggtgaatccctggcctgggaaagggggagagccctgggctctggttgggctcctgggacagatgagaaggacagcacagccctctggggcttggggtggggccccaggccatctggtaggtgtcccgagttctttgctgagcaggccagctgggccaggcttggctgagccacatttccttgcaggcccaggaggctgacgccatcactctggatggaggagccatctatgaggcgggaaaggagcacggcctgaagccggtggtgggcgaagtgtacgatcaaggtaagagggtgcagtgggaggagagaggacagcctgcgctggaagtcagctctccaggctgcccttgctgggcctggcctgagctggccatcagccctgtccacagagcagtcctggagtcccagccagaagaacgccctaaggctctctcaaattccccagggacaggagctccagggacacagagagctgccccaagtctgctcttgcccgcagggagcccagcagccccctagcctgtgcccactcagctcttactgcgggctgtcccgggcctggcgtggtgccgggcacggtgctgtgtgcgtaactgccttgggtgagcaaggcgtccttaatgccgagccacctgcactctcagggcctcccttcagaagcccggctccgggtagggaggtgctgtctggcagcggcacagctcagcagacccagcccttccccttcccatgacttctgtgaccttggccaacctccacttcccagactgtataatggggatagtaacacctgcgctgtcacccagactaaatgagccaggccgtgtgcccacctgacatgtggtatgtgctggaaagtgtgagttcctttgcccagtccccgcatcacacatgggacctgcctccagctcagccagctcctgtgtctcccccgccacctctgcttggccggtgcctggcctccatcacagtccagcgcaactgtcacctcctccaaggtgctccctgagcccctccctctctggagcagggcctctcttgcccgcacccacatggcctctgcaagcctctgcctgctcagtctcgttagtcctcagaggagggtccagtcttcccctgtgtctaccctctggaactccacacagcatctcgcttggagaaagcactggctggttccttgttgaattaatggccatcaaatgacacacggcacagtccaaccctgcacacccatcagccagaaacagctctgcctccgaggccccacgcacctcttcctctttaattaactcgacacctctactgagcacctgctacccgctggtcataagcatgcagcagtaaacgaagagaccttcctgcccccacagagcagagagtaaataaacacacccaaaacaatacagtgacacatgttggggtgctgtgaggaaaagggaagggcaggacagagaaaacgagggttgcggggaaatccactgaaatagagcaggcaggacggtgctctgcagaggtgatgggtaagctgagccccgcaaccatctcaggcggtccagaggattggtaagaaacaaggcgggtgagtcagaggatggtaccagacggagctactcaggttggcgggggccagaccctggtgtgcaagaagtaacactggctttatgttctagaactcaacttcattctgatatggcctcccacaccaccgggcagtttgtgcacgcgtgcatgcctgcgtgtgtgcgcccgtgcgatgggagaccctctgggcatcagttcccacagctgagtctgtgttttgcctgagcagccccttggagccaccttggcacaggggaacgctttgcaaggctgcagagccctggccccaccacacacaccctgcagcattcagggtcgtgagcgacttggggccacatcgctagttctctctgtctctgcctctgtctcactctccttcaaccccctcagcaccaggaaatcgccgctcctcatctggggaagcccctcctcggctcccctgctcctcccagacacccttcttcccatgaccctgacaccattcccccaaaccctccaagttctcctaggggcctaggctcttggaaagcaaggacttgctggcttctgctttctgtccagctaaataactcccctgatgtgagcaaatgtggacccagctaagcaccagctgctggggaaggaagagggggaaatcaatgaatacatcaatatctcaggatcgtctctacctcaagaggctagagggcagggcctcttaatacatgcagatgaagcccacttgctctcttggtaacgagaacgctatgcacacatccgtgtgtacagccgtgctccgtgcacacacctctcccacagcccgcccaggcagggtgctggtgcagcctctctcgaggcctctccctgctgccctcacccactcccctcccctcctagaggtcggtacctcctattacgccgtggctgtggtcaggaggagctcccatgtgaccattgacaccctgaaaggcgtgaagtcctgccacacgggcatcaatcgcacagtgggctggaacgtgcccgtgggctacctggtggagagcggccgcctctcggtgatgggctgcgatgtactcaaaggtgagggctttgggctgggcaggagggtccccaggcctccccctcctttccttggcccatgctcgtcccttcactgggtagcctccctccggcctcgccaccattcttcattcctggaaggcgcagcagcccccgcccgccccgtgcctcccccgcctccactctgccgccggcgccgccgcttgacttcctgcttgcttggaccctgtggggcgcgattcttgctcacgcatcgtggtgtcccacatggcacagccaggcacaggcccagcccatgagtgggaagcagtgaatctcccaggagtgcttcccaccagtatagaccgggcgcaggtcactgtgtctagaaatgtgtcctcggctttacaggaccagaaatgctattttttcaggacccaaacgaggtgccgacttgcacccagaaagctcccaagtggctcatcagcccaaccagccgtgtaaacccgcgagagcctggaagcctcaccctctcagctggtggccaggtgtgagtggctcaccaggcacttggcatatttattaaatatctactcctctgggaggtcacaaaaaaaaaaccaggaagagggcttactctggaaaagctcagtctggctggcgatgagcgtggcccgactggctcaggtgccagcagcagggcctcctcgcgcggcacaggataaatacttgtgggttttggtgctggcagggccggaagaaccatgcagggcggcagaccctgacctcgtcccccgtgaggctggccgccgggcgtgtgcctccctccctgtgccgtgagaagggttgtctacccatcagtgatcttcaataattctttatttcccctctgtcatcagtcacagttggctgagctggaaatgaaacccacagtgagaagagcatctggctgatactgagttatcccacgtggtcatttaggaggaaatgtttagttcccccgaaccatttttaaatgacagtcgctcccagtgctgtctgctgccttggtggacccggtttgggggtcactgatcgggtccactccccagctttgctcagactgaagctggaaggtggaaccattctcagcagagtccagatgagagcccgggccccctgctgaccctgggggcttggcttggctctgaagaaagttctgctgagtgacctctctacctccttcccacagctgtcagcgactattttgggggcagctgcgtcccgggggcaggagagaccagttactctgagtccctctgtcgcctctgcaggggtgacagctctggggaaggggtgtgtgacaagagccccctggagagatactacgactacagcggggccttccggtgagcggagtgggggcagggaggggccgagggcagggaggagctgaggccacaaatgctggggaaaaacacctttgcccagagagggccgtggagggggaagtggcatgttggctgcgtctcatcaaagcaccctttatatagttctgtgccctggttagtttaaaaacatccagctggaatatgccaaaccggatttgctcatgaaatcaacgtgtttggtatatttagtgaggtgagggctccaagagaagaaaatggaaaaaacagccttttggccactcccatgtccccattctcagaccagcagggagcggggtcaggggagtgtgtctggacacctggggccggcccgtctctgctgctggttgcggctggcaccttgggtaacccttccgtggatgcaggagactctaacagctcgtggtccaattccatctgcctgcagaggaggaaatgtgctcagcaggattggaaaggaagcttctcgggcccctctagctacctcacgtttccacctggagcagggaagcctgctggtgccccacactccagatgttatctgactggatgcggttttcggcttagagagaagaaacagtcctcagcacccctgagcgggacagccttgcccctccactccccgtgtccttggccatgcacacattctctctggctctcttggagcctcagagccctctcctgatgtcgcccgccccgatctgctctaatccctgtgcattttctgcccgtggggacccaagcagaccctttgcccaggaggtctgacctgcctccaacactgggcagtgacatcagcagatcgtgtaaaagtcaatggtcccttccactgaggattctgcggcatggcatgaaaaggccttctagtccaatcccctgcctcagggtagaatgctcttcaaaacaccctgaaaattagcccagcatggtggcacacacctgtcaccccagctactttggaggcagaggcaggatgatcacttgagcccaagaggtcaaagctgccatgagctatgattgcgccactgcactccagcctgggcgacacagtgagaccctatctctaaaaacaaaacaacgaaaacaaacacacagaaaaccgacgccctgagagtcaaggctgctgatattataatagcagctgccctgggagtgcctgctccctacaggcctgagctaagatggagagggtccatactggattataaggagcctctcatcctcagagcagccctgtgggagctactttcccacccccgctttacagatgataggggctaggaaggggccacaactcggcaaaggcacacagccgaccagccagggagctggaacccagaccacacaactggaaagcccatgcccatcatggccacccctacagcccaagccaggcctccagaggtggaagatgggcaggggcaggggctcagcccatccagacccacagcttctcctccgcaggtgcctggcggaaggggcaggggacgtggcttttgtgaagcacagcacggtactggagaacacggatggtgagtgggggaggggcacgggcccagaggagcagggagtcaggccaggccggcttggggcagggaccctagatggcagagttgggatcaaacgccctagtgcagtgctgctctgagtctctgggtgaccttggacaagtcccacagtctccgagcctcagcactcccagctgcaaaagagcagaggcaggtgtcaccagtggagtgcccactgcccacagggcaggagaagggggccagcgagcagctctgctctgctttgatttgaatatggcattgggttctggttccacctgaagatgagggtctgattttttaagcaatttgcaaacccctgcactggatctcacctaccagcccttcctggcatttttctcctcttgcctggagaatttgtccctcatccctgggaaggtttaagatatagtttggtgttgaggctgggcacggtggctcatgcctgtaatcccagcactttgggaggccgaggtgggcggatcacgaggtcaggagaagagaccatcctggccaacatggtgaaatcctatctctgctaaaatacaaaaaactagccgagcgtggtggtgggtgcctcaaatcccagctacttgggaggctgaggcaggggaattgcttgaacccaggaggcagagattgcagtgagccgagatcacaccactgcactccagcctggtgacagagcgagactctgtctaaaaaacaacaacaaaaaaaaaacccacaaagactggtgttatatattgagccatcatgtcatttaagttttttaattttgaaagaactgagctttggaaaacttacaagaataactcaaagagctcccttctattcttcacccaaattctaactgtttagcattttcccacattttattgtgtgtgtgtgtgtgtgtgcgtgtgtgttctgacccatttgagagtacatttgcctatgtcataccccttgaatactttggtatgtatctcctaagacaaggaggtgtgtacctagccacagtaatccaaatcaggacacgcaactttgatacaatcctgttatccagtctatagccgatattgcagattcactcaccgtcccaattctgtccttcatgcccatttcttgcagaccaggacctaaactcttaccacgcatggggtttagttgttagatctctttactttcctttatcttggaacagtttctcagtctttgtttttatgacattggcattttgaagcatcaggccggttattttatagaatgtccctcaatttagatttgcctgaagattgtttctttttttaaattgagatataatttacatgcagcaaaatttgttctttttgaaggatagttctatgagttttgccaaatacatgcagttgtataaccaccaccacaatcgagatcttgatggggcagacccttcagcccaggagttcctcaggcccctgctagttatctccccgcacctgccagcaagcagcaaacacaccgttctgtctgcagttttgcgtctcccaggacgtctgatgattgggttttttttttaaatcattgtcattctttgctgttattaaccattgccttttaaatcagaaagtccatcacgaaggcaaacatggaccagatctgaggaggaagaaggcgagtgccctgcacacgaggaagcacgtaggacgatgcgctctagtgctgggcaagcctggaaatgggctcccgttcacaggccccaggacgagtctgacaaaggagaatttggaaaacgggcaaagagtagggatatgttgggttaagaatcagctctttcaaacttggggttttttttgagatgggggtctcaccatgttgcccaggctggtctcaaacccccagcctcaactgatcctcgcatctcagcctcctgagtagctgggatgacaggcgtgcacctggcagctttttcaaagtgttgatggtaatctgaggcaatctaagggagtcattttttaagtgactttatacagaaagattggtaagagccaaggggtagaagtggcataaatgtctaaagcagggaagtgacaggactttcattgttcttggctgaggagaagcgggagtggctgatggaagcacctaaatgatgcctttgtctgtgggaaggcaaatgatgccccagagctctaaccaaaggttttgcagccgccgaaaaacaggaaagttgggaagcgggggtaggactacactgaatcattaacagtgctgtaaactaccatgtggccattaacaatgacctttagggagttttcctaaacgatcactctggtgcgggtgtttggttttgttttaaaatagctttgcagtgaaagctttcatgaccatacaaattatcttttttcttcctatttccttgtagaggtttttttcctccttgtcttaaggtcataaaaatattgttatgtgggaccatctgtggtttaattatagtccttaatattcgtcttctcaatatccctgtttggtgttaatagttactcttgcaaattttcttttctatcgagaaacaaatgaacttatggaaagtttccaatactgtggaaaaatactctaccaaataggatgcaaaattgcctgtcaactatgtccttaaccaggttaaaagcggtcaaaaggaggctgggcacggtgcctcacgcctgtaatcccagcactttgggaggccgaggctggcagatcatgaggtcaggggttcaagaccggcctggccaacatggtgaaaccccatctctaggaaaaatacaaaaattagccaggcatcttggtgcacacctgtaatctgagctactcgggaggctgaggcagaagaataacttgaacctgggaggcggaggttgcagtgagccaagatcatgccactgcactccagcctgagcgacagagtaagactccatctcaaaaagagaaaaaaggccaggtgtggaggctcacgcctgtaatcccagcactttgggaggccgaggtgggtggatcacgaggtcaggagatcaagaccatcctggctaacacagtaaaaccccatctctaataaaaaaaaatacaaaaaattagccgggcgtggtggcgggcacctgtggtcccagctactcgggaggctgaggcaggagaatggcgtgaacccggaaggtggaggttgcagtgagccgagatcgtgccactgcactccagcctgggcgaaagggccagactccgtctcaaaaagaaaaagggggggtgaggtcaaaagacaggaaataaaatagaaaaaaggacttgaaagaaatccatcgcaatatgaatagttggagttatgggagatcccccgtcctctctagtcctggggtgggtagattccttcggggtttgtttccaccgtggcccctgctccgggagccctgccccctgccccctgctcagagccaaacgcagtgcctcatggcagccgcaagctcatcctagactcttggtacattcatctgtctcacccaaagcctttctttttttttgagacagagtttcgctctgtcgcccaggctggagtgcagtggcgtgatctcggctcactgcaagctccgcctcccaggttcacaccattctcctgcctcagcctccccagtagctgggattacaggcgcccgccaccacgcccagctaattttttgtatttttagtagagatggggtttcaccgtgttagccaggatggtcttgatctcctgacctcgtgatccgcccacctcggcctcccaaagtgctgggattacaggcgtgagccaccacgcccggccagcctttcttattttcttactttttttatcttgaatagttatttataagtattgtattactgtcagatacctccaattcactttagcaatagaaattggtgagagctagaaaatgagagtaacgagatagagtctgtgtaggtacctggagttgggtgcggccaccaagctctgccaccttctgaatgctgggttctcatgtccatgacacccagccacccctcagattccctctcctgggccttccccgccacccgccccaacccctttcggagctggctcagcccaggcttcctgcttcccagggaagacgcttccctcctggggccaggccctgctgtcacaggacttcgagctgctgtgccgggatggtagccgggccgatgtcaccgagtggaggcagtgccatctggcccgggtgcctgctcacgccgtggtggtccgggccgacacagatgggggcctcatcttccggctgctcaacgaaggccaggtgggctcagggtcccccaaccacctgcacagcttcctagatggtgccgggccttgtggtcgctcagcagggtgggaccaggaggggcaggacccagagactgtccttgggacggaccccagcatcgggccaggtcagagtgaggaaccgactatgctggctggccagaaggagggctggccaggagaggggggcccagaggagggggacccagggattcaggcaccctcagaagaagctcctgagacttgtgtctctgagagctaaaaccaaaacatatgagcaaataaaccaagtaacaaaaccagcgcctttcaaagcacaccattaattacatgtggcgaataaggtttggctaaaaccgccgcttgtgacagcaatagacttctgactgctggtgccccaggctcagttagttttgccctatccaggctgctaccaccagccccacggcgtgtcctcaggaccgtcccatgcctggccacagccatgtgtccaaacagctgagtgtgaggaggccaaatgaactcagagtagacccagaactgacagggcccaggggaaggaggccgcagatcaggggaggcgccgcagaagagggaggcctcacctggccctcagggtgggtgcctggtctgaggtcggggaagaaggaggtaggggccaaagtgggagggaaggatatggcctgtcagcaccctcaccaccctgtaccacaccccttgacacacagcgtctgttcagccacgagggcagcagcttccagatgttcagctctgaggcctatggccagaaggatctactcttcaaagactctacctcggagcttgtgcccatcgccacacagacctatgaggcgtggctgggccatgagtacctgcacgccatgaagggtctgctctgtgaccccaaccgtaagtccacctgtccccactgctgccagctccagcccagctcaacctcgggcatggcgaggctctctgggaaagtggccgggggaagacgctcaccagggaggcctctgcgggaacctgtcatttccattcctctgcccctggggctttggggaggaggcatctcttccactgtatggcctgttgtacctcggaagccccacctggccgcagcgggggaggatgcagaccatcagaatctgtcttgggaagggtctcctcgcccccccatccacggccatggcatcctgtcagctcttctacagcctctcgctcctactccccgcctctaccccatggctacagccctggcgcaggtgccatctttcgcctggactattgcagtagtctacaagtgagcttcttgcctttagccccctggccccatgtatcttccacctccagccagggaagtgggtaccacacactgagttacatgcacgccagccatggtcttcctcaggcctcacagttgccccttttctgtgtgaggaagtgggatccgatggttaaataacttatcccagccacacacctgacaggagaaaggcccagaatttcccttgggtccgactccatgctcttccatggcagtactggcctggcagtgaccgcttgcttgccccaccccagggctgcccccctacctgcgctggtgtgtgctctccactcccgagatccagaagtgtggagacatggccgtggccttccgccggcagcggctcaagccagagatccagtgcgtgtcagccaagtccccccaacactgcatggagcggatccaggtgggagtcacgcaggtgcagcgtgggccaggtgggcgggtggtggcagtgcctgggcagttcttactacccacaccccctgctgcctggggaagaggagagtgtctactgcaacaagcccacagagacgggtggggaggagcgaccgcaggggccagcacccaccccaggggacagagacaggcggggaggagcgaccgcaggggccagcacccaccccaggggacaggcagataggggtgagtcccctggagagcctgggagctcctcactaagtgggggtgccaggagcagaagaagcgctggcccagctgggcactgacgccctgtagcctggggcaagccccttcccctttctgaatctcagccttcccttgtgcaatagagagtgggcgtggatcattgttcgactttttttttcttttttcctgatttttctaaatagacaaataataattgtgcatattcatgagatacatactgatgttttgatacatagaatacatggtgatcagagcaggataataattaacataccatcatctcaaacattgctcatttctccgtgtggagaacatgcaatatcgtcctacctgtttgaaactatgtattattgttaactctagtcatcctacagtctatagaacactggagcttattcctcctatctctcctggctgggtgcattggctcacacctataatcccagcactttgggaggccaaggtgggtggatcacttgaggttaggagttcaagaccagcctggccaacatggtgaaactctgtttctactaaaagtacaaaaaaattagccgagcatggtggcacacagttgtaatcccaactacttgggaggctgaggcaggagaatcgcttggacccgggaggtggaggttgcagggagccgagatcacaccattgcactccagcctgggcgacaagagagagactgtctcaaaaaaaaaaaaaaaaaaaaaaactctccctattcctcccttcccctacccttcccagtctgcagcatcctctgttctactttttacttctgtgagatcaactttttttagcttccacatatgagtggaacatatggtgtttaacttgctgtgcctggcttatttcacataacacggtgtcccccagttccgtccgtgttgctgccagtgacaggatttcattcttttttatggctaaatagtattccacggtgcatgccaatgacattttctctatccatcctctgttgttggacacctgggttgattccacatcctggctattgtggccagtgctgcgataaacatggggtgcgggcatcccttccacaggctgattgcctttcctttggacagattcccagtggtgggattactggaccatatggtattcaatagttcgatttgtagtttgtggagggacttccgtactgttttccatagcggctgtccgggtttacatccccagcaacggtgtgtaagagtttcctttattctgcatcctcactagcatttgttattttttatctttttgataacagccaccctaactggggtgagctgatacctcactgtggctttgatttgcatttccctgatgatcagtgatggctgctggcattttgtatgtcttcttttgagaaacgtctgttctgatcatttgcccgtttttaagttggatggttttctgctgttgagatgtttccgttgcatgtgtattctggatattaatcccctgttggatgagtagtttgcaaatattttctctcattccataggctgtcttcatttcactctgttcgttgttttctctgctgtgcagaaacttgtttgtttgatacaattccctttgcttattattgcttttgttgcctatgctttcgaggtcttttcataaaatcttttctcagaccaatgtcctgaagcgttttgcctatattctcttcagcaattttattgtcttgggccctgcatttaggcctctcatccattttgagttggtccctgtgctgggtgaggggtagtttagggccccgttcattctgcacttggacattcagcttcttcccagcagcgtccactgaagaagagatcactcttttcccaaagaggttcttgaaacctttgtcaaaaatcagctggctgtaaaactgcgggttaatttctgggttctctattctggatcattggtctatatgtccgtttctatgcctctatctttgttctttttgcttaggattgctttggctattcagggtcccttgtggttccatacaaagtttaggattgttctttctaattctgtaaagaatgtcattggaattttcatagggaagttcagcattgctgacagcaccgagcactcagaatacattttgcattgatcacaatctagtgaacggaaacttttctttcagatagaaatttaaaaatgtatgtcctttatatacagagatatgacacaaatggtacccactattttctaatgtattctattctaatcctttttttcctgacacttgtcatgacccactcgatttggcccccatgaataggctcaccatccgcagctagaaacactggcctgatctctagtgcctgttcagctctttcctggttctcttctctgcctggagactaacgccagatgcagagggggcccccgtggccctgcagtcagggaggactgctgtggtcacgggtgtccagcctcggcccagagccccggctgtcagcccttgggtgttcacactccccagtttttgttttcagagcaagtaggtggggcctgctcagggggtccccaagcacaggcccctcagcagtgccaactctgcccaggccagggaaccacatcgactggaaggccacaaagaggagaccgggcaagaatacagggtgaccaggcttacgacgatgaccatcgcgcaagctgacactccccgtatgccccacacagtgagggccattgtgtggatcatctcgtgtaaccctcacaacagccctggcggtggctgtgaccatcagccccacttctgggtctggaaccggggagagagaggctggggaagtaacttgcccaaagtcaccagccgggatgtgctgtatgagcctccccacaccgcgttgcctgagccaggccacagccctgtcttcacacttctggatctcaggagtggagaccaccccagcctcaggccaaggagtgcccaggcccgaggcgggggtgttccgggagcttccgcaggcccgatagaagcctgtccttgtgcagagctgagcgcgactgtgtgtgacggtgacagaggaacctccaccggaactgcggaaagggctcgttgggagggtctttatttcctaatgcctggcaggctgccctattgttccaagagccccagagcagggagaggtgcagggagggaggtttcagctccctctgagtgacagcctcctctcaatctgggctcacagagggccacggggctgccctggggcctgcaggaagaggagagacttcaggggctcctcagaaccccagcaaagggctcaaagaccctcagttctagcttctgaggttctcagagaggagtccagtgtggctgtaacacccattcctgccctgccagttacccagggaagggaccatcagccagaagcgccctgggctgtggtgcagggtctgtgtcctgcccgacagcacaataggaagggggaggtctgagtggtggaaaaagggccccgagctgtgcaccctcctggccccaaatatcaacgccgctgcctgttattaaccgccatcacttcatgcctcttcaggaatggcgtgggacaccttcctggggcacaggtgtccgcactctcccccactgtcacactgtcatccccttcccttgaggttaatcacactactatggctctgttaccagttagccccttggcggggtcctgggaccacctgtcaataggcttccgaatggacaagcggggtgggtgcaggtgacctggaggccccaggagggtcctgggaagaaggcactggaccctcccgcgcctccgcaggcagagctccatccctcagccctgaagcctcctccccaggccctgagactgccatcgtttcagatccggtcattcttccatctgtacacgcatttaacagacaggcattgcagcacacgctgtgctggcccttggccaggtgctggagaggcggtgcccggctgtctgggggctggcagggcacagggaggcccacgccaagcatgagggtagggatcgcgcttgctttgctcagagcagggacacaggggaccctgggtggccacgcgcaggagtgctgcgtgggtgtttctgccccttggtcctccaggcaccactcctggccaggcgtcttcacaaggagaggaagggacagactgccaggatggggtactccccacccacattccccaggggaaggaagcctgaggccacaaaccccaagagaccaggccctgccacctccacaggaccccgacatccagagccatcctgggcccaccccggcccagtggcttcttctattcccttcaggctgagcaggtcgacgctgtgaccctgagtggcgaggacatttacacggcggggaagacgtacggcctggttcccgcagccggggagcactatgcccgtgagtgcagggcctgccgcctggcctcagccgggaggtggggatatttttataaatataaaagagtgcccccctcagccattttcaaaagctccatgcctctctcctggggatagtggctgcctgtcaccaggcctgcccctcctgccccaggcctcagtttccccaactattcaacaaacgtctctaaggggctggcaaactttctgtgaaggactagaggataaatacatgaggctttgcagacgacagacagtctctctttcaataaccttttcaaaatataaaaaccattcttagcttacaacccaggccatacaagagcaggcctcgtagtttgccatcttggactactggggcctcctcagcctcttctggccctaagcagccatggaaagtggcccttcagagtccccctggcagctcatttgcaccttctcaggggcctgggctggggctttggcctctgtcctcttactggtgacctcagaggcctgggtcccttccacctgggtgtgagcaatctctgggctgtaggaaaatgcttctgcagcctcagctgcgcctccactttcctcctgggtagtgagaaaaataccacctgggtttaaggaaagaaagaagcccctgtggggaaggactgctggggccagaggaagacaaggctggaaagtggaggcaagaggctgcttctcacaggggacgcaggcaggggcccccgctgggcctgctcccagaacaccctggcctcaggcctgggtactctttggcctgcatagctcaggcaaagagacaggaaggagtgggtttgaaggaaggacccccccaggcacttgcccgggctctcagatgaggggcccctcacgtgagtccctctctccccagcggaagacagcagcaactcgtactacgtggtggccgtggtgagacgggacagctcccacgccttcaccttggatgagcttcggggcaagcgctcctgccacgccggtttcggcagccctgcaggctgggatgtccccgtgggtgcccttattcagagaggcttcatccggcccaaggactgtgacgtcctcacaggtacccccccctttttaggaacgcagactggggaagccttctctggggttagctagggacccgcagcctgttggggagaggaccttgttggaaggtggccaggcttctgcatatgtgcccaggtatctccataagctggggacagaaggacccaccatatgctatacatgaagcccctccagtgtgttagatcacacaatattcatggaaactggcaagacccttgggctgacaggccacacacctctgtcctggctgttaactcagaaaacatacaagcacttttttttctaaccactgacacaagcacacagagggcactagggttggcagctcccactcccagacagctggacacctgctctgattggaacaaaatagtgaggtagtgagatccctgtccctgagggagttcaagtgaaggctgggtgatgtttggtgatggagatgctgtatctagacaacctctgcattccccgcactgagatcctccaggagacactccactcagagctgaggggagcggagcagacaggtggccttgcagtgtaggatccggggggtgggcagacctgtgggggagcggcccgcccagctccctcccacactttccactgctggcccctcatcattgcccttccctccaccccagcagtgagcgagttcttcaatgccagctgcgtgcccgtgaacaaccccaagaactacccctcctcgctgtgtgcactgtgcgtgggggacgagcagggccgcaacaagtgtgtgggcaacagccaggagcggtattacggctaccgcggcgccttcaggtacccgggtggcctggcagtctggggctgtgtgcagaggctgggaccctcctgccgacgcctgccctgccctctgtgtggcaggtgcctggtggagaatgcgggtgacgttgccttcgtcaggcacacaaccgtctttgacaacacaaacggtaggtgggggcaagagcagggccaaaggtaggtcggggggactgttccccatcttcagcaccatccagacaccatgctgggctggggccaagcagcagctcagagaggctgagtctagaaggctgtgccccctgggaagctgggagccccaagggtcacagggtaagaacagacctcagaccacacatccaggggtgctggatacatgacggtttttactggcctggaattcaagtccctaatccaccgaaacggtagaaactcaatcccagtcaatctggaaagacccccttctgggagtattgatgtagtgccaaggtgtgaggtgggagtggcatgagcctctccacagggtcatgagttcaatcagtatctggtctgtgttcctgagcaggtcactgcctcatgcaaggaaatctctctgcagcccccaagccacaccgaggcagggcacgcccaacataccacacagggggttttcttcctggagtcaccttcctgggctccgcctgggacaaagagctcaggaacgctctgctccgggaccccagtacatacatggtcctatcagagcacacgctcccctgacttatatcacttccccttcttcttgttctccgtgaaggaatctgtgtccgttttgaagactagaggctgttttcctccaacaccaaaggcttgtactgtctgcataccctgcctacaccccaggctttgaaaccccaaatgctggaggcccagtcttctccactcgctcccaacatgtctcctcctatagacttagcccagaaaggcacaactgtggcccggtggggaggggactggacaatgggaagcaagacgtgcagggaaaaaaacgaaaacctcagttagtgtttcaaaacttggatcttgcctcctatgggggtcaccaaggcggtaggaccatttgccccagcagagctagggagggctccaggccctgaacccttcctgttgccacagcccagctcccccacccagcctcctaccaagaacacctgaaaccctcccccagggaggggctgtgtgctcctgcacgagcccagcgggcctgcctggtcccagatctgtgcatggtgtcgtctgggatggggtcaggggaggcgggcaggtgctggagaggccttgggaggttcacttgcagtgagtcacccgcctcccagggccactcctttcccttttatctttagctctcctcaaggcccacctggatttcctggaaatgggaggaggatggatactaagtgaatgcacagagacatgaaaatgtgattcctgagggcagcattttctcaggcagcccgagaccgcctgctttagaatcagtgggatgctggtttaacatgcagattcttgagcctgatctgagacctcctgaataagattctttgcaagcaagggcccttgaagctgccttctgcatccacaagtgatgctataccctgttccatttgagaacttcagcccttagggacaatcacccaccaccttcagggagccaccccacactcaggcttgaggatgtaacacatagatggggttctctgcctgggagtgattaacagcctcagtttcctcacctgtaaaatggggacaaaaacacctaccctgcgttactgttgtggggatcaagcaacgcgtgtaaagtacttgtcacatagtaggtactccctactccctgctaattaatggcagctcctgctaatggcatgaacacagctgggttctttcaccccggtaacacagcagagcacgtggagaatggagagggttggggagctggccagatgttgccacctccctgtggtgaaggccttggggtcccaggatagcagcttctctttacacttctctccactcccggaacgtccccacacacactgctttacccccctcaggccacaattccgagccctgggctgctgagctcaggtcagaggactatgaactgctgtgccccaacggggcccgagccgaggtgtcccagtttgcagcctgcaacctggcacagataccaccccacgccgtgatggtccggcccgacaccaacatcttcaccgtgtatggactgctggacaaggcccaggtgagccagggtggggctacctcattgaggggtgtgcagcagaggtaagctgagcccctgggaggcctcagtctacctggagcagacctctagagaaattgaggaagcccgggggaaattctgtgattttcacttacgcaaggacatccctccagaaactgtcccctctgcctcctgcatcgttgattttcccttctcagtcggaccattttcaccaacatgaaacatgctgtgacttctgccatccttaaagaacaaactaacctcttggtctcacatccatcctcttgcagctgtaatcctgctccctttttttcttttttttttgagacggagtcttactctgtcgccccaggctggagtgcagtggcactatctcggctcactgcaagctccgcctcccgggttcacgccattctcccacctcagcctcctgagtagctgggactacaggcacccgccaccatgcctggctaattttttctattttttagtagagaaggggtttcaccgtgttagccaggatggtctcgatctcctgacctcgtgatccgcccacctcggcctcccaaagtgctgggattacaggcatgagccactgtgcccggccaatcctgctccctttcgaagcaaaactcctccaaagagtggtctgctctggagttaacaagtcctctcctctggcctctcttaaggatggagactgagttagcaagtcctctcctctggcccctcttaaggatggagactaccccagacaggctcccaccagggccctgaagctgttcttgtcaaggtcacagtgacccatgttgctaaacccagtggccatttctcagtcttcattttacttgacctctcagtggcactggccacagctctccctcctcctggaaacaccttcccctgcagatgcccaggtcctcagccctgcctggctgtcctctcactctctggccactcctcagtcttctctgctgatttcctccccatctccctgacctgttagccctaggattcagttctcagccctcttccctgtctacagcttacccttgatctcatccaatcccatgtcatcaaataccatctatatacagatggcttctaaatttacatcttcagacatcagtcccaaacttgcatatttaactacatacttgacattttgacttgtgtttctaacagtcatctcaaatggatcaagtccaaagttggacccccgtccctccttcagtcttccccacttcaattaagagcaactttagcttttccatttcctcgggagtcatttttgactccggtcttcctctcgtgctctacagccaatctatcagcagatcccattggttgtgctttcaaaatatacctagaatttaaacccaggttgtctcacaatggagccactggtttctaaccactccccctcccccgacttatgctgaaattgccttctccacacccaccagcaccacagaactgcagagctggctggctcgccaggcctgttcctaaactttgacattgtgaactgacgcatgttccttcctgtcatcttccccacagaacccctctatcccaggagtgctttactctgggtccctgggcttccctagggggttgctaagtcctctgaagtaatgtgggagaagaatcctgggtggatgtgcatttttctggggagaaggctgacagctttcatcagatcttcaggaggatctgcgagtccctccaaaaagactgagagccacctgactccttcgttcctccttgatcagtacttaacactttacatagacattcatgcatgttctccagatgtcctttatttatattcgtattcataagttctcatactacttctggtctttttagtagctcttttagggctgtagccacagaacggtcattctagtgattctgagcagggtggagaggagtgcagcatccctgggcgggtgggtcagtgaagacacgcccagctcacctgatattctgtgactggttgcagaacacaagtccctctcgaaattgtttaggtttgtggggagatatctgtaagacagagtgagaaagccttatggaaaaggccaagaagtgctcagcaggcctagcagaacgctcaggaatcccacccacaccatccctcatttctgggtctttcttcctggacatctcaggcctcagacctgcatccaggagctggagcaccgcagtgcttctgaacgcctcttccagtggcacctgcgggcctagtgtccccacacccgcttgggtgacagaggccaatcagttgtcaagcttatgacttccaatcagagtggtggggccctgaaatgacttgctctttgggtcactgtatgtaaagcaatttgcagctagcggcactgggcgggtgaccctgcctgagcccagtgaggagcaggtcgtctgcctgcggtgcttccaggacctgtttggagacgaccacaataagaacgggttcaaaatgttcgactcctccaactatcatggccaagacctgcttttcaaggatgccaccgtccgggcggtgcctgtcggagagaaaaccacctaccgcggctggctggggctggactacgtggcggcgctggaagggatgtcgtctcagcagtgctcgggcgcaggtaggacaggcccgccctgccgcctcccctggtgctattcagaccccttcaccccagaaccctgagggagcggggggcgctgcgggtccggggaggcgggtggaggcccgttcgcagcagtccaggtggggtgtcccgggaggattttggccaggaggctgcgggccgggagggcgggagcccggcgggtctcccagacggacctgggtaatgagtgtgaacgctcaaaacggcggcgcggggaggatctggggccacggcagagacatgcgtgtgctgcctttctggaaagagcgcatctggaagggcagcaggggaaaggagcacaaagagggaggctgcggcgagttcggtcccgaaagatgcccccacccccaccccagagcgggcgcctgaggcggccaccgcggcccgggcttcggggcctgacccgccgcgttcgtccccagcggccccggcgcccggggcgcccctgctcccgctgctgctgcccgccctcgccgcccgcctgctcccgcccgccctctgagcccggccgccccgccccagagctccgatgcccgcccggggagtttccgcggcggcttcgcgctggaatccagaaggaagctcgcgaaggccgggcccggcgtgggcgggagcaggcgcctccccgggagccccgccgcccacgggcgccacctggcgctgctacctgaggcgccgcccccgggcccgcgcggcccttcccgccaaccgccgcctcccgccacctggagccgcgcgggccgcgccggaggaggccggttgcccaggaaaccgctgagtccgggcttcccgccgcccgccccgcggtgtcgcccgaggggcccgcccgcctcctccccgcagccccgcgcccccgtccgcgaggccccctggggacgcggtggccgccgaggcgcctacacccgcaggccgcggccaggccgtcccaggaggccccggcgccaacgggacccggcgcgtgggacagcggcctctgctggcggcggcgggagggaggccggaccggggcgacggggagaagccttcgcccgcgggaccgtgtccggggtgggggctccagttcctccgaccgcccgtgcgctgggagggaggccgagcccggggaacgccgcgtgccctgcctcgtcccccactgtggccgcgccagctccatcccgggccagccgcgtccacgggccccctcccgagtctcctcaggctctcgcctcccctacccccgtgggatgcccaccgcccgcacccacgcccgagcctggcggcagcagccgccccccgcctgaagggagccggaggtgacccaggccgcgggctcccgaggcccctgaagggctgcgcgtggggacccgccatgcttctgggttccgaacgggggtgagctccgtctcctcacccggccccgcacccgctgggcctggggacccctcactccccgtgcccgcccctccgcgaggcagcagaaagcgcccggccggggcctctctctactccatcttgccacagttgtctgagaagccagaaaaagtttccagaactggcagcccttaaaaaaaatgaagaggaagagaagaaatgggagcaggcagccctcgtcagcagaccgggagccgcgtgggcgcggagccatttgcattccggtctgcgggggctcggggatgctggtgacaggcccggttcccggtggctcgcccccacctgcgggcgtcgggaaggatcccttccatctctcagccgcagaggaggccctggcagcgccccggctgtagccatgcaaccccgaggagtcccgggcaccttcaccccaccgggaggggccacaaggacctgggcctcggccaccaagctttgtcccctctcgctgtggggggctagtgattctcctccgacctgacgattgcttggttttttcaaaagggagttttgtgcggtgagaagtgtgtttctgtgtggctaactctgggctagcgtgccgtggccattgaaggtgtggcctgcgtgggtgcagtgtaagtgacgctggattgtcaggtggcagcaggggacccctgctgtgtcagtgctaatgaaacatgttggttggtttctaaaataaagccaaacaagccagcacatgcagaggcttggaccctgatagaaacttctgctgccgatttctttcgttttgttaggcactcaaaggcctacctgctccaccgagaagggcagattccattctccaagagccagtcagggaccactctcatcctctagtcagtgaggccccccgcgcccttcttcgacctggactggttctctggctcttgcagggcctccgctgccctggcacattccagctgcctccaccccatcaggctctggggtgtctgcccttctgtggatgggtgcagagaagggtgcaaacttctctgctgccccctgccccacacctccaaaataagcggcccacatcttttctctggcaagctcgctgctaactcactggaggggggcgtggggagcggatctcccagagaccctacagtgggtgctctgtggtatctactgaggtgggggtgggcccggctggtcttcatcagtgctctgctctccctctggaaggggaggttttctctgcttccctctctcatggcttcacttggcccccacaccaccacccctcgccgctgtggccatctcccagagccaggtcttgcccaccactgcacacaggccattttccatgaagtcggctcagttatcacaaagccagtcaattcctggggacctggatggccagagttgaccgactttgtctctgcatcacatggacgagtctcagctgcacagtcactccagctcgcctcatgctaccacttccctaccctgaacttctggaaaggaaagttaacctttgggcaccctagcccctcatctgaaaaacacacagtacgatcaccagcttggtgaggtggttgtgaagatccagtctaagatgcaaaacactcagcacagtgcttggcacacggcatagagactaagacacaaaacactgcacagtgcttggcacacggcatagagtctaagacacaaaacactcagcacagtgcttggcacacggcatagagtctaagacacaaaacactcagcacagtgcttggcacacggcatagagtctaagacacaaaacactcagcacagtgcttggcacacggcatagagtctaagacacaaaacactcagcacagtgcttggcacatggcatagagtctaagacacaaaacactcagcacagtgcttggcacacggtgggtgcaggaaggatgttcactgtcactactgctattactccagagcctgttttcttgtcttcaatttggaattcctgggagagatcatctgattggcccagtgtgcgtcaggcatctaccactggaccagtcagcacaggccagaagcagggtgtatagcggacacatggccaccgaggccccagaaaaaggaaatgaaatccttgtgagtcaggcagccatgccccagcacccccatggctaccaggcctgttgtagggctattggccatttgttgagcaaatacttactgatacctacttgtcagtaccacccctagacctaggcaagagggattctagtcctcggttttgtgctttcaagcagtgcttttcagaccttgatgtgcacattaactgcctggggatcttgttaaaatgtagactctggttcagaagggccagcatgagactgagagtctgcagttcagaccagctcccaggtggtgcctgtgctggtggtccagggaccacactttgagaagcaagccttcagaggcctcccccagaccacaccccacaccccacccacagagggagcaatcacagggaaaagggatgcgttcactcaggggtcatcttttctttttttgaaacggagtcttgctctgttgcccaagctggagttcagtggcacaatcttagctcactgcaacctccgccttccgggttcaagtgattctcctgcctcagcctctcaagtagctggaaatacaagcgcccaccaccacacatggctactctttgtatttttcatagagatggggtttcaccatgttggccaggatggtctcgaactcctgacctcgtgatccgcccacctcggcctcccaaaggcctcccaaagggattacaggcatgagccaccgcacctggccccagagcccatttttcacaccatgttccagatacctgggatcctggactttatacctcaaacagccctgagccagcttccagggtctggagggccccttacctagatcctgcctcccaaggtggccaaagctctcgcaggaggtgtagttgagcgtgatgagcaggctgccgtgtcctctgcaatgcgcaaggccctcgaagcgtgggttgcagcctggatgggaagagagcgggtgggctatggcggggaagcctgttctgtccgcagctcctattctaggctgctgagtctttataaaggtttgtttgtcaaagtaggaggacaggacacattctctttaatagcttgttagcttgatttgtaacatttaatgtggagccacatggtaggcgggcctctgttggtactcttgtcctaggccccacaagtgcttggggtcggccagcctgctgtgtgcacagccctgtgctcagcgctctggaaggtacaaagaagtaagtacacggcctactagccctgccccccttggtctcatttggagaggccaccgaggtggtgtggtagaagaacactgctgtgcaggagggacagtgacaggatagacagggccttgtggcccacacggcacaagccgtcacccccagcttcagactcctccccaggtgttcttgactgtttacaatgaggatgtgttcctcaggacaacattcttgaaaaagattcacacaacatttacaataggtataaatgctacaattttttaaaaagatatattaattaggctgggtgtggtggctcaccgctgtcaacccagccctttgggaggctgaggtggaagaatcgcttgagcccaggaatttaagaccagtctgggcaacatagtgagaccccatctctacaaacaatttttaaaaaaattagcccagtgtggtggcccacacctgtacctccagctacttgggaggctgaggtgggaggatcacttgtgcctgggaggtggaggttccggtgagccgtgatggtgccactgcactccagaccagaccctgcctcaaaaaaaaagatattccaattttgtggaataaaaaccagctcactcacctaagattcaggaaacttgaattctcattccactttggtattcaccctgggccaatactttctcctctccccatctcagttcccaaatctataaactgagaagcgggtatggggcctcgacgatttctagctctaacagtaattcttagactaaaacacatctgagtcttcacggggttgttgcctgtgctgaagtgagaggggccgggtgggctctttttgtttctgcctttctcagctgcctctgcgttggtgctaacaagccagaagctgggtttcacagcggagagtcatatacgtcaaagcttctcgccttgagcgtatgtgaggatcacctgagggtttattaaaacatagactgcgaagctgggtgcaatggtgtatgcctgtagtcccagctacttggaggttgaggcaggaggattgcttgagcccaggagttgaggccagcctgggcaacatagtgagactcccatctctaaaaatgtatatattggccaggcatggtggttcacgcctgtaatcccagaactttgggaagctgagatgtgaggattgcttgaggccagtagttcaagaccagcctgggcaacataggcccaacctctacacacacacacacacacacacacagacacaaaagtgtttttaattagccaggcgtggtggtgtttgcctgtgatcccagctactcgggaggctgacaggggaggattggttgggcccaggagtttgagattgcagtgagctctgagctatgattgcaccattgcaccccagcctggcaggttctcaggtggtctgatgctgccggtcaagccacctcactttgaagaacactgttcagggcaatgtgagctcacaccccatgagcgcattaacaggtgcctgccccaaggtgtccagggcttgggtgggaagggtgagtggttccccctaaccagggaacttcatggaggaagttgggcccagcctggaagacaagccaggtctgtgtccgtggcccccgtgggctccatgtggaggggtggaatgtgcgggaaggtgcctcagcgcctggcccgggtctccgagcacgcaggctgtcggtagaatggcattctgacttcaccctttcccagcatgcggctcccccgtccctctggccctgcactccccaccctcacaattccgagcagggccctcgagaacaggagagaactcagagatcagcatgtgaaggtggtgcgtggtcggaataccccccttcctccttcctagcttctgatgtccctggaaacctccaactctacagaaaaaacaaatgttatctgctctactgaagtcagtctttgggtcgctggaggttgaagagaagggcctggtggtttaccgggcagggcatccttagccaagatccccatccaacaacttgtggcagactctgctgctggtcttctccccttcttcctgtctagcagactccagttttgttcgggtggcagcgtgcccaagtacaaatactcactcctgcgtgcccaggcaactcggttctggctgaagaaacctgagaagtttcagggcagctgtttaggaggaacaaacagctagcacagcccattgccccggagcccgtctccctcttcctgcccggaaagtggacaggatcgctggaaaatggagcaagaagcacaaggaaaaggaccgcatggtcaggacagcagagcaaagagacaaaagcgttcggctcaggtggcagcacccaggcctggaacagtctagactccctgacagctgattcctgtcttctcttgtttcagctggctgcattctgaattgatataagtggtaacagtggaaagagcccgagatgggcccttggggctcccaggctcttgtcttggctttgtgtggctcagggaaagtcacggccgctctgtgggccctgttccttcatctgtggggtgacccagaaggcctccagggtctccttaggcccttctgtagctcagattcaagaaccagagctggtcccagctgaaagttcccgagatgggcatgagtggagggtttcagggatggggcaggaagtcaccttgtgaacaggtgacacctggggttgggggtcttctcagtgttcagccaaaaggaacccttgaagcacaggatttgaggggtctgcaatattcagtccagttgttggaagcattttaacatcccaaaggggaattgtttctaagtatctctttgacttcgaccttcggattcacatttgtccctggaagaagccccaggggatctctgcagacccgttcccggccccacacgttttgtaagttaggtgggatggccggttggagctgcctcaagagagaagcctgaggcccttttaactggtggcaaccaggtcatgaggcaacctctgtgatgtgtgggccagcttaggcctgtgtcacgtggcagagccctggttctgggggcagagccatcccctccagagtacaaggtctgagactggggaagaggaaagagcagggtactgtcagtaaagaatgaaacaatagaaaatagatgcaggctgccccaaaccacaccatcctccaccctggcccagccacagccctatcctggtgtggattccttacagcacctgtcggttctgtgagctttctagggaggcgggagggagggggcctactgtctcagaggcagaatgcaccaaaagcacttttcaaaggccatctgtgggcagaggcactaactggagactgcaacagatgttttcatgatcgagctagtgtgagtcggctcagaacagtcaccctccacagaggcacctgtgagcctccgttaaagaggacgattggccacattccaccacgaagcctctgggattctgcctgctccctccttctcttcctgccctctttggaaggcctcctccagactccaagcccagcctgtgatggaatcaccgtagccccagtaaaccaatctgtgaccgtgggacacactgcaggggtggagaggaaagcttgcctttgaaaacagtaaaatacattcacctatgtctcttcccttggcaaaaaactgtgtgtgtgtgtgtgtgtgtgtgtatgtgcatgcacctgcatgtgtgtgtgcgtgtgtgtctgcatgtctgcgtgtctgcatatatgtgtctgtgtgctgtatgtgtgcgcgcatgtgtgtgtgcgcatgtctgtgtgtgtctgtgtctgcgtgtgtctctgtgtgtgtatgtgtgtctctgtgtctgtatgtgcgcgtgtgtgcatgtctgtgtgtgcatgtgtctgtgtgcgtgtctatgtgcgtgtgtgtctgtgtctgtgtgtctatgtgcatgtgtgtgcatgtgtgcatgtgcatgtgtgtgcatgtgtgcatgtgcatttgtgtgtgtgcatgtgcgtctgtgtacgtgtgtctgtgtgtgtctgtgcttgtgtgtgcacgtgtctgcgtgtttgcgcgtgtttgtgcatgtgtgtctgtgcatgtctctgtgcatgtgtgcgtgtgcgtgcgtgtgcgtgcgtgtctgtgtgcgtctgtgtgtctgtgtgtgcgtgtgcgtgtgtgtctgtgtgcgtgtctgtgtgcgtgtgtgtctgtgtgcgtgtgtgtctgtgtgcgtgtgcgtgtgtgtctgtgtgtgcgtgtgtctgtgtgtgcgtgcgcgtgtgtgtgtctgtgttaggggcaggggagttgcagtttcactgcaaggcatagttttaagaaagggaggctgactacaaatgtgtacacaatggtggatacatgtcgttatggatacatgaatccaaatccacggagggacaactgtgggccctgagtgacaacgctgtgtaaaggaagggctgtgaattgtgacacacgcaccactctgaaggatgtagtgagagctgtgcctgtgtaggggcgggaggtagatggaaaaatctctgtaccttctgcccaactggcctgctctttaaactgctcgtaaatataaagtaagtctgtgtttttttaaaaggcctcacccggccaatatataggccacagtctgataatggagaaactacccccatcgcctcccaaccccctttcttattatccacccctgaccaagtgcatgagaattgtcacccctatggtcatctggctgtgggtctctccccttccaactgtgagcttgacttcttcgatcccaccgtctcagttcctgtgctggggcctgcagagaagcagcggcactaggccaagccttccttcccaccgggatgccctcggcctcccagccgccttcggcccgagtttctttagcccacttgcctcctggaggaaaagccgagccccctgcagagctgcaggccgtcctcaggccccccagactccagcaggaagccgagcagactgtcatggggacgactagtcacgactttagatatggactcggggcaagagcccctctctgcctctcacacagaacttcccgaggagaaagctgtctcctcgtgtgtgtgattctgctgccctggccccttggggaggagccctggatttcctgaaaatgaggatctgccattgcaatgaggcagcacagtacccctgcttgctgtagggattgttcttgaagaccaacctgctgaaatggacctaagacagcagctggacaaatggccaagacagaggtgtcatcgtgcccgtgcctcagttttttgtaataagagacatactggaaacagcctaaatgcccagtattaggttgggtaaatgaaacacggttcataccttcattcccagtggaatgcaatggatgatggtctacagctgttaaatgaagggtgcagctacatttaccgatgtggaaagagttccacggcatattgttgagtaaaaagagcaggttatgaaacagtatataatcccattatcataaaatctcacatacaaactcacacgcacactcacacacacagagctgtctggaaatctgttcaccaaactgttaacggtgactagctccagttggtggaatttaaggggtaatttttactttctttaaactttattttagtttctttaactctttgttttgaattttaaagccttttaaatatctaatcaatatcattttggaatgaataaataagcaagcaaatacaaagtaaaagagctgggcacagtggctcacgcctataatcccagcactttgggaggccaaggcaggtggatcatctgaggtcaggagttcaagaccagcctggccaacatggcaaaaccctgtctctactaagaatacaaaaactagccgggtgcggtagcgggcacctataatcccagctactcaggaggctgaggcaggagaatcgcttgaacccgggaggcagaggttgcagtgagccgagattgcgccaccgcactccagcctgggcgacttagcaagactccatctcaaaaacaacaacaacaacaaaaagtaaaagtaaaacttccactgtcccaagcacagtcccaatgtcacctctcaactctgaacaacgcaggtggcctcaatgaggaggctgaggaggctgcggaaggagctgcagcttggggctactcagtcctggatgtggacgtgggggatgtggccctgtgaccagctgtgtggccttcaagctgtcgcttagcccttcagagcctccacgtcttccctgagtgcctgcctgtgggctggctgggaggggatgcagggaggcacccacagcccagaggctcctcagggctccacagcccacaaacgtgtgcctgagcaacgtcctctccagcttccccaactgctaatggtcctgagtgcacactcctgccaggctggggcagacgcaggaggaagaaagggaagtctaggagacaagggcatcctgaggaaagtagacgaaaatccaggcccagctgggtcagcgacaggtgccctagcatcagaacctgggagggctcgggggaggaaggggagggcctgagcccaggatgaaacaggccgcttcgggcagcgtgggccccagaagatctcctccagcctcctccatccactacccttcgcttattcacactgttggctccagggcgctcccatcccgcccaaacccctctccctagttctcgggcttgtgtaggatgctagagctggaagggaccgcggtgaatcagcttggccaatcagctcgcctcaccccctcacagttcaggaaaccaaagcgtttaggagacagggcttcctgctgatgaggacgcagccatcacagctccggacttgaacccagggtctggttcccggctgtggcgtaacaggacacagtgtgcgggaccagcctccatcagcacatccctcccaccagctccccacccgctctccgccgggcgagtgggaacagctgtgccacagccatgtgcctggtcctgcttgccagctggccggcaggggacgcagcaccaagatcccattttagagtctgttcctaggatccttcctggcaccaactgtcacaggttgggttcccaggaaaacactcgaggacggagatttgtgtgcaggcttctcagggagtgctctcacaaacagtgcctgccagggggtaagaagccacgggacgggcagagagaggagtgagtgccatgcagtagccaggaaggccccggctggtgaaccttccgagttatcttgccttgaggcaagagggcctggcctttctatccctacggcagccctcatggacacaggtttggagatgggggcgaccttgagcaaggtggttctcttcagctgagggcacctcccagagagaaacccagctgggccccaccaaaaccatcaacactcccggaagctgcaggaaccagagcctctgccctgaaggggcactggccagggccccacagcggccactacagagagggtggtgacctgccctgagatcaggtcgcccgtgaatggtggccctgaattcacttccagagcaccaaagcccacaccttaatcccagtaaacatatgaatatctgacacttagagggtgggcttatgtgcactaggccctgcctataaatctcattgtttaaccctcaaagcaacatcatgaagtatcagtattcaagacacagtttacagatgaagaaactgagtcttggagatgataggtgatatgtttggctgtgtccccacccaaatctcatcttgaattgtagttcccataatccccacaagtcatgggagggacccggtgggaggtgattgaatcatgagggcggttccccccgggctgctgttctcgtgatggtgagttctcctgagtctggtggttttataaggagctttccccccttttgctcagcacttctttcttctccttctgccatgactgtaagtttcctgaggcttccacagctctgcacaactgtgagtcaattaaacctattttctttataaattacccggtctcaagtatgtctttattagcaacatgagaacgggactaatacaacgggtaacttgcccaagatcactcggctaataagccagattgaagcccaggcaatccgataccagagccgctacatgatcaggccacactgatacactggaccttgcccggtagcttgtggataacatccatttcagggagagagtggtgaactttgaccttggcaggctggtggtctgcagactgatagtggctccaaggaggcagaagctgcctgggatctttccatccccgcagcctccctgccctagtccccgtgagctccagtgcccaggggggcgcagccgggccggagaagtcatccccctcagccctgctcacagcccatgtctgtagagcagcaggtgccgataccagccaggcagcctgggtttggccacacaatctctgcagagccctggtgccttggtttacagagctgtaaaacaagagattgtccctattatcatcaagctcgtggctccctcgggtctctctgagaggggtgctggtgaaaaatgatgatggcacacacagcaaaatgtgggtgctggctgtgtcctgcagggtcaccaggccctgcagaggttgacttggacagccagccaccccacattccttgggagaggcacctttcctcccacctgtgagaggctgtcctgagaaccaagatcttcattcctcaaaggtcttgaatgcgtgaaaaaggaggctgccctagggaaagagaccagaggtccccgggccatccttcagcccagcttttctctgtcacactccatgaagagtctgtatttgggaagggcctgtctcccctccaggctgccagcgagccccttaagggcagggatagagcctgcccctgcccagtacattcccagtgcccagcctcacctgccgcagagcaaacacagacagtgtttgctgaacgcatgaatgagatgagtcgttagttttgcctcctggaagttggactggtcccgggggagttccaggaatactgaggagcttggtcctccctggcaactcgtggtgtgcagagctgattttaaaaaggatcactgttggcatcggggctggccagtatctgtccctggtccggaggctgacccctgtcccagggggtgtgtgttggtttgccagggctgccgtaacaaggtgccacaacctgagtggcttacgcggcaagcgtatcgtctcacagtcccggaggccgggcgtctgacactaagatgtcagcagggctggttccttggcctgcagaagcaccacccacactcagcctctgtcttcacacggcactcttcgtgcgtctgtgcccaaattcccccctttcaggaggacatcagtcatactggattaaggcccatcctaatgacctcatcttaactaatgacatctcaaacaaccctattttcaaataatgtcccattttgaggcagtgggtgggggttagaacttcaacacaggaatttgggagggacaccactcaacccatagcagcttgtgattgttctgttggtcagggctgggcacagaacaccccgtaggctctctgcccccctcccccacaacccttgttccctaccctcaccagtgctaatatgaagatgatgaagatgatgtccaggtgacgtgccaacccagagagatcaaaccatcaggcagcactatcccagccccgaggcgtgccctgaccctctgcttaacttcccctggtgaagaggtgaaggagcaggtatagatgagtctcacccgcagctagacgggctcagagttctctctggtgctagttttggtacacgtgggagggagaagaagctggctttcccaataccaggctctgggcaccaggcttagtgccaccggggcgtgctcatgcccgaccccacctctctcactctactttctctcctcctttcctccctctccagctccagctgctgctggttcctagaacccagaccacccatcgggggctggaaaggaagccaaatggccccagcatttcccaggaatgttacattttgacaatcaattacccactttaggtgtgacctcctcttctccctcccagctccccgcaggggagctattagaattatccccattctacaggactgggaaatgaggctgtgagagtgaggaactgaggaacttgctgggatttgaacaaaggcaaagtcagccccaaagggtggtggtggcaagtctccaccaggccaggctgggaagcctgtgctgccacaggcctgactggactgcctgcctgcagtctccaggacattggaaccaaagtccaggtgcaattgcctttatcgcgtctgctgcagttctccacaatcatctcaaggacaccggccagttggcccccaggagcaggaggctggtcagcgtttgtcagagcagggctcatcactgataacaaaagtgctggccacgccagtgctggaggcaggct

SEQ ID NO: 435 - DNA, 7304 bp, Homo sapiens
cagcctgctcccctccaggcttgctcctcccccacccagctctcgtttccaatgcacgtacagcccgtacacaccgtgtgctgggacaccccacagtcagccgcatggctcccctgtgccccagcccctggctccctctgttgatcccggcccctgctccaggcctcactgtgcaactgctgctgtcactgctgcttctggtgcctgtccatccccagaggttgccccggatgcaggaggattcccccttgggaggaggctcttctggggaagatgacccactgggcgaggaggatctgcccagtgaagaggattcacccagagaggaggatccacccggagaggaggatctacctggagaggaggatctacctggagaggaggatctacctgaagttaagcctaaatcagaagaagagggctccctgaagttagaggatctacctactgttgaggctcctggagatcctcaagaaccccagaataatgcccacagggacaaagaaggtaagtggtcatcaatctccaaatccaggttccaggaggttcatgactcccctcccataccccagcctaggctctgttcactcagggaaggaggggagactgtactccccacagaagcccttccagaggtcccataccaatatccccatccccactctcggaggtagaaagggacagatgtggagagaaaataaaaagggtgcaaaaggagagaggtgagctggatgagatgggagagaagggggaggctggagaagagaaagggatgagaactgcagatgagagaaaaaatgtgcagacagaggaaaaaaataggtggagaaggagagtcagagagtttgaggggaagagaaaaggaaagcttgggaggtgaagtgggtaccagagacaagcaagaagagctggtagaagtcatctcatcttaggctacaatgaggaaattgagacctaggaagaagggacacagcaggtagagaaacgtggcttcttgactcccaagccaggaatttggggaaaggggttggagaccatacaaggcagagggatgagtggggagaagaaagaagggagaaaggaaagatggtgtactcactcatttgggactcaggactgaagtgcccactcactttttttttttttttttttgagacaaactttcacttttgttgcccaggctggagtgcaatggcgcgatctcggctcactgcaacctccacctcccgggttcaagtgattctcctgcctcagcctctagccaagtagctgcgattacaggcatgcgccaccacgcccggctaatttttgtatttttagtagagacggggtttcgccatgttggtcaggctggtctcgaactcctgatctcaggtgatccaaccaccctggcctcccaaagtgctgggattataggcgtgagccacagcgcctggcctgaagcagccactcacttttacagaccctaagacaatgattgcaagctggtaggattgctgtttggcccacccagctgcggtgttgagtttgggtgcggtctcctgtgctttgcacctggcccgcttaaggcatttgttacccgtaatgctcctgtaaggcatctgcgtttgtgacatcgttttggtcgccaggaagggattggggctctaagcttgagcggttcatccttttcatttatacaggggatgaccagagtcattggcgctatggaggtgagacacccacccgctgcacagacccaatctgggaacccagctctgtggatctcccctacagccgtccctgaacactggtcccgggcgtcccacccgccgcccaccgtcccaccccctcaccttttctacccgggttccctaagttcctgacctaggcgtcagacttcctcactatactctcccaccccaggcgacccgccctggccccgggtgtccccagcctgcgcgggccgcttccagtccccggtggatatccgcccccagctcgccgccttctgcccggccctgcgccccctggaactcctgggcttccagctcccgccgctcccagaactgcgcctgcgcaacaatggccacagtggtgagggggtctccccgccgagacttggggatggggcggggcgcagggaagggaaccgtcgcggcagtgcctgcccgggggttgggctggccctaccgggcggggccggctcacttgcctctccctacgcagtgcaactgaccctgcctcctgggctagagatggctctgggtcccgggcgggagtaccgggctctgcagctgcatctgcactggggggctgcaggtcgtccgggctcggagcacactgtggaaggccaccgtttccctgccgaggtgagcgcggagctggccgagaaggggcaaaggagcggggcggagcggggccagagacgtggccctctcctaccctcgtgtccttttcagatccacgtggttcacctcagcaccgcctttgccagagttgacgaggccttggggcgcccgggaggcctggccgtgttggccgcctttctggaggtaccagatcctggacaccccctactccccgctttcccatcccatgctcctcccggactctatcgtggagccagagaccccatcccagcaagctcactcaggcccctggctgacaaactcattcacgcactgtttgttcatttaacacccactgtgaaccaggcaccagcccccaacaaggattctgaagctgtaggtccttgcctctaaggagcccacagccagtgggggaggctgacatgacagacacataggaaggacatagtaaagatggtggtcacagaggaggtgacacttaaagccttcactggtagaaaagaaaaggaggtgttcattgcagaggaaacagaatgtgcaaagactcagaatatggcctatttagggaatggctacatacaccatgattagaggaggccagtaaagggaagggatggtgagatgcctgctaggttcactcactcacttttatttatttatttatttttttgacagtctctctgtcgcccaggctggagtgcagtggtgtgatcttgggtcactgcaacttccgcctcccgggttcaagggattctcctgcctcagcttcctgagtagctggggttacaggtgtgtgccaccatgcccagctaatttttttttgtatttttagtagacagggtttcaccatgttggtcaggctggtctcaaactcctggcctcaagtgatccgcctgactcagcctaccaaagtgctgattacaagtgtgagccaccgtgcccagccacactcactgattctttaatgccagccacacagcacaaagttcagagaaatgcctccatcatagcatgtcaatatgttcatactcttaggttcataatgttcttaacattaggttcataagcaaaataagaaaaaagaataataaataaaagaagtggcatgtcaggacctcacctgaaaagccaaacacagaatcatgaaggtgaatgcagaggtgacaccaacacaaaggtgtatatatggtttcctgtggggagtatgtacggaggcagcagtgagtgagactgcaaacgtcagaagggcacgggtcactgagagcctagtatcctaagtaaagtgggctctctccctctctctccagcttgtcattgaaaaccagtccaccaagcttgttggttcgcacagcaagagtacatagagtttgaaataatacataggattttaagagggagacactgtctctaaaaaaaaaaacaacagcaacaacaaaaagcaacaaccattacaattttatgttccctcagcattctcagagctgaggaatgggagaggtctatgggaaccccccttcatgttccggccttcagccatggccctggatacatgcactcatctgtcttacaatgtcatcccccaggagggcccggaagaaaacagtgcctatgagcagttgctgtctcgcttggaagaaatcgctgaggaaggtcagtttgttggtctggccactaatctctgtggcctagttcataaagaatcaccctttggagcttcaggtctgaggctggagatgggctccctccagtgcaggagggattgaagcatgagccagcgctcatcttgataataaccatgaagctgacagacacagttacccgcaaacggctgcctacagattgaaaaccaagcaaaaaccgccgggcacggtggctcacgcctgtaatcccagcactttgggaggccaaggcaggtggatcacgaggtcaagagatcaagaccatcctggccaacatggtgaaaccccatctctactaaaaatacgaaaaaatagccaggcgtggtggcgggtgcctgtaatcccagctactcgggaggctgaggcaggagaatggcatgaacccgggaggcagaagttgcagtgagccgagatcgtgccactgcactccagcctgggcaacagagcgagactcttgtctcaaaaaaaaaaaaaaaaaagaaaaccaagcaaaaaccaaaatgagacaaaaaaaacaagaccaaaaaatggtgtttggaattgtcaaggtcaagtctggagagctaaactttttctgagaactgtttatctttaataagcatcaaatattttaactttgtaaatacttttgttggaaatcgttctcttcttagtcactcttgggtcattttaaatctcacttactctactagaccttttaggtttctgctagactaggtagaactctgcctttgcatttcttgtgtctgttttgtatagttatcaatattcatatttatttacaagttattcagatcattttttcttttcttttctttttttttttttttacatctttagtagagacagggtttcaccatattggccaggctgctctcaaactcctgaccttgtgatccaccagcctcggcctcccaaagtgctgggattcattttttctttttaatttgctctgggcttaaacttgtggcccagcactttatgatggtacacagagttaagagtgtagactcagacggtctttcttctttccttctcttccttcctcccttccctcccaccttcccttctctccttcctttctttcttcctctcttgcttcctcaggcctcttccagttgctccaaagccctgtacttttttttgagttacgtcttatgggaagggcctgcacttagcgaagaagtggtctcagagttgagttaccttggcttctgggaggtgaaactgtatccctataccctgaagctttaagggggtgcaatgtagatgagaccccaacatagatcctcttcacaggctcagagactcaggtcccaggactggacatatctgcactcctgccctctgacttcagccgctacttccaatatgaggggtctctgactacaccgccctgtgcccagggtgtcatctggactgtgtttaaccagacagtgatgctgagtgctaagcaggtgggcctggggtgtgtgtggacacagtgggtgcgggggaaagaggatgtaagatgagatgagaaacaggagaagaaagaaatcaaggctgggctctgtggcttacgcctataatcccaccacgttgggaggctgaggtgggagaatggtttgagcccaggagttcaagacaaggcggggcaacatagtgtgaccccatctctaccaaaaaaaccccaacaaaaccaaaaatagccgggcatggtggtatgcgcctagtcccagctactcaaggaggctgaggtgggaagatcgcttgattccaggagtttgagactgcagtgagctatgatcccaccactgcctaccatctttaggatacatttatttatttataaaagaaatcaagaggctggatggggaatacaggagctggagggtggagccctgaggtgctggttgtgagctggcctgggacccttgtttcctgtcatgccatgaacccacccacactgtccactgacctccctagctccacaccctctctgacaccctgtggggacctggtgactctcggctacagctgaacttccgagcgacgcagcctttgaatgggcgagtgattgaggcctccttccctgctggagtggacagcagtcctcgggctgctgagccaggtacagctttgtctggtttccccccagccagtagtcccttatcctcccatgtgtgtgccagtgtctgtcattggtggtcacagcccgcctctcacatctcctttttctctccagtccagctgaattcctgcctggctgctggtgagtctgcccctcctcttggtcctgatgccaggagactcctcagcaccattcagccccagggctgctcaggaccgcctctgctccctctccttttctgcagaacagaccccaaccccaatattagagaggcagatcatggtggggattcccccattgtccccagaggctaattgattagaatgaagcttgagaaatctcccagcatccctctcgcaaaacaatcccccccctttttttaaagatagggtctcactctgttgcccaggctggggtgttgtggcacgatcatagctcactgcagcctcgaactcctaggctcaggcaatcctttcaccttagcttctcaaagcactgggactgtaggcatgagccactgtgcctggccccaaacggcccttttacttggcttttaggaagcaaaaacggtgcttatcttaccccttctcgtgtatccaccctcatcccttggctggcctcttctggagactgaggcactaggggctgcctgagaactcggggcaggggtggtggagtgcactgaggcaggtgttgaggaactctgcagacccctcttccttcccaaagcagccctctctgctctccatcgcaggtgacatcctagccctggtttttggcctcctttttgctgtcaccagcgtcgcgttccttgtgcagatgagaaggcagcacaggtattacactgaccctttcttcaggcacaagcttcccccacccttgtggagtcacttcatgcaaagcgcatgcaaatgagctgctcctgggccagttttctgattagcctttcctgttgtgtacacacagaaggggaaccaaagggggtgtgagctaccgcccagcagaggtagccgagactggagcctagaggctggatcttggagaatgtgagaagccagccagaggcatctgagggggagccggtaactgtcctgtcctgctcattatgccacttccttttaactgccaagaaattttttaaaataaatatttataataaaa

SEQ ID NO: 436 - DNA, 3804 bp, Homo sapiens
gggcagccccgccacccgcccgggcctcgacgggcgcgccgccagggctggggaggggcggcgcggagggcgggggccgggcgcagggcagggcccggctgtgcctcgccggccgctcgggcagctcccgggccgcggccagccgaggatcagagcgcttgccccgggggtctgtcgcgtcgcaggcgccgccggagccctggccatgaggaccctgtggatggcgctgtgcgcgctgtcgcggctgtggcccggggcccaggccggctgcgccgaggccgggcgctgctgtcccggccgggaccccgcctgcttcgcccgcggctggaggctggacagggtctacgggacgtgtttctgcgaccaagcctgtcgcttcaccggggactgctgcttcgactacgacagggcgtgcccagctcgcccgtgcttcgtgggggaatggagcccctggagtggttgtgcagaccagtgcaagcctacaacccgtgtgcggaggcgctcggtgcagcaggagcctcagaacggcggggcgccctgcccacccctggaagagagagctggctgcctggagtactccaccccgcagggccaggactgcgggcacacctatgttcctgcctttataactacctctgcattcaacaaggagagaacacgacaagctacgtctccacactggtctacacacacagaggatgctggatactgtatggagtttaagacagagtccttgactcctcactgtgctctggaaaactggcccttgactagatggatgcagtatctccgagagggatacacggtgtgtgtggattgtcagcctccagctatgaactctgtgagccttcgttgttctggagatggcctggactccgatggaaatcagactctccattggcaagcaattggtaatcctcggtgtcaaggaacttggaaaaaagttcggcgagtagaccagtgttcttgtccagctgttcacagttttatttttatatagatggtgatataaatatttccaaatgcatttgtaaacattctaaatattctcaagtcatgttcaatgtttcctaaaccttcaattttggccaaagtccccaaacacatcattgccacactctgaagtagagaaagaaaatttaggggccagttctcaaggaacacaggtcctttatttttattttaactaagttgaagacccactcaaaaagctcttgtggttttatgttcttgacctttcaactggagtcctctcattcagcaggtggcccgtgagacacagaatacatgtctgtttgctaaagtaaaattactgtaactcagtccgattattggtgacggaagtgtcatttaaggggatctatgttttgaaccttgcagtctattttataatcttttaaaagtttctcactttaaaacatgtatacaggtatgcacactctacacatatatttccatatatttaatattccataaattctgaaataatttcaagcaaattatcacaaataatttttccacagggcaaattatttaaaattttagtaagcattctgtaatgaaaaaccaagttatactaaaaacattttttgaagaagaaattttttttttgcttaagaagtgaaaggatcaaatgctcattgtaggtcaatgggagttcttttaaatgttataattttcatgaaaagaaatgttgacaccagtgaatgaaacaattgctttcattctgaaaattctaccaccatttgcatctaagattatttccaaggcttaaagcctgaagctgaataaaataatctttcagagtccagcttcaagtttagttgatgtaagctcactatttttttcctaccgcatgcattttctaatgtttggggtggatggtgtgtcggttatggaaggcatagacgtcattacaggtgctacgatctcacacacacacaaggaaatgttagtctccttattttatgattggaaaatcaatgacctagaggcaaaatggcatgtttaaggacctgggatgacaagtcattctgcagtcagccacagagccaaatttggactcctcaaccagaactccatgaaaagcctgactttgccaaacactgtgctggaaaagctaagcccctttcatttgtgaagtaaattttaaattcaagatatttagtttagagaattgagtcttgagatgtaaactacatgagatttctttggtttcaattgaataatattcactaacaaatgatttactaaaatacgtatttcttggtccttatcatgtaatgacagattcacaacagcaataaggatggagatttccccaataattaataacaccgagagtagcaatattttttactgtattttcatttaattgtcaaagttgtttttgtggaaaattaaattcttcagaaattaataataaaatatgtgagtctcatcaaggctagcaactttaagtcagtattaacattttcatactgtttctaacatttattaagctagatttttgaagctatgtctgggtaatttccaatgttacttaaaagtttttttttctttgagacagagtctcactctgttgcccaggctggagtgcagtggccccatctcggctcactgcaagctccgcctcccgggttcacgccattcttctgcctcagcctcccaagtagctgggactacaggcgccgtcatcacgcctggctaattttttgttttttttttttagtagagacagggtttcactgtgttagccagggtggtctcgatctcctgacctcgtgatccacccacctcggcctcccaaggtgctgggattatgggcgtgagccactgcgcctggcctgttacttaaaatttttatactagtaaataaactttttgttcacatttataaaagctctatatttgtttgactagaaaataacccaaattttctggaccagtcagagaatgataaaatttcaccaaaaataaaacaaaaaaatccttcagaactgataggtataggtacaacaactactaatagcaataaagcaatggtgcttttatagttccgatatgtgttataacatttaacataattgaggtgtataaaataaatttttcaccttatgcatttaatttttggtggatgaccagtaattgctttcttattgaagttaaatttttgttatttctattcttgagaaaattttatgggctagaggagttaactgttaaataacagttttgaaaagcttgttattaattttagcaaagcccaagggaaatagttcagaactgaaacatgtagtccaagtgatgaatgaaaaaccaaaagtttttattttcaaatttaaaaatcaaagtatataagacctcttggcactcttttttaataagtaccttagtcttagggccctatccccaggcactctaaaaagatttacgaactctaaaatcccttaatagactgattttcaaaagtgctcatggaaaataattcgaacaaaaataaatacagccaccaggaaagaagggaaaagaagcaagggataatggccatttttgaagagaaaagtgaaaaacaagtgaaggaaaaaaagaatagaaaaaggaataaggtaactataatcacagtattctttttggagttttgctttggtttttattcgagaatgttacaattaagcataaaccgcaacagcaataatttaaagtgtttggttatcatctggcataaaaatttcagttagctatcttttctagatgtgcacaaaattgatgttaataaaactggttcctgccctctaaaaaaaa

SEQ ID NO: 437 - DNA, 4359 bp, Homo sapiens
agggaagttctcactggacaaaagcgtggtctctggcgcggggatctcagagtttcccgggcactcaccgtgtgtagttggcatctccgcgcgtccggacacccgatcccagcatccctgcctgcaggactgttcgtgttcagctcgcgtcctgcagctgtccgaggtgctccagttggaggctgaggttcccgggctctgtagctgagtgggcggcggcaccggcggagatgcctgggaagaaggcgcgcaagaacgctcaaccgagccccgcgcgggctccagcaggtaccgacccgctggggccagcgaagacccaggccgggcggggtcggggccggggtcgaggtctcggctggggcgggctcagctcgccggggctcaagcacagactgcacgggggtcaaggtcgggccaggtctgtgccctggcgcgagccttaggggcgcctccagaaagttcttcggggtttttccccaggaccggcgggtacggcgggtacggcgagggaccaagccggatttgcgattgggatgcagctgcgtttcaccaggggcaaaaagctcctttcctcctctctttcctcctcgccacttgcccttccccggggccacgaggaacaagtgcaagtgtaggcggctgtctctaggagaaagtcattgtcgcggcagaaggggcaggagagagccccggggaccgcctggactcccagcgcttccagagacggccccacaagggcccctgtgttcaggagcctagaaaatcttgtaacatttaaataatcgatattgtgggaggtggggataggagaataggagttagtccgctcctttttttcattcattcattcgcactccccaccccgatacatacagctccatcgtaagttttcaggccagcgccccggccccatgctttttctaaatctaaacagagaacccagtcactgcccagagcccgaagtctgtgtgggccatactgctgttgcatcagacgattatacgccccccccaccttttaagttactttcattttatagagctcctggggcgtgcgaaggaagtggtgcattgcaaatgtgaccatgcctaagttggtaacaggctgctgtctctggcgcttgtgtgggatggaaaaagctttgtctaccttttgtgatgtcttaggattctgaccttgtttctttctgaaggatcttacttatgcatagcactttctggtccgacttaattcccaagaacaggaagcagcacaaagtccctcttaaacttgatttgattgatactaatacatttataggtgtgtaatgcaatttttaaaaaattaaggaaatgaccgggaagtattttctgccttgttttctacatttttggtgaaagggataacttttccacttagaattcagggcttccagtgtcggacgctgaatggtatttggtttttcttttagaactgtatattaatatatctcaatctctgtagacaacatgtctatgtaaatacttcccaacatatttgatcttgtagcccataaagaataacaccttaagggatttattaggtctcttggtgtaggagttaggaaagatttcactcacttcttgtagagagaaattggttgaaatataggtttaagattttgctttactatatattgacagctttgatttattttgagcctaaatacggtattttcagggtcgatttataaaatagaccagattttaatttgtaatcatgattttttaatgtttgtaatcatgaagtgtacccgaaagacctcaagctgctctttgaaatattcaagaaaattgaaattatagtcagtatagatacgatattatagtcagtatagtgttaactgcacttactgaaaaaaagtgtacttggaaattataagcatcatttttcttaatattcagttagaataactcaattccaaaaagtagtaaacatgtgaattaaacattgcttattttctgctcctctcatttccataaaggcaatggattggtacataatggggttataggaagaagtgggtttacattaaaatagaaatgtttaaattattttagagaatgtggacttaattttagaataagattttatgagtcttttatgaaaaaatatcagcgttttttaacgagaaaaagaatacctctagatttgcctatataatgagagtataacctaagctgtaaattattgccatttgaaaatcaaatcctacttgaaagccacacagaacttgacttctgtttcccagccaaccttaaatgaagagaaaaagatgacatcatctaaggctggtgacttatgctactctttgtagcattgcttttaaaataaacaaagtggttttacaatgttctcacatcccaaagaatgataatgctactctttgtggtatttgacatatttgaaagtaaggtaacacttgcctcatccaggatgcgttttttaaaaactcaaagtaaatgtctttattcttaccttaacgattgctttcggtgagtcacaatgtgtgtaagtgtgtgtgtgtgtcacatttggaaaacaggtgcacataaagccaaagttaagagaaatgcttcctgggatactcaatttgtcactagtgtgggcgtattaggttttgctggttacagtctgtaatatcatcaatgttcatgtccatgttttgctttccttctcagagctggaagtcgagtgtgctactcaactcaggagatttggagacaaactgaacttccggcagaaacttctgaatctgatatccaaactcttctgctcaggaacctgactgcatcaaaaacttgcatgaggggactccttcaaaagagttttctcaggaggtgcacgtttcatcaatttgaagaaagactgcattgtaattgagaggaatgtgaaggtgcattcatgggtgcccttggaaacggaagatggaatacatcaaagtgaatttctgttcaagttttcccagattatcattctttgggatgagagaacattataaaaccactttgtttattttaaagcaagaatggaagacccttgaaaataaagaagtaattattgacacatttcttttttacttagagaatcgttctagtgtttttgccgaagattaccgctggcctactgtgaagggagatgacctgtgattagactgggcggctggggagaaacagttcagtgcattgttgttgttgctgtttttggtgttttgcttttcagtgccaactcagcacattgtatatgattcggtttatacatattaccttgttataatgaaaaaactcattctgagaacactgaaatgttatactcagtgttgatttcttcggtcactacacaacgtaaaatcatttgtttcttttgactcaaattgtattgcttctgttcagatgatctttcattcaatgtgttcctgttgggcgttactagaaactatggaaaactggaaaataactttgaaaaaattggataaagtataggagggttacttggggccagtaaatcagtagactgaacattcaatataataaaagaacatggggattttgtataaccagggataataaaaagaaaaaagaagttaatttttaattgatgtttttgaaacttagtagaacaaatattcagaagtaacttgataagatatgaatgtttctaaagaagtttctaaaggttcggaaaatgctccttgtcacattagtgtgcatcctacaaaaagtgatctcttaatgtaaattaagaatattttcataattggaatatacttttcttaaaaaaaaggaacagttagttctcatctagaatgaaagttccatatatgcattggtgaatatatatgtatacacatacttacatacttatatgggtatctgtatagataatttgtattagagtattatatagcttcttagtagggtctcaagtaagtttcattttttttatctgggctatatacagtcctcaaataaataatgtcttgattttatttcagcaggaataattttatttattttgcctatttataattaaagtatttttctttagtttgaaaatgtgtattaaagttacatttttgagttacaagagtcttataactacttgaatttttagttaaaatgtcttaatgtaggttgtagtcactttagatggaaaattacctcacatctgttttcttcagtattacttaagattgtttatttagtggtagagagttttttttttcagcctagaggcagctattttaccatctggtatttatggtctaatttgtatttaaacatatgcacacatataaaagttgatactgtggcagtaaactattaaaagttttcactgttc

SEQ ID NO: 438 - DNA, 324489 bp, Homo sapiens
gggctggggggaggcggtggcggctgagggaaggaggaggataaggaggaggaacgaggccagcaggaggcaacggcagcgacggggccggggtgatggtgcaggtgcctggggtcggtgcggagctgccgggctgagggacgcctggtccagggtccgcagcgccgccgcgtcgctcccgggcgggcgggcgggaagatgctgagcaggttgatgagcggcagcagcaggagcctggagcgcgagtacagctgcaccgtgcggctgctggacgacagcgagtacacctgcaccatccaggtcagcgccgcgccgccccgccccgcccgcgggacccccttgtcccccaagtctggtcaacttggccggcggcggccgccgcccaggggtcgccccagccccagcgccgtgctttgtccgttcctggttgcggcggaccgccctagtgcagggcgtcttcaccggagcccctgccggagccctggcacccggtgtgtcaccgccgccgcggggcgagtctccgcgtcccacacccctaagtcctaccctgctctccctgggtgagggcgccccgtcctggttcctcgagcccgcccgagtaaggtgcacctttccggggcgcccggagggaggcgggtagggcggtaggctcctagcccggccgccccgtcgggggcgcaggctttggctctctgcccgggcaaggacgtatggctggcttttcttatctttcttgggttggaaggataatggtttatgtcataattcctccccccaccatttgtgagtcagagctttcagaaggtagaactgaacgcgcagcccatgcggagtggcctattgaaggaagcccagtcctctgggttttagagatttaggccccctcccgccttttgatccccaaattttattgtgttgggcggttctaggggacgtgaggtaaagatttagcaacaagtcccagcgatttggggcttggaagtggccaggaagaatcggcgacttaggaaaaacgccaacaatacggtaatgctcaacagcatttctttcagaacctggtatttttgaagggatttttacaacctcttgctcatgttccttcgctactgctgtgtgcacgtcaggagtagtagtctttcccgggaatgcagtcacagccctctctcctcccttatgaaaaagtcagagattgaaaacattgacaatgctcccgtgtttagttcatcagccaggaggatcctgcgctcatcgccggaagctgctctttgtggagaagctaattgagctggacccagaggggtctcacctgatcctttgcctttgcagcaggaaaacaggaggaggcttctggctcagatgtgacagacaaaaactgtcggcctgggtcctaccctcagtgtcttcttgccccccgcctccttatttatttatttttgctgacagtgctcaatcgcggaaaatagcggtgtgtgagaaagacactgggtagtgtatgagagcagctggtctctgctgactccgtgctcagttcagccttctcctcactttcccttttctccctcccctcgaaaccagctctgggcataagtgctgactgctgccaaagatccatgagggtagagaaagagcacaaaatctctttttaaggctacttaaatacagactaagcagtcataaagatgctagccatcaagtgaaaggatttttgtagttgaatatgatagagagatgctctgtattatttccttgctgaatgagtggaatactactttttgttcctattgtatcattgtgccatgtccagtttttttttgctttttttgttttgctggggtatgagaatacattgagttgatatcttcaccatttgagtatattgtctagagctttttaaaagtctttatccttttgttttaaaatttaaagcatttatccaatagcatatcaaggggagtgtgagatttagactttataagtcctaagaatacttttggggtatgtgaaataatttccgaggcaggtcattaacttttgccaaggtgtagaatacaaataaaacacaattcacatcaccatttcgctagaaatgattgttaaccttgtggttttaaagtattgcagtgaggcaaatagttatttttttcccagttagtggaacctttgaggttgcttgattggtattataattgtgggtagtttttattaccatttagaaaaaaaatatttttgagttaaataggacttattggatttgtgcttgctatatcccactatagctgtacttattttcctactgctctcattttacattattacaatttaattttataaaatatctaggccacctaaaaaattaagcttggtgtaatatggccacactgtagtaagtgtccactgtctagacatgttaatgattgtgcattgtgatttttgcatggaatctaaagaacacagggattgttaagtatatgtaatgttgtcattctttggcatcactttggcgaattgcttttgtttttacccatgtgaggaaatgtagcaaaaagacagtatcttatatgaaattaacattttctgcatgtagcttttttgaacatttagaaattgagcttttcttatcagcttttcccttcatgcatttctgtagtgagtgtgtgtgtatatgtgcatgtgcttatttgttaaatactgggcataggatcttttaaatcagtatggaaaggatctgtgaacttcttattaggttaagcaatattcccaacattttaggcattgtagcactgtatattttatggtgataatttgaactcattttccttaaagtgttgtatgccatatttttgtttaaataaagtatctattttagaatgattttactgccttagcataatcagagactacttaggatattacagaatcagaaatgtatcactgggttggagtcatgatagttccatttggtaaatttcagttataagaaattctgtcaaagtatttgtctatcctttcataatgcagcatttattccgatctggcatttaggatgtaattattaaggtaatgaaaatgccttatatcttttcaatgaaggttgccacagttaccagactattctttcactctttctgatatgcaaatgtatttgtagaccatgagaaatgaaagtatacataggagggttgtagtataattgctcccctgtgaagaacattgttaacagctccctgccagttttgaaggtcatttcctcgtaaatgcagatctggtctactcatctgtttttcattcatctgtttcatttatggagatacatatatatatatatatataatatatatatatatatatatatatatatatttaccacatttatcagcttactttgttatttggagaaaatagggaaaattaaaaaatgaaaagataactaatatctttgaactcagtatactgaaggagtcatttacgtgcttaggcatgtaatatcctaaggaatttttatgtttttaagaaacgggatcttgctatgttgcctaggctggacttgaattcctgggctgaagtgattctctcgcctcagcctcccaagtagttgggactacagaagtgcaccaccatgccctgcttataaggaatagattattttattattattattattatttttgaggtggagtctcgctctgttgcccaggctgaagtgcaatggcgcaatctaagctcactgcaacctctgcctcctgggttcaagcgattctcctgcctcaacctcccgagtagctggtattacaggcacccaccaccatgcctggccaatttttgtatttttagtagagacgaggtttcaccatgttggccaggatggtctctatctcttgacctcgtgatccacccgcctcgcctcccaaagtgctgggattacaggcatgagccactgcacccggccaggaatagattttgaactatctttcagcttataatagtttataaattatgagaatatatattgcaacatttctaatagaaatatgtgttgaaaaaatacctattttcaagtcagaaatgttaatcagttttttgtgattactgaaaggtgagctactctagaaatgaatttgattttactgagagacatattaaaataatggattaagcagccaggttaaattgtgcagttaaataagatactaccataaatagaatgtgtgtgcaggggcatttccatagtataaccaatatttggatttgattgtggctcaaccacttagtagctgtggtagctagggtgagagagggagggagagaacaaatgtattgagccctgtgcttgccaggcactctagagtttataatagattaagagaaagctataaatcataaaccctaagaattatcacatctagttcgatgccttacatagttttaattcaataaatatttgttctaatttgtttgtgctacatgattgctatgttaacttcacttcaaattttcttattcctgaaaacaataaacagttctaacacctgtataactctttatagttttaatccattccattacaaaccgttttgctgtgtgacccctctcccgggtgagaagtacagtatgttagtgtggtatttatgaggtctttgaggtatttatgaagtcaatttctgcaattatcctttgttgaattagtggagtgccagttggtatagctcctatgactttttggtttgtctcttaggatttcaaaactttcaggtccccctgcctccatctctgcaagtttagagggcttagatcaaatgaatactgtgtgatgcagtacttcatggagtgttagagttctgccagaattaggattttggatgtagggatcaccatagctacagaagtttccttcacacttttccccttagtaccccataaaagaggagacagacctcctcacagcctcattttctcacctcttgctccaagaggaagtggaccatgcttcccatcctgtttctagttatatctattttaagttgaattcacctttgatagcctcatctataacatcctgtctgactctgcgagttgctcgtctctcaaatgtgtctagttaaggcttgtactaaagaagtgaatatcatggaggattggcagcaaccttatagcttctgtttctcacttctgtagtgcccaggaaggacagtgctgctttcctggaggccaggtgatggttgttgcccctgttttctggtcttgactttttggggcttaggccaaccacctcagtggttttcttatgcagctgggaaatttgaagggtactaaagcatctccattcccatgttgcagggagaatggtgtttcccctaagacagcaaatcgccaattcatatgtctatcctagcaaatgaagcaggtcttccattcctttttaagaccctagaccctggtgaccaataaaactctttggacttttggctagacatggtggctcatgcctgtaatcctggcaatttggtaggctgaggtgggaggatcacttgagatcaggagtttgagaccagcctggtcaacatggtaaaacccccgtctctactaaaaatacaaaaattagccaggtgtgtgctgttacatgcctgtaatcccagctgctcgggaggctgaggcaggagaattgcttgaacccgggaggtggagcttgcagtgagccgagatagcaccattgcactccagcctgggtggcagagcaagactctgtcccaaaaaaaaaaaaaaaagtcttgacttttacaagcactgtaaatacaggtagagccaaagataaaccagggggaacagagggtctaagttcacatactcccaacctccagtttctccatcaggctaaaactgtctcagagaaatttaaattatggaccttttgcctcccaaggtcaacatgtgatcttcattattgttgtcaacattttgaccaagataggcccctatattggtctttcaacagttgtaattgttgtattatttctaaagattgtgttttacttttgtggtcttaccaactttctagtatcatatcctagatttgggaggcaggaacttgtaaagactcttaggttcaaattccccaggcttttgcctgctaccgttagactaaacacaaacttgtgtgaatcaagttctctaaagagatccttccgtgccatgctcatgaaggcaaaataattgggccacatgcttggcaaccactgagtttgtgtacaatagctccattcacttgtctacagaaaacacccctttgacagtgattatagctttcaaccccccacccttccacttctgactccccgaattaccatgacctcatctgctgcttcgtatttagaggtgctctggaccactccagaagtgcctagaactcattcctgtgtgttaaagatcagttcaaagcctcagacaaccactgcccaccaagaaaaaccattcaaaatcaggaccaaatctagctattcttatgcctcatttgagtcattttactatgtcacaattcaggggcccttttccttcagtagaaattgtgaggcctctcaaagcatggaaaatgaaataagggattggataaagcagtggttctcaaagtatggcccctagataggcattatccatatcacctgggtacttgttagaaatgcaaattcttgaccccatcccagacctagtgaatcaaaaactccggggatggagttcagcagtctgtttaacaagtcttccaggtgattcttaggcttgctgaggtttgagaatcactactactgggttacagagatatttagtaggtaaaatggacaagtgttgattgactggatgtaaaatgtgagggagagggagaggtgaagaaggaatctcacatttctaacttttgatttattcctgaattgtcttaatagattctcttcccttgcaaggtaaatgctaggttgtctacagatatgcatacctattttcaagtgggtaggagtctaaagattctgcagtgcgtcattataccagtttgatgctgttgtatttattggttagtattttttgtctctcctgacctaaaaacagtagattattgtatatttgtatattttttaaaaataaattttgttcacaacttgacgcactaggggaaaggaaaagtcaaggcccctgttgtcgaagggcttacaacttagggattgcaaacacgtaaataacaaactataaagcatcatggaatttggagctaagacaaggggatatgttgtggcaatgcagatttgggttggagtttgggaaatggggagggattccaaaattaataattgtttttcaaaggagatgaaatttgaaccaggttatgaaaaattgccaaaagcagggccaggcactgtggtttatgcctataatctcagtgctttgggggaccaaggcaggaggatccctcgaggccaggagtttgagtctatcctgggcaacatagcaagaccttgtctctacaaaaaatttaaaatttaggctggcatgttggtgtatacctgtagtcctagctacatgagggggctgaggtgggaggattttgtaagcccaggagtttgaggttacaatgagctatgattgtgccattgtactccagcctgggctacagatggaaacgctgtctcctaaaaaaaaaaaaaaaattgccaaaagcaaaaatggcatggggatgcgtaaagagcattagaggctgagttaacagcagactacttctaagtggaaaagttaaaaatgtaaagtctttagtttttttctttagtatgtttatctgacttactctggtatagttgagtcaaacaacagaaatctgcttggggaaaattcctgtcagtaaatttcaatcatacttgacatgcagagaggaatcaatctaaactaataatgcataaagctagtgttgaattaaatctaattctaaaattgtataacacaaattaagattcttcacaaagcaatggcattatgtcaagaaaaggtggattcagatttcaatcttcattctgtggctgcagtaactacatatgaattttatttccaagaggactcttctcttcaggatcagtttaatcatctgacaaaaaagagggtatcaaattgtaacatttagccgatgtttgaaaatcctttgatgaatacagtgcagccccaattgtgcattaacagttaagaaatgtgacccatggagtcctaaaaggcacatttcagcatctctgttcccaaacctaagtggccaccaaaaatagcttctcttgaggaccgaggattgcgtctctgaattccccagtgaacccctgacagcttcgaagttcccagccttatacagggtgtacttttagcactcaacacaatgccaggctagagctttggggatgggaacctccaagaaagcactgttcggcatttgggcaatcagtgttcggcagaatgccaatgctaataggttattttgctctggaaaaggagaaaaagaagggatagtctaaagactgatgaataggggatgactgacaatacggacactccactttattggagagattaagggggcttgctgtgaagtggtattgtgggagccagaaaaattagcaaaggcccacaggcccaagacctgaaataaatagtggtacatcaaacccgcatgccctagggcacactcaaatgtctggccactttcagtgaacttgtagcaggaaaaagccaaatcattaggaaccctcatagtctggtactccatccaggcactccttagtcaggcaaattatccttcacctccagacaggtgcagagccttttttctctacaccctgacttaacccaagggcctgtagtctgggcctcagtctaattttgaggatactgagtggaaaagttggcttcaggatttccaaaggattccaaatactctaggcaggaggtgccactaagattcttgttttgttagacttgaaccaagcaggtaagaacattgatcataacacaagaaaggccgggtgcggtggctcacgcctgtaatcccagcactttgggaggccgaggtgggtggatcccctgaggtctggagtttgagaccagcctgaccaacgtggagaaaccctgtctctactaaaaataaaaaattagctgggtgtggtgacgcatgcctgtaatcccagctactctggaggctgaggcaggagaatcgtttgaactggggaggcgaaggttgtgggtgagccgaaatcacgccattgcactccagcctgggcaacaagagagaaactctgtctcaaaacaaacaaacagacaaaaaacacaagaaagcagaattagtgaattcacataaggatctcatgtacttccagaggtaatttaagatggagaaagcatctagcctgccctcttttagattttttgcctctagagcatttttttttttttaagataagagtctcactctgtcgcccaagctggagttcagtggtatgatgtcggctcattgcaacctctgcctcctgggttcaagcaattcttgcgtctcagcctcctgagtagctgggattacaggcatgcaccaccacgctcagctaatttttgtatttttagtacagaaggggtttcaccatgttggctaggctggtttctaaactcctgaccttaagcaatccacccgcctcagcctcccaaagtgctaggattacaagtgtgagccaccatgcctggccttgcctctagaagactctaaaggccccaaagttattatggaattggaggtttgtaggtcagaaggactccatggattggcaatgatgcctggaatgttataaggcatattaagcctgcaatttctcagtatacacttatctgtctaacagaatagcccctcagctcttcgggaggccatttggaagttatactatcaaaagaaatttggctgttgagcagtgaaactctgataaaaacataaggaagtcccagtactggaatgcaacttcttcaaactatgcccagcttcagattctagtacatgtgaaataggttttaaaaaaaccaggagaggagtttgcttggtgtagctacagaacataaaacactgaaccaactaagcagcacagctaatctgaaaacttaatactttctttgcttacttttaaatttatcttaaataattttaaaaagtttgtttaaatgaatagccacattacagactgtacatctataaactgttttctaattttatggtaaggagatattacccatattctaatttgtaatattgggtatactggtcagtctgattatttttaaagagacagatataatgatatactatcttgctgcaaatgagatctttcagtgtgtcattataaaatattatggactatttttactaatgatttatctcacataagctactttctggctgaaagacaatgacaaaagaagtggaagaattttacttttttttcactttctgaattccacaattttatttcttgccatctttcctgaacaagatagcccttctgttcatctcttattatctcctttgctttatgctaatttatactattagcctctcatttaatagagtcttttatcaccatttctaattgccatcactgcttagttatacctttgctggtaagattctttgtgtgatggtcacaccttctcttggtagtgagaggtattaaataggtgcattcatagtgtatgtaaatgtacactaaggcataatgtgatatgtgtactttaagttcatttttaaacttaagagtgttgtatatttagttaattgaggcagtacaaacaaatggaaatctgtattgtataaaatgacatcttgaaactccaacctaaagattcctgaaaaccttgggctttagctggattggtattatatgttaagagttttctattaactttttttggtaataatttcttaatggattaatagacccaatgtgactctgtgtctactatgtcttcaggtctggtgcttcaggaatgggtagacatgatggcaggaggtggactttccatggccagtaaagccttactttagacagccgaagttagagtggagggagaattaaaatgattgactaaatggagaaacaaaagatcaaaacagagaaacagaggggttggagtgagagccttaagcagaaatacctggacgaatctggagggagaatctggagaagcaggttgaggataatgaaagaacattggagatctttttttttttttttgagacggagacttgctctgtcgcccaggctgcagtggcgcaatcttgactcactgcaacctccgcatcctgggttcaagtgattctcctgcctcagcctccccagtagctcggactgtaggctcaagtcaccacacctggctaatttctgtatttttaatagagacagggtttcgccatgttgaccaggctgatctcgaactcctgacctaaggtgatccacctgcctcagcttcccaaagtactgggattacaggcctgagccaccgcgccggctgagatctattttttgttgttgtagctgtgtgtgatggtagaggcttaatggtttaaaggagccctctgggcctggcctccatgtgggggtgacatttaaaatattcaacaatcaatgagtcatagtgaacacctcactgcacaatactctgccacagtgcactggtgctgggtatagaaccctctgctggacgggccactaactatttagtgctgaccacattctattctctggcttcccatttgcccttgccagatgtggggaccaacttgtgtaggttttaccttcctgtggagtggtgggcccattcacatctttcacatgtttcccaagtgcacctctaatattttatcttttaaaaatcctacatggttttcccattgcctacaggataacaggagcgttttagcatggcacagaaggccctccataatctctctgctacccccctttccagcattgtcttgtctcatcttctgtatgcaccttttctcactgcatggatcaccagccttcttgttccagggtagactccctccccattgttgctgggcagtgccttgggggacttatagcacttaccatattgaaatgtgagtatttttgccagaacagtggctaacgcctgtaatcctagcactttgggaggccaaggtgggcggatcacgaggtcaggagatcgagaccatcctggctaacatggtgaaatcccgtctctactaaaaaaaaaaaaaaaatttagcctggcgtggtggcaggcgcctgtagtcccagctactggggaagctgaggcaggagaatgatgtgaacccgggaggcggaacttgcagtgagccgagatcatgccactgcactctagcctgggcgacagagcgagactccgtctcaaaaaatgaaatgtgaatattttctcacatgtctgtctctcagtgtactgtgaactgtttgaagagcagagatatctttgtacagctagtaactaaggtgtcaccaaggggcttaatatatgttgattgtagatgtgtatgaataaaagtattagctctgaaaaaatgattattaaataatgcaaatgggcctgatgcggtggcttacacctgtaatcccagcactttgggaggccaaggtgggtggatcacgaggtcagatcgagaccatcctggctaacatgatgaaacctcgtctctactaaaaatacaaaaaattagccaagcatggtggcatgtgcctgtagtcccacctacttgggaggctgaggcaggagatttgcttgaacctgtgaggtgggggttgcagtgagccgagaccgcaccactgcactccagcctgggtgacagagcgagactccgtctcagaaaaaaaaaaaaaaaaaaaaagaaaagcaatgtagggccaggtgtggtggctcacgcctgtaatcccaggactttgggaggccaaggtgggcagatcacatgaggtcaggcattcaagaccagcctggccaacaagatgaaaccctgtctttactaaaaatataaaacttagccaggcatggtggcgcacacctgtaatcccagctactcgggaggctgaggcaggaaaattgcttgaacctgggagatggaggttgcagtgagccgagatcgcaccactagacttcagcctgggcgacagagtgagactccgtttcaaaaaaaaaaaaaagcaaatgtaaagttacctatagcttgagcaaaataggtgaaaaaatgaacccatcatgttttctatttttgagagttatgatatggtgatattatttgttttgttttgttttgagacacggtcttgccctgttgctgaggctggagtgcagtggcatgatcttggcccactttaccctcgaactcctgggctcaagcagtcctgtctcagcctccccagtatctgggactacaggtgcatgccaccaagcccagctaatttttaaaattttcttttgtagagacagagtcctgctatgttgaccaggctggtttcaaactcctggactcaagtaatcctcccacgtcaacatcccaaagtgctgggattataagtgtgagccaccgtgcccagcttatgatgactttaaaaggtggttagttagtggtgagggttgcacaactctgggaacatactaaaaaccatttaattgtatactataaaatggtgaattttatggtatgtgaattaaatttcagtgctaatgtaaatttcctggttttgataacatactatagttatgtaagattttaccactgggggaaggtgggtgaagggcacatgggacatctccttactattttttgcaattttgtgtatctataactattgcataataaaaaaatgtaaaaaggttaggatgggcacagtagctcatgcctccaacactttgggaggctgaggcgggaagattgcttgagtccaggagtttgagaccagcctgggcaacatagtgagaccgctgtctctaccaaaaataataaaaaaaaaaattaggtgtggtggcatgctgctgtagttccagctacttgggaggctaaggtggaataattgctcgagccccagagttggaggctgcagtgagttgtcatcagaccactgtactctagcctgggcaacagaccaagatctggtcttaaaaataaaaaaagtgattaaattagtttttctaaccaaatgtgtttatgattaagtttgggtttatggtttagaattgctatagaatgttttctcacttgattagagatccagttactttttaaaattttatgtcaatattttattctcaagtatcatatgtcaaaacctatctacttataaataatcctatataattatcaattataatctaataaaaagataaaagttaaggatttagaaatggtatcttggcagtatttttctttttttgagatggagtctcactctgtcatccaggctggagtgcagtagcaggatctcagctcactgcaacttctgcctcccaggttcaagcgattctcctgcctcagcctcctgagtagctgggattaaaggtgcccaccaccacgcctggctaatttttgtatttttagtggagacagggtttcaccatgttggccaggttggtctcgaactcctgacctcaagtgatccgcccatgttggcctcccaaagtgctgggaatacaggtgtgagctgccgcgcctggccagtattctttttttacatcctttctctgtaattctttgttcctttaaaaataatatttctgacataattacaattaaaatgaaggtactgataagttatgaatattatgacacggtgccatttttgtgtcttagagagttatttgctataaagtccatattacatatctttaatttgtaatatatgttaattgattaaaaaattattgagttctttgttccaggctctgtgctaagtgctttatatgcattctttcatttaatcttatctataagataaaaaatgatattgtctgtaattacagatgagtgcaatgaggcttagacaagtgaaataacttaatgtcccaggagtagtaagtcgggaagctgggatttgaacttacatctgtgtgactgcagagttgttttctttttttgccttttttgccttttttttttttttttttttaagagatggagtctcactatcttgtccaggctggaatgcagtgtctgttcacaggtgtggagcacagtgcactgcagccttgaactcctggcctcaaatgatcctcccactccagcttccgaagtggctgggattataggcacacaccactgtgcctagctacagttgttttacttctctctgatgataacttggagtgaattgagagaactgtgttaaatgcctggcactgattatctttgagaccttggtcaggtaacttaatctctaaaattgcaatgtaaccctcttatttgccaaatgaggaggcacaaatagatgatcccgccagccccttttagcacagatgttctgtagttcaagaaatttatccttggctctataagttgtttgtttaatgtgtgtgtgttccctctgtgaaggatattatttataaatacagatgttccttttaaagaaagagatgtcaaaggaagagcttggtgactgcttccatctatgatctggtctttgagtttgcagaacacaaaatacagctttatatgctcattcaactgatttcaggttctcgggaattgattcatgctaaccaaaattgtaagagcttttgttttttatgtataatccagaatcttagtttgtcaattataatggaatagtgaatactggtttctgccattgtaggcacttcttttaggatcagagactttggaaaaccagattagaaactatttggaaggcaaagggaatcaagtgggtttgaggggtatttttcagattcaaagtcttataaatgatctctgttctgtagtagagttctagtaattatatttggaatcagttttctttctcctttaagtagtagttactaatggctggtagtcttctctttttctcctgcttcatgcagattattgtacctatgctaatatgactttttttcagataggttaatttttccttttcttatttttttaaaggtacatcccagtctacatgatactgtttactttgattagacttgggtatttatttatttatttatttatttatttatttcaagacagagtttcactcttgttgcccaggctggagtacagtggtgcaatcttggctcactgcaacctctgccttctgggttcaagcgattctcctccctcagccgcccaagtagctgggactataggtgcgtgctaccacacctggctaattttgtatttttagtagagatagagttttaccatgttggtcaggctggtctcgaactcctggtctcaggtgatccacccgccttggcctcccagtgctgggattacaagtgtgagccaccgtacccggcctagacttgggtatttcttaagactcaaatctaaatgtcatttcccctctaagttagaggacttggccagacaactttagttttatgttgactttcactagttcacctttcagagggaggactcattctaacattgatcccgaattccaaggggaattctgccatggtccatatgttttcgactatattgtcattctgtcatcggcaatatataaacttgacggtatacgtaggaggcatgctcctcttagttatagaactcagtaagggtgagttctggtatatttcaaaggtttccactattgttttgatctcaagtttccaaatatagttttctgtatctcctaaatgtaaacttgccttttaatttttttattttatttatttttgagatggagtatcaccctgtaacccaggctggagtgcagtggtgtgatctccgctcgctgcaacttccacctcccaggttcaagcgattctccttgtgtgagcctctcaagtagctgggattacaggcacccaccaccatgcctggcaaatttttgtgtgtttttagtagagatagagtttcactatgttggccaggctggtctcgaactctcgacctcatgatctgcccgcctcagcctcccaaagtggattacaggcatgagccacagtgcccagcaaaacttgccttttataagtcagatttattggggtacaatttacatagattaaaattaacttttttagctgtacagttctatgaattttgacaaatatatgcaagttgtgtaactaccttgtatggaatattttcagcaccctgtaaatttctcttatgcccctttgtgattagtcctctcctctttctccagcttctggcagccacaaacctgatttctgtccttacagttttgccttttccacagtgttataaatggaatcatacaatatgtaatcttttgagtctggcttctttcacttagcataatgcttttttgagatacaatttacataccataaagttcatctgtttaaggtgtacatttcaacagtttttagtatcttttcagagttgtgcaaccatcaagatatctaattttaaaacatttttatcaccccaaaataaaccttgtactcattagcagttattccccaattctgactcccctcccatagctccctatcctaggcaaacacctacttttcatctctccagatttgcctattctagatatattaattaatggtatcatacaacgtggtcttttgtaacttctttcacttagtataatgtttttcaggttcattcatgtagtaacatgaatgctttatttttttaattgccaagtaatttcccattgtataggtcatagatataccacattttgtttattcatcagttgatggacatttcaactttttggctattatggataatgctatgaacatttatgtacaggtttttgtgtggacatgttttcctttctcttgaatacattatgaacatttttgtacaagtttttgtgtggaagtatgtttttatttcttttggatggatacctaagagtggaattgctggattgtgtggtaattctttgttaccacacgagccagcaaactgccaaaccctttttcaaacccttttccacagtgctcaaaccctttggaactgtcaaacccttttccacagtggctcaagggttccagtttctcctggccaatcctcactattgtctgcctttttttttttttttttacatattttattttatgaactttcttttttttattattatactttaagttttagggtacatgtgcacaatgtgcaggttagttacctatgtatacatgtgcctttttttattacagccattctaatgggtgtgaaggagtatcttattgtggttttgatttgcatttaccaaatgactaaatatgttgagcatcttttcgtatgtttactggccatttgtatatctttttgggagaaatgtctattcaagtctttggccatttaaaaattgggttatttgtctctttgttgagttataagaatttattatatattctggatacaagtcctttatcagatagatgatttacaagtattttctcctagtctgtgagttgtcttttcattttcttgatggtatcttttgaagcacaaaagattttaattttgatggagtccaatttaataatcttattttttattgcttgtgcttttggtggcatatctaagaaatcattgcctaacccaatgtcaagaaggtttatacctgtattttcttctaggagttgtatagtgttagctcatacatttaggtctatgatcaactttgagttaatttttgtgtatggtgtgagataggtgtccaaagttttgctattacatgtggatatccagttgtccagcgcaatcagttgaaaaggctattcttttcctcattaaattgtcttagcccttttgctgaagatgaatagaccataaatatatgggtttatttctggactctaaattatattccattgatctatctatttacctttattccactaccacagtatcttgattaataactttgtagtaggttttgaagttgggaagtatgagttcaccaccttcattctttttcaagattattttggctattcttggtttattgcatttccatatgaattttagaatcagcttgtcaatttctgtaaaaattccaggtggaattttgatacgaagtgtattgaatctgttgatcaattcagcaattcagggagtgttgccatcttaacagtattaagtcttctgattcatgaatgtaggatgtatttccatttatttggatctttaatttttaaaaaaatgctttgtggttttcagtgtaagcataatgcttttgagattcattcatgttagtgtgtatattagcagtttttttcatttcattgctgagtactattctattttatggatgtatcacaatttgttcatctattaacccattgagggacattggagttttcattttttggcagttatgaataaggctgcaaaaagacattcacatacaggtttttatataaatataggttttcattttacttaggtatatacctagaagtagagttactagttgtatatgtgtgtctgtttacctttataagaaactgccaaactgttttccaaagtggctatatcattttgcattcccaccagcaatatatgagaattctagatactttgtgtccttaccagcacttggtgttattaacatttttttaaaaagttattttgataggtatatagtgatatttcattgaggttttaatttacatttctctaatggctaatgatatggagtataaaataatgaaatcctagacttttagagctggaagagacttgaaagagttcatttctggtttttatattctgttcctcagacatatttcatggggtgtctgaggtggggatttggggactgaggagcatgctgagtgctgagtgggtgggatctgagcaacctgcctagaagggctctacattttatcagttttaaaaatattgaatttccaggtgataaattgttagaaaaaaggtgcctctgttaaacaaaaatgaaagctactgaactgaattttttaaaaaattttattttactttaagttctgggatacatgtgcagaatgtgcaggtttgtttcataggtttacatgtgccatggtggtttgctgcacctatcaacctgtcatctaggttttaagccccgcatgcattagttatttgttctaatgctctccctctccttcctcccaaccccccaacaggccccggtgtgtgatgttccctccctgtgtccatgtgttctcatttgaactgaatttttttaaagggcaaaactgagacccagagaggtaaattgacttacccaagattctgtagtctgaaatggattcatacaatagggctctttattctgcagtgcactatcttgtcataactttcagattctactgtttgttgactcaagaattatgataaaaactcttctgaccaagatttgttgaagtcataaatattttaaaaattttcttttacattgaaaagtagtatatggaaactaagtcatttttcatgagttagctgtactgactaaaaaatgaggttatcttttcttcaggaatccaatttctagtacaaaaccttccaaaattactgtgcttggtttctgtgtaatgtgggaaatgtggcacaactgtcagaggttataaatgacaatacattatagaaataggtgagggaacaagcagggatttgccattgggaaacagacattgtattttgttatcagttttgatgaacattgacaatggttcatcaatgttgaaagagtaaaattgaattcattagatgcaatcataatggttagagtaagttttttttttaataagaaaaattcagttctgaaatcttttctttattgaggtttttctagaaattaccagagtgtgaaagcagttctatacagtgttggcaattctgagattggctttgggactgatgagtgagcaatgcatggttacattgagcagaattttattagaatgcctttggtggatttgagtagaaattttatttaataatggtatagtgaaaggagtatagtgtttgaactcaggaaacttgaggtcaaaccttggctctgcttcatactacctatatgaccttgaatgagtcacctaacttctgtgatcagcctattcccaagagttgtgtgaagatgagaaaaaaaaaatagagaaaatgtatctgaaagtactttatacattttagtgctatttagctatagttttattactaataatcatctttgaacttgcaacacacaggatttttaaaaaatgatttttcagccatatgcggcagctcatgcctgtaatcccagcactttgggaagccgagatgggaggatcgcttgagctcaggagttcgagaccagcctgggcaacatggtgaaaccctgtctctactacagatacaaaaaaaattagccaggcatgatggcacatgcatgtagtcccagctactcgggaggctgaagtgggagaatcacttgaacctggaggttacagtgagctgagattgtgccactgcactccagcctgggtgacagagggggactctgtctcaagaaaaaaatatgtatatttttttcttccttatatttggctataatttacttgtattcttttagcctctgtcctatgtctctcatttttggagtttttggaaactttgctctgtccttagtccccctcctcctctttcaaatagatgacattttctcacttttgtctattaggagaactagctgtattacttttttcctatggaaaaaatgaaatagtttttattttctacatatatttagcctaacaaccctggctaaagtatcaaacctataagctgcatgtaggttttcttatttggcattgaatttcccttccttgtggttaagttccttgtacttctgcctgcctttcctctgggatttgtttcctttagatgtgtttgaaacctaatatgcctttaccttggtcaagcccatttgttggtctgtaatagagttacaatactttatcatgatatattttgtagacatgaacggtggggtcatgtatttcaactgctccaataatgatgacaagcgatttcatgtgttgatttgactcctctgtcttagatggagttaaaagttatttgccagtcctcagtaactgcagacacaggagacaatgttggaaacaatgttggtgaaatggaagtatcttcccttttgatagctgaagctggtaaggttgtcaattttagtgttatttccttttcttcctggttaagagaaggaaaactttttcctgaaggtttttattttcagtggtttctagctaatcgcttatttttatttaaattaactaaaaaataaaattgtatattttaagtagttctgagatgaatgggtattctggagaacaagcacatctgcatcaagtactgtttcattcttgggagtttcatatgcttgctagatctactttcatcatttggagtaatattttttaaataatagcatgtcccatttttgaaactagaggctagttttcaaaaagtcactgaattctaaattaaagcaaaggaaatagcaatactgactgatgtgtttataatttgcctagaattacctcttggttatttatactttgtatttcagaaaccacactcttaatgtatgttttctgaaataaaaatgggctgggtatggtggctcacacctgaacccccagcactttggttgggaggccaaggcaggaggatggcttgagtccaggagtttgagaccagcctgggcaacatggcaagaccctgtccctcagaaattaaaaaaaaaaaaaaaagaaaaagagaaaaagaaagccaaatatggtggtgcacacctgtggtcccagctactcaggaggctgaggtgggaagatcacttgagcccaggaggtcgaggctgccgtgaaccatgattgtgccactgcactccagtctaggtgacagagcaaggccctgcctcaaaaaaaaaaaaaagtgtagtgatattgtgttaaaagccagcagaggctgggtatggtggctcatgcctgtaatcccagcactttgggaggctgaggtaggtggatcacttgaggtcaggagtttgagaccagcctggccaacatggtgaaaccatgtctctactaaaaatctaaaaattagctggggcatggtggcgcacgcctgtagcccagctactcatgaggctgaggcaccagaatcatttgaacccgggagacagaagttacagtgagcctagatcacgccgctgtgctccagcctgagtgacagagcgagactctgtctcaaaagccagcagatactgaccaaaggcatactttctctaataatgacattctagggtcattttgttcatagcaatcattcatggaggggtagaaagacagaggctggaatggggtaggtgaagtatcaatgccagttgagttcaattcccaacctcattggaaattcagaggttgtcatatactttaatcattcatattttgggaaaatcgtaccttaacccagaaaaaaaaataatttctaaagatactacatgggcagcattctcagtgtgtattattatatacttcaacgtatattaaaaacaaaaccccaaacaaaaatactggattccttatacagccttgaaattataaccaaaagcttgtagtgttgaatactcagtagacgagaaagattcataactagcaaattgggcagtttgaacaagttgatcaatgaactggctggaaatagaatgactgctttaaaatatcacttagacatagttatggtaacaattataatttagctttcatatttttaagcaatatatacatcaagaaattctaaaattgtcactattctgtgataacttagtatattttgtattcagatattatgcaaaaaatgtgcactaacacatactttaagaaaagtaggttcttttacttaatattttagggtatctctgtggcttcttaagatgactgcttataggcatatatcttgtcaccaagctatggatattttagattttaatggttatgtgtgtgtttttaaaaaacatagcaacatgaagagattacatcaattaaagctttatgagatagagcaatataggtatatcttgtcatggaatggctttctaaaatattataaatggaagtattttaaaataaactgtaaaaatcgatagtaagtctctttgttaagtgaaaaatcatgtataaattaaagtaatatataactcaatttagagttttcatgttataggtgttgtagtataaccaactgggtaaggtaacgccttgtggagtagcagacaaaagccagtggcttatctaagggaaaaaactccatcaaaagtggctggcagggttcagagactcagcttgctttctttgcaaaagtccctgggcctaggaacactgttggggccaaaaagagagtgactataggatcataactacagaatgggaaaaattatggggaaacggggatttctttccatgtacaaaaaggtatctgaaaacatatttaaagttttttttttttttggatatgaagtctcactctgttgcccaggctggagagcagtggtgtgatctcggcttactgcaacctccgcctcctgggttcaagtgattctctcacctcagcttcccgtgtagctgggattagagatgtatgccaccacgctcagctaacttttgtatttttagtagagacgtggtttcaccatattggtcaggctggtctcgaactgccgacctcaggtgatctgcctgtcttggcctcccagtgctggtattacaggtgtgagccaccatgtctggcctaattaaagtatatttaataagcaaccagctgggcttgatggtgttctcctgtagtcccagccactcgagaagctgagatggatcacttcagctcaggagtttgtggccagcctgggcaacatagtgagaccctgtctcttaaacaaaaaaagcaaccacgtggcaaaagtaggttttgggaaatctgtatttgagaagaaaactttaaaaaataatatttaaaaataagaaggagcaatttatatgttgatactatctcttctccaggaacaaaagagtatgtagtagttctatacacaggcaataagtgaaaggctgaatattatattcacctctgaatatgtttcagtaataattacatatatttttctataacacatggaaaggagtttcagtagtattatacctaagtatggaaatagttatagttaccatatttttaaaaagtatattcaggtagtctaactgaattttatattctcagaaattatatataaatagctatcatttggggctaaaaacttccttgttttgttattgtatcatattggagctcacatattttgatgagaggtgataaagcaagggtccccagaaatctgctgttgttaaggaaacccatataaaacctgaccccacatcttctgggatttcctggaaatccactgacatttcctggaaagagagatgtgcctgaatattttcaggataactctgttctcataagctttctgcctgttctctctcctttcaactctggtttcttaggagcttcacttctctctactccctttccacctggtgatcttaggtctcagaggttttttttaaaataactatcttctcttaatttttttttttatggaaggattctaattccaaaggaatcatttggttaaaggtcaccttcatgtaaggtctggaggaatggcggagaatctaggggactgttttacattttccttgtggaagatagggtatagcataccctgaagaattacatgcaaggtgagaagaaaaggcgacaaaagcctttacatgcaaggtgagaagaaaaggcgacaggaataattggggaggtgaatagagtaaatctgagtataatacagaagccaaaagtaagtattttattagatgcataatttttatatttaccagcttctactgaataaaattgaagttggttcatcagggcctgtgaccaatgattgcacgtgaacacaggagagaataaatagagcaacctgaagtaataagcgatggggaggagtagcctaggcgatcttgaaatgatattgatcaaggaacaacagggagagaagaaacatttgaagtaaaggaggcttgtagcagcaggtgggtgttaggatgaaatagcgtttagtcaccttggcagaagaggatcctagcgcattaagatcagcacctcggagagaatcagaagagaaagattgggtagaaatgaaataaacaaaatctggacaatcaaaaatgaagtacgttggggatattggcaaattatttgaattgtcctagcccctaaatatagatgtacctacagttttaacgctaacatacatttaagttgattcctgaactctgattggacaataaagatacagtttattattttcactttcagaaagtagagttgttaaagaaaagtttttacatcaagtaattgttcttgtcattactaatatagttacagttgtgttcaccacccaaaataaaattggctatgacacacaagaattaaagacaggaatcttaaaattcacgtaaatttggcactgagcaagtctatatgcatgattcttccactaatccttatgagaacttaatcaaatagatgatctatatgtgaaaggatcctaaattcataaaggcccttagtcacagtctagtctgactttaagagcaatttttaaaatgccagtatttactgcattataacattattccctcttgcttgggaagtcactcaaagatcacaagacttgtgtttaaacagccacataaactatgcggtggtccattctgtttggtgtattcactctgttgccataagaggtgtgttttttcaatgcaaacaatttgatttattctaacggttgtcctaacagttaagtaaattattcccccatttaatgaaggattggttatccatttattgattgattggtaatggagtttctactcactttacctaatttgaagatcatttgtagtgttaacttatattagtatcagtgtatcttagaacagaacaaataggagcgatgttctgctttgttgaatatggactttgtctcagtgactctgtcacaaatttgaagttaaattgtaatgactgggccccgtggctcatgcctgtaatcccagcactctgggaggccgaggcaggtggatcacctaaggtcaggagttcgagatcagcctggccaacatagcgaaaccccgtccctactaaaaaatacaaaaattagccgggcatcatggcacatgcctgtaatcccagctacttgggaggctgaggccggagaatcacttcaacctgggaggcggaggttgcagtgagccaagattgtgccattgcactccagcctgggcaacagagcaagactctgtcttaaaaaaaaaaaaaattgtgataatgaaatgcctcactaaagtgtttaggatgcctcagagagaggtccttggattggacatcatttggtcactcaaaaggtagtaggccaaatatagaagataaagaataaagtcctccaggatccaggtgtctagggcagagagagtatttgttactacactctccttcctgaaccacaatcagtaatgttctctgctgaacactttttttttttgagacaggcagggtctcactctgttgcccaggctggtgtgcagtgatgcgatcttggctcactgcaacctccacttcccaggctcacatgatcctctcacttcagcctcctaagtagctgggactacagggatgtcccaccatgcttggctaattttaaattttttttgtggagacgaggtctcactacattgcccaggcttgaatatttttcttaatccagcgctctgggcagccaatatgaaccagttgcttggaggtgaaactgttggctcttccatctagtgttatttttatatggaaaagtctaattggtagaaatagaagtctcagaaaaaaattgctaattaaggagttagttgaattgaaggatgctaaatctattttcatttcctttagttggaatgattcaatgattcactgactttcagacatactgactagataaaaacaaactcagtaaacttgatttctcactttggatagaccttaataagcagtattcggagttactgggagaaaatagaggtgagtattttttaatctttgcacaagaactttcttcttttttttttttttttttttttttgagatagggtctcactttgtcacccaggctagagtgcagtggtgtgatcttggctcactgcaacctctacctcccgggtttaaaccattctcctgcctcagcctcccgagtagctgggattacagctgctcaccaccacgcccagctaatttttgtatttttagtagagatggggtttgccacattgaccaggctgttcttgaactcctgacctcaagtgatccaccatcctcagcctcccaaattgctagggttacaggcatgagccatcgcacctggcgtacatgagaattttctaagtgtaaagataacgagagaaataaaaaagaaaaagatccaaagatataccacataaaaattaaaaatctctttatgtcagaaacatcaaagccaatagctagaaagtgagtaaaaatttaggagaaaaatttgcagccaatatgccaaagggttactatccttaataataatcaccaccaccatcatcatcatccattatataaacactaaaaagaactctagctcgatggagagaatgccacaaagtggacaattaatacaatgaggaattacaattagctaataaacatgtgaaaaatgtttatttcaacctcactagtaagcaaaaactgtaagttaaataagttccaaatgtattatgtaaattagcaggaactaaaaaataatgataagaatatactgagtacaagtttaagtcagtacagtctttattaaaagatttgcaagttaactcctaggaatctcccctaaggaaatgatttaaaatagaagaaaataatttttataccaagatgttcattagaaaattatttataatagtgaaaaaaattcttttacatattgaaacatgtatgttaattatacctcttttaatactcagaggctgagtgggaaatattaatttgatagatttattttatttttatttttttgaggcagggtctcactctgtcgcccaggctggagtacagtggcatatggctcactgcagcctcagcctccccagctcaagcaatcctttcacctcggcctcccaagaacctgggactacaggcacatgccacccacctggctaatttttgtattttttgtagagatggggtttcaccatgttgcccaggctggtttcaaactcctgagctcaagagatccacccaccttggcctcccgaagtgctgggactgcaggtatgagctaccatggccagctgccaatttgatagatttagattaatttaatatctgctacctgctagttactgtcttattgtgttggagttcttagttgcaagcaatagcacccaacttgggttgattttattgattgattgattgattgattgagatggagtctcactcggtcgcctaggctggagtgcagtggcatgatctcagctcacttcaacctccacctcccagtttcgagcaatcctcctgcatcggcctccccagtagctgggattacaggcgtgtgccaccaccacacccagctaatttttgtatttttagtagagacggggtttcgccatgttggccaggctggtctcgaactcctgacctcaggtgatccgcctgccttggcctcccaaagtgctggaattacaggtgtgagccaccgctcctggccgactttggttgattttaacagaaggggactttattgcaaggacattgggtagctcagaaattttataagcagggtgcaggcagaaatgggcttagaaagtggacaacaaaaagggaggctagggagcacccaggacccagaatactactacagagccagtctgagaggacactgctgcctccacctccgaacatgtatctggatgctccagcttgctctactgtcatctgggacactgaacactaggcaccggtgccacagtgctaccacatctgcccctgtgcacttcatactggtggtgcagctgtcttagctgcttctgctgaccaacaaaatgtattctccgtggttcctgcttcttcactgtgacagtttcattgtcaaagaccaaggtaggagtgtctgagtagccaagcccaagtcatgtactctatcctagctgtaggggaggctgggaaagtaggtatctggtattttcagtttctaaagtgtctcccattaagacttgtatagaaagtagttcccatgttgagcaggaaaaaatccattatatttatgttatttcatcaaattatgaacaaagttttaaaatttactgtctgttgcctcttatcttgctagtgaataggctaacatcattaatttctgttattgtatggtgctatttatgagtatgtcacaatctatcttctatgtggtccctgatccttaggctgattttaatttgcagaatagtgcatctgcaaaaaaaaaatgaccaataatatgtgaacatggtaagtagtcagtgttgttaagtgaatccataaaagttggaaatagtatatttttcttataatgcaaaaaaaagtgcttacaaaaatagtacactattagaatgtaccatgatcaagtagggggaatttcaggttaagctatcattaagtaagtaagggctttcagggaaaccaaagaaaacatgatcggggatagacattgtctggaagggagtggggctgaagaaatgaaaggtggggaggacagtgagaaacaggaaagaacagatgaggattgaaggagagaagcattttgtttgcattcttaggaactggtgcggaggttaaggagcagcataaaatggatctcaggtttgaaagacttccccttgctagaagcaaggcagagacagagaatgtaaagttaaaagatggatgatgatgtctgtcaacatttaatttggcctatacagaatgaagtggaggaacttgactaggcaacattcagggcctctgatcagctgcacactctccccatgtagcaagagaagtggccttattaaaaatcttagaacagagagaagagagggagatagcagtttttaccttttcctgagaccctgcagaagttgttattcattagacgttcactttattcccttttaagtctggtaaagaatgaatacttggacgttttgtttcatgcagatttagttagcaactcgattatcaaatggtagaatatctgtatgcactgaagccaaattctcagtaactcagcttttgttagtcatatgaggatgatgaataataggactccagagcagttaacaaattgatacaagtggtaggaaaatttgatatgaagttatcaaaacaatgtaatgaatctgttaaagctaaagaagtgtaccatgaccacattcattatttatccactcagtcgttcaaaaagtattagaatgcccaacccctctattccaggcactagttatgtacacgggggtacagcagagaaggcagacagacctattctctgcccttgaagagttcacagtccactgaagaagtagacacattgaatataatcaagaagtgttacaaggatttttaacacttccttaatatcctgagagagtcaaacataatataagagctgaaagatgcggatttggggagacataggggtttttttgttttgtttttttgagacggagtctcgctctgtcgcccaggctggagtgcagtggcgcaatctcggctcactgcaagctccgcctctcgggttcacgctgttctgctgcctcagcctcccgagtagctgggactataggcgcccgccaccacgcctgctaatttttttgtatttttagtagagacggggtttcactgtgttagccaggatggtctcgatctcctgatctcgtgatccgaccgtcttggcctcccaaagtgctgggattacaggcgtgagccaccgcgcccagccttgttttttttttttttttttttttgagacggagtttcgctctcgttgcccatgctggagtacagtggcccgatcttggctcaccgcaacctctgcctcccaggttcaagcaattctcctgcctcagcttcccaagtagctggtattacaggcatgcgccaccacgcctggctaattttgtatttttagtagagtcggagtttctccatgttggtcaggctggtctcaaactcctgacctcaggtgatctgcctgccttggcctcccaaagtgctgggatcacaggcgtgagtcaccgcgcccggccgacatgggagttttaagacaaagagaacattaaattttcagcctggaggcaggaaaaaacatgactttagagccaatagaaatacaaaattggcaaattataatgaaagaaagctagcaaagggaggaaatgcagtgttaggcaaagtaatgtaaatattaatataaagacaaagagttaaataagccaggtgtggtggcgtggacctgtagtcccatccactggggaaaccgatgtgggagaattgcttgagcttaggagtttgagaccagcctgggcaaaatagtgagacctgatctgtcttaaaaaaaaaaaaaaaaaaggcctggcacggtggctcacacctgtaatcccagcactttgggaggctgaggcgagtggatcacaaggtcaggagtttgagaccagcctgaccaacatggtgaaaaccccatctgtactaaaaatacaaaaattagccgagtgtggtgacacacgcctgtaatcccagcttctcaggaggctgaggcaggagaatcgcttgaacctgggaagtggaggttgcagtgagccaagattgtgccattgtactccagcctagggcactaggagagacaaggaaaagacaaggaaaagagggaagtctgagtttcttataacctttcaaggaaatacctctacctaaaaatcccaagaagggatgacagaacataaggctcataaagatggcagttcagtacaaaagtagagataaaagtctcagctgaattcaatttcctgtgaaaatagtcattttagtggagagtttgtggaaggagaggaagatacggtatagtaaggggctgttttggaacttggaacatttggaaagatgtagaacagaggtagatgaggtcagctgcatatctgtgagagggagaagttggtcaccatatgccatcccactacattcctgaaaactaccaatggtagtaatttatacaaatcatgtttaaataccatgcatcacaacaatgattacacattgagcatgtgtcaaattattgtattttattggaaaattatacataaccttaatagttaagcatgttgcccagttgcttgcagatattaatattacaggtgaagaaggcaggtaaaactttgtggcactctttgaatcacagcattccttctcagcaattatttaatgaagctatgaggtatcctaaagaggcttatgatttggtgggtgaatataaaattaccattttagtaaactatattctatactcagaggtgcaggcaggacactttgggaccacttgactcaagatgagcatggttagagaagactttctggaggaagcagcagttgaacttttttgaataagtaggagttggttgggaatagaaattgagggagctgtgggacatgggtggaaggaacaacatgagcacagatggaggcatctctgtctacatttattgttaactcaaggagggaccagtaagcatccatgggatgggaaaggagatataaaataatatgctgatcctgctgacagagagcacatggttcacttattggagatgtatttactcttttgtgccacgagggtgctatttagtgaattacctgcctcctctcttgtacaatatggtacactagtggcttgataaaattaatgcatccccaacaagtgagcaatttacttccttcttatgaaagggctagtaagttgctatgcattcttttagctggttatataggttttaaaaatgatttaaacaaaaatctaaagggaattttatagacaaggaatcatcaaataaaatactaagatattgctagttgtcaccataaaaatggaattaggattacttagaatgatgggcttaatttttaaaattagcttgaaaagctttcttcaaacttaagcatccaacaataggtggttgaataaatcatgatatataatcagatactatttagctttaaacatgaagttatagaagaatgttataatacaggaagatgctcaccatattgttaattacaataaagcagtatacaaacagtatgagcaatgttttgcttttgctaaaatgtttataaactggtaagctgtaggctttagtaatctggaatcatacaagaggttccatttgcatttcaaaatgattacaacttatccgtccctctcctccccacctttcaggttctgttctatcctgcaaaactttcccagttatttatttatttattttttgagatggagtctcactctgttgcccaggctgggtgcagtggcgccatctcggctcactgcaacctctgcttcccgggttcaagtgattctcctgcctcagcctcctgagtagctgggactacaggtgcaagtggcaccacgcccagctaatttttgtatttttagtagagacagggtttaaccatgttggccaggctggcctcaaactcctgacctcaagtgatctgcccacctcagcctcccaaagtgctgggattatgggcgtgagccactgtgcctggcacttccccagttatttctatgagaactaaatgtcagcagtggctaccgtgaagggtcagccatgctacttattcatctttggctcacccttgatgatagatgctgccacttgaggagcctcactgaaggtactactgagaacctcgggaccttgcgagagaagctaccccctgagcctgtcatagcccctgattgtctgggtgatagtgctggattctatttaaaggtatgaaaaatggcttcctccttaaatctcagctgctatttgttgcctgggccttgaagcagcacaaagtccacagatccacttaagaaatgaagcaactcctctaactgctaatctttatcctttgtccacaagctttcaaacttggcagatcaaagcaagaattaccaatgcttcctgatccaacctgatgcttctcctattttcattctctaggtgacttggcagtgtcatctgcttgattgctcaagcacaaaacctgagaggcatcttaaactcctcttgttccttaactttaggctccaagatcccttcattcttctttcttgctgtcttggaagtcaattcattccttttgtctcactgcctctcagaatttagaccttaatttctcatctggagatatcagtagcctcctaatcattcctgccccttccagtctttcttccaccctggtttagcctccgtactcctttaccatggaatacaaagccctttatggtctagccctgttgcatctcagtcctttctcttgccactcagtctcctccacagataccttatgtggtgtttctaccctcccaaacgtgtgtgtatggtaaaatacacataaaatttatcattttaagtgtataattcagtgacattaggtacaccaatagagatttgtgtaacaaacaccactctctatttccagaatgttttcatcatcccaaacagaacatgtgtgtctttttcctctgaatagaatgccctgttcctctgctcccatccctgttcctcctaaggatctctctaggcttggttctagtgctacattgtctgagaagattttcccagtcttttcagacttgagttaggtgctcattttttttgtcttcctatgccatgctgggcatactcctgccatgatacttgcccatgatattgtgattgtaggtatgtgtggctctttcttccactagactttgaggtctttgaatgaagagtctgactgagtcttttatctctgcatccttagcttctagcactatgcctgctgtgaataaatgactggactcagcttcctatcagctatgcaaattagctcttgatcacatgctagcattgaatggaaatcaggtagcaggtctaaaagaaatttcgtaaatgtaggctcttctttacattaggtattcatggaaatttgtttttgagggctgctttgagtatgtaatttctcagcagttgcacataatcttctatgtttataattttagtaatgggttgggtcatgagtatacagtaattaggataaggtgacaaatattaggaagagtaaaaattttacaaaaagctgaaaatatatgtggtcttaaatatccagaacagtttccaagactgttttatttgtcaggttatgaggtacaaaagaaagaaggaactggaagtcttattattttggtgctattggatagaaaatcagtgaaaagacattggaatgagtcaaggtactagacagggcttaaggtcacaacaatttttttctcccttctgttctattttttctcctttctttagaacagaaaatagatgggaacaattcttaaaagtagaactgctactaagttctcacagtagtagtttaatgtttctcttgtggttatacctcatcctggtgtgagatgctgaatttgtcaaagagggtgagacagaggctctaaaattcctagaattaaaattagatatatggatctattatccatggacttttatgtcacttcttttgccttaaatcaagtgaagtaaaatcctaagcatactatttaaaatccagttccgccagatgctcaactagaaaggtcaatctttatcactccatttacactgaacaaacatatttgtggcagcaagagattgaatcaaggggaaaaaatgtagtccagtaatgtgattcaattgtctcatcaggcatatgacttgaacataatttgaagggtccttgaagtttctttttttttaagtttgaaatcagaaatttgcagttgacacaacatgagtcatgtagatctgattgaatttcctggattttccttttctttcatctcctgaattgtactctttcattttcttatttggagtctagtgaagaaaggaagtgagacaaacttaaagtgaaatcagattgtacatttgcataccatagagctagtggtattttttatttacagtttatgatataaatgacttagcaatagttgtttttcacacaacacatttagaaatttctgttttagcacattgaacaattaattgcttgatagtgtgatttacctgcttaggactttttaagtcgtcattatgaattatatgaagtattatgtgaatactactacctgtaggatactacagtggtactaataatttagacatctattaggcttttcatataatcacatgacccaaagttatttaaagagcagtctgaaggtccagttcctaatgtgagaggacctcacaggtagattacaaatatagaatattgcctgcattgatactgattgattactcttgaacatttggacattggataaaatttttgaagataagtgttcattgacataaagtatgctttacttttcatgaagaaaggaggcttcctctagagaagtaggaattaaacatatctgaaggtgtctggattttagctctcataaaataatacaggtaaaaattattgtatgtatttaatatgatatgtagcttgtaatcataatgccttttttatttgagaaggttgacctatttttaatgacagagagaaaggatgtagtatgaaaaactgatctttgtctcatccctgacctccaattcccagcttgcctgttcagaaaaactactgttaactagtttcttatgtatctagaaggggcagtttatttttgcatttttatatatatatattttgggacaaaatctctctatgttgctcaggctggtcatgaactcttgagctggagcagtcctcctgcctcagttttccaagtagctggtactagagtagaagagacaattaaaaagatacattcctgatgtgtattacagcaccaaacatataatgggtgtaagtcaagatgcatatcaaatcctattttcatacttccaaatgacagggtagagatgagatttatgttcataagcaacagaagcctatctgggtctaataggtattcctcaactttcttagatcatatatatgttcctggaaacacataaaaaagtcaaatgtgtgaacctcaaacattggactcacatgttttaagggatgtttagaatactaaaagctactaaaaaatcctcaactttgccttactttttaaagcacaatctttggcctctatttatagttaaaattatttatacgggctgggcaaggtggcccacgcctgtaatcccagcactttgggaggctgaggtgggtggatcacttgagatcaggagtttgaggccagcctggccaatatggtgaaaccccgtctctactaaaaatacaacagttggttgggcgtggtggcgcctgcttgtagtcccagctactagggaggctgaggcaggagaatcacctgaacctgggaagcagaggttgcagtgagccgagatcatgccactgcactcctgtctgggtgacagagcgagactctgtctcaaaaaaaaaattatatgtcattttttatttttcactattgggcaagtagttgactgacctcagttcactgagactaaatattagtctttttcaatacacttaaggctttgaaccttgcctcagtggttcaacttttgtgacactgtgctgtttttcatgactatcagctctttttttcctgctttcctctggagaacttcttgcatatttcattatattccttattgcacctagtcagtggtcactcaaaaaatatgtttggggaggagccaggcgtgttggctcacacctgtaatcccagcactttggaaggctgaggcgggcggatcacttgaggtcaggagttcaagaccagcctggccaacgttggtgaaatcccgtctctattaaaaatacaaaaattagacaggcgtggtgatgggtgcctgtattcccagctactcgggaggctgaggcaggagaatcgcttgaacctgggaggtggaggttgcagtgagccgagatggtgccattgcattccagcctaggtgacagagcgagactttgtctcgcaaaaaatgtatatatatatttggggaggaattaaattagtgaataaaagaattcaaccctttttttgataaaggaatggagtttctacatcatatggtatgcttatattcagctttaatagataataacaaataagtttccagagtgactatacagcttttcttctttttttcttttttgagacagagtctcgctctgtcaccaggctggaatgcagtggtgtgatctcggcccactgcaacctctgcctcctgggttcaagcaattcttgtgcctcagcctcctgagtagctgggactacaggcacgtgccaccatgcccagctaatttttgtatttttagtagagacggggtttcaccgtgttggccaggatggtcttgatctcccgaccttgggatctgcctgccttggcctcccaaagtgttgggattacagtgtgagccaccgtgcctggccagcttttctttttatcaacagtgtgtgtatgctgtactgtctcctcaccaacacatgttattatccatcttttatattttagctgatagatgtatgatggtatctcactttggtgctaatctgatgcctaatgatattgagtatctttttatatttattagtttttttagtgaagtacctatttttctttttcttttaaaaataactttcttgagacataattcacatgtcctacaattcacccatttaaagtgtacaattaagtggcttttaaggtattcagagttgtacatctatcaccacaatttttggagaatttttattataccaaaatgaaaccctgcaccccttagctgtcactatgtaacctctccctttcagcccttccgcatgactaatctactttttgtgtctatagacttgcctattctggatattttatataaatggaatcatacaacatgaggtactttgtgactgtgcagatataatagttgcaataaaggttttacacataaagtgttgcctgctttgcagggaaaacagttcactaaagcttgattaaaagtatctaccaagcagtttccactctaagcatcttctaagtatgcactgattataaatcataaataactattttatactgttgcataggattaaaaaccaaattaatcccaaagtaaaagctttggtgccctcaataaccaagtatgtaagccgataaagaaagttaacatggtgattcggaaaaactaaaaacttgtgtactctattggtcttttttttttaaagttttttcccaaggttttttttctttgtttgtttttgtttttgtattttgagactcactctcactgaggctggagtgaagtgcaatcatggctcactgcagcctcaacctccccaggctcaattgatcctcccacctcagcctcctgaatagctgagatgaaaagcatgcaccaccaaacccagttaatttttgtattttttatagagatggggtaattgccatgttgcccaggctggactccaactcctgggcttaagcagtttgttgaccttggccttccaaagtgctaggactacgggtgtgagccattgcacccgtcaacattttttcccaagttttaattgtacttaaaattaatataatgtaaaatttaccatcttagccattttttttttaagacttgccctgtcgtcacctaggctggagtgcagtggcgccatcttggcttactgcaacctctacctcctgggttcaagcaattctcctgcctcagcctcctgagtagctgggatagcaggcacctgccattatgcccggctaatttctgaatttttgtagagacagggtttcaccatgttggccaggctggtcttgaactcctgacagcaggtgattcacccgcctgggcctcccaaagtgctgggattatgggcgtgagccaccatgcccggccttaaccattttaaaatgtacagtccagtcagatgaaatacattcataatgtgcaaccattaccaccatccacctccacagtctttttcatctgtaaaactgaaactctataccctttaaacaataacttcccatttccctatcccctcaacccctggtaaccaccattctagtattcgtctatacctcatataaatggaatcatacagtatttgtctttttgtgactggcttatttcacttagcatagttttttcaaggtttatttatgttaaagcctatgtcagagtttccttccttttaaagtctgaataatccttcattatatgtatataccacattttgcttattcattcatctgttgatggacttttaggttgcctctacattttagctattgtgaataatgctgctgtgaacatggatatacaagtatctctttgagaccttgtgttcagttattttgagtatatacccacccagagatagaattgctggaccatatggtaattatattttgaattttttgaggaagtgccatactattttctatagtggctgtaccattttatagtcccaccaatagtgcataagagttccagtttctccacatcctgtccagcatttgtcttctcttttcttgatgataggcatcttaatgatgtgaggaggtatctcattgtaattttgatttgcatttcctcagtgattagtgatgttgatcatcttttcatgtgcttattggccatttgtatatcttctttgaagaaatgtctattcaagatctttgcccgtttacttttttttttagaaaatatttgcagtacagtttaataaagaagtcagatccacaatatataaacaactcctgcaaagcaataagaaaaagataaacagccaattttaacagacaaaatatgtcatcaagcacttcacaaaagactatctccagatggtcagtaaatgtatgttccattattgttcatcagggaagtgcaagtaaaaattgatgtgcaatatcagtagacatccaccagagtggttaaagttaaaaaaaaattaaggccaagtgttaccagagattagagcaacttagctcacaatcaaatctggtggagctttttcccatttactgaggtaactcaagaatgctgtttggtggtttctaataaaattaaacatacgcttattctgcaaggcttgtatgagaatgtgtgtagcaactttataattgtcccaaactggaacaaaccaaatgttcagtaggattatgaataaacaaattgtggcttatttatgtatttgcacattggagtaatactacacaataaggttaaagaattaagtattgatacatataacaacctagatttatctttaaaaattgagcaaaagaagggagacacaaaagatgtacaatagtgtttactgctgcaggtttttgactggaaaaggggaaaatatagttttgttttgttttttgggacagtctccctctatcacccaggctggagtacagtggcgcaatctcagctcactgcacctgtgcctcccaggttcaagcaattctcatgcctcagcctcctgagtagctgggactacaggcatgcgccaggacacctggctaatttttgtatttttagtagagaggggattttaccatgttggccaggctggtctcgaactcctgacctcaagtgacctgcccaccgcggcctcctaaagtgctgagattacagttgtgatccaccgcgcctggcctggcctttgcccatttactaattgtgatttttgtttgtttgttttaggagtttactatatattccggacattaatcgcttatcagatatgtgatttataaagattttctcccattctgtgggttgcctttttactctgttgattttgatgcacaaaatttttataattttcatgaagtccaaacttttttttctttccttgcttgtgcctttgttctcatatccagaaaatcattgccaaatccagtgttgtgaagcttctgtttgttctaagagttttatagttttaggttttacatctaggtcttttagcactactctttaatttcttttagcactgttttgtagtttcatccaatgaatcttttacctccttggttaattcctatgtattttattctttttgatgcaattatatattgaattgtttttgtacttttcttttcggattattatttgttagtatatagtacccaactgatttttgtgtgttaattcttttttctttctttctttctttttttttttttttgagatggagtctcgctctgtcacttaggctggagtgcagtggcgcgatcttggctcactgcaagctccacctcctgggttcacaccattctcctgcctcagcctcccaagtagctgggactacaggcgcccaccaccatgcttggctaatattttgtatttttagtagagacggggtttcatcatggtagccaggatggtctcaatctcctgatctcgtgatccgtccgccttggcctcccaaagtgctgggattacaggcataagccaccacgcccggtccttttttgttttgttttgttttttgagacagagtcttgctctttcgcccaggcaagagtacagtggtgccatctcggctcactgcagcctctgcttcccaagttgaagcaattctcctgcctcagcctcccaagtagctgagactacaggtgcataccaccacgcttggctaatttttgtattattagtagagatggggttttgccatgttggccaggctggtctcgaactcctgatctcaattgatccacctgccttggcctcccaaaatgttgggattacagacgtgggccacggcacccagcctctttatttatttattttctgagacagggtctgctctgttgcccaggctaaagtacagtggtgtgatcatggctcactgcagccttgagttcctggactcaaacaatcctgcttcatcttcctgagtagctgggaccacaggcatatagcaccacttctggctaattgaaaaaaaaaaaaaaaagaattttgtagagacagggtctctcactgtgttgcccagtgtggtctcaaactcttgggcttaaacgatcttcctgcttcggcctctcaaagcactgagattacaggagtcagccatcacacccagcctgtgtgttgactttatatcctgagacttcgatgaattcatttattagttgtagcaggttttttttttttttctttttgatgggggtggaatctttgggatttttctacacattatatatcgtcagtaaacaaacaattttatatcttcctttctaacttctatgacttatttcttattcttgcataatctctttgctaagaacttccaattctatattaaatagcagtggtgagagtaggcatccttgccttgttcctgatcttaaaggaaaagctttcagtctttcactattgagtatgatatttgctgtggatttttcatatatgacttttcttatattggtaatttcttctattcctagtttgttgaatgtttttatcacaaaaagctgttgatttttgtcaaatagttttatgcatcagttgaaatgattatttttttccttcctccattctgttagtgtgatatattgcgttgattgattttcatatgttgaaccatccttacattgcaggaaaaaaatctaacttggttatgttgtataatccttttgctatgctgctgaatttggtttgttagtattttgttgaggatttttgcatcaattttgcattgcaaaatgttcatatggggtattgttctgtaattttttaatactgtctttgctttgctattagggtagtgctgccctcctagaatgagaatgagaactgtctctacctcctttcatttctttcagtctttgctttatatattttgatggtctgttattaggtgcataaatgtaattgttacatcttcttgctgtattgaatatttaatatatattgtcctttgtctcttgttaacttttttgatttaaagtctgtttagtctgatattaatattgccactccttctctcttatggtgactatatatttttacatcctttcgctttcaacctacttgtgtctttggatctaaagtgagtcttctatagatagcatatagttggatcatgtgttttttaattgattctgctaatctgtcttttgattggagcatttaacccatttatatttaaagtaattattgatgaggaagcacttttgtcattttgttgtttgttttctatatatattatagttttaaaaatctctcatttctgtattactatcttcttttgtgtttagttgactttttgtagtgaattatttacattcctttcttatttctttttgtgtgttttctacaggtattttctctgtggttactatagggattacatttaacattctaaggttataatgctttaatttgaatttttacaagttcaactttaatcacataaaaactatgctttacagttctgtccccattccttctggttgttgatataacaaaattacatccttatacattgtgtgtgccaaaacataaactaaatctttttaatacatgagtctcttaaattatgtagaaaacaaaatgtggagtcacaaaccaaagttataataatattagtttttagactaataatttttaaaacgtataagtctctcaaatcatggagaaaacaaaaactggagttacaaatcattgttacaataatactagcttttataattgcccaggtatttacaggtacacctttgagatattgtggatttggttctaaaccactgaaataaagcaaatattggaataaagtgagtcacaatttttttggtatcctagtgcataaaagagttatgtttatgctatactatagtttactaagtgcgatagcattatgccttttaaaatgtacatactgtaattaaaatattttattgctaaaaatgcttacacagagacacaaagtacagctgttggaaaaatggcactgatagacttgcttgacacaggattgccacagaccttcaatttgttaaaaaaaaatgtaggttgggcacggtggctcacgcctgtaatcccagcactttgggaggccgaggcgggcggatcatgaggtcaggagatagagaccatcctggctaacacggtgaaaccccgtctcaactaaaaatacaaaaaattagccgggcgttgtggcgggcgcctgtagtcccagctactcgggaggctgaggcaggagaatggcgtgaacccgggaggcagagcttgcagtgagcctagattgcgcccctgcactccaacctgggggacagagcgagactccgtctcaaaaaaaaaaaaagtaatatctgtgaagcacaagaaagcaaagcatagtaaaacaaggtatgcctatatcttcatttatttacttattttattatttttacttttgaatatcttagtctttattatccaacttccaaaaggggaaaaagagaaaaattaagggagggaaacaaaaaggatgtgggcccattaaatactctggaagtcacttcagctggtgaagaaatgctggattaaagaaatgctagattttaagtggttaggtgttaatgggaacactaaattgataatgtcataacagatattgtggtcagaagcagcaatcagcactgaaagcacagatcactgatatttgaaggacaaagtctttttttgcccaccctggctcctgcaagctatgtgcaagcagctccaggagtaggtgcacagctgtctgccacagggctgggggtggggaatgggcagctgctaatgtgataacagctgaaatttataaaaattaaccacactttaccatccaagccttcccctggaagttggaagccttcagtagactccagagttccaaaatagttacatcagacagatttgttgtctaggtggggcaacagattcctggtacttcttactctgccatcttaccaaaatccttacctgtactggtctaacacctgttttctaagtcatgttcaaagacaaaatgctttcaacttaatggccatactgcccacagtcatttacagactcaatgatattcccattaaactaccattgacattcctcacagaattaggaaaaactactttaaaattcatatgaaaccaaaaaagagcccctatagccaaaaacatcctaagcaaaaagaacaaagctggaggcatcacgctacccgacttgaaactatactgcaaggcatggtactgttatgaaaacagacatgtataccagtggaacagaatagagatctcagaaataagactgcacatcatccacaaccatctgatctttgacaagcctgacaaaaacaagcaacagagaaaggattccctatttaataaatggtgctgggaaaactggctagccatatgcagaaaatcgaaaccggaccctgaccttacaccttatacaaaaattaactcaagatgaattaaagacttaaatgtaaaactcaaaactataaaaaccctagaagaaaatctaggcaataccattcaggacataagctcaggcaaagatttcatgacaaaaatatcaaaagcaattgcaacaaaagcaaaaattgacaaatgggatctaattaaactaaagagcttctgcacagcaaaagaaactatccatcagagtgaatgggcaacctacagagtgggagaaagtttttgtaatctgacaaaggtctaatatccagaatctacaaggaacttaaacaaatgtacaagaaaaatcaaacaaccccattaaaaagtggccaaaggacatgaacagatacttcttaaaagaagacgtttatgcacccaacaaacatatgaaaaaaagctcaacatcactgatcattagagaaatgcaaataaaaaccacaatgagataccatctcacaccattcagaatggcaattattaaaaggtcaagaaacaacagatgctggcaaggctatggagaaataggaatgcttttatactgtcggtgggaatgtaaattagttcaaccattgtggaagacagtgtggcaattcctcaaagacctagagccagaaataccatttgacccagcaatcccattactgggtatatacccaatgaatataaatctttctgttataaagatacatgcacatgtatgttcactgcagcactagtcacaatagcgaagacatggaatcaacccaaatgcccatcaatgatagactggataaaatgtggtacatagacatcatggaatactaggtagccataaaaaggaatgagatcatgtcctttgcagggacatggatggagcgggaaaccattatcctcagcaaactaacaggaacagaaaaccaaacaccacatgttctcacttacaagtgagagccaaacaatgagaacacatggacacggaaggggaacaacacaaactggggcctgttgggggatggcaagggaagggagagcatcaggataaatagctaatgcacgcggggcttaatacctaggtgatgggttgatgggtgcagcaaaccaccatggcatatgtttacctatgtaacaaacctgcatgtcctgcacatgtatcctggaactaaaaagtttaaagtgaaagttcaattccattctcagtatgcaaaaatgtaatgtattaaatttctgcatgttaatacagcatacaagtttaagttgccatttccatatggtaagctcccttagtatgatatgtttttcttctaataaggatgattaaaatgaaagacaaagggtcagttatattttattagtggccgaataatgcccactaaattacttgtgttaaatcttaaactttcattcagttcggcagaattatccttggtagccatgtgttcctgctgcttatcaaacaaaattggactgctagtgtgtaatcagaattgtaactgtgagtaatatgctagcaaattccagactctgaaagcaacttctaaggttaggtttcttagagttggagtcctgttcaaaatgagttttacaccaaaacggattttacttccaaattttgtgttttgaaatgtatgtttaatctaagtttgcatttaatttttcctgtcaaaccttagtttagaaccccaaatcctcttcctctaaactttcttagtgataccagcaattaatccctgtcagtttcactggtacaagaacactgcatttatgaaacaactgttcaaataaatataatagtaaaaagtaatactttacttgaaatagtgagtttttaaagaaatgcaggattttaagtggttgtgttaacaggcacactaagttgatggtgtcataaaagacattttccattcccattttggactgaaatgagtagctggtgcattcagttctgtgcagttttgctatctgccagctccctgatggcctggagcactgggacctcaggacaaatgtttgcaggaggcttttataggtagggctgtcaagcagcatcaggagcaaaaacagagaaataggctgctgtagtttatatatccccctgggattctacttcagtgtaaaattttaattttaaattttagtaaactgaaaaggataagagcattctgcttccagaacactttatcaggacaaattcattagtaactctatgatactgggcactggccaggtttcagtcaggaccctttcttctcctatcctgcataccaaccctgcacttaggaccagctttctacacttaggaccagcctgctacagaaagggaacaagcacaggtttcctcaatcttctcacattttaaaacgcttggaaggacttgactcactccgttgcagtttcccccttctggaagaattttgtttttgagaaaatgaatggaaaatcttaagtataacaatggcatatttatgaattatgcaagtgtttgaacatcagtttattatgggaagatgtgttttaaatagatacagtattctaaatggtgatgaggttttcaagctagttcacagaaaccacttagctcagggtgcccctggaaagagaagttgtgtattctaggatcctttggggaccctgaaccacaaagtcctctgggcccaagaccctctatagattaaactcttgtatcacatggagtcctgtgaatgaaatagatggaaactcctgagcacactcctttttctactcactgatttactgtgtccttggctctacccactatccatgcctagctgtcacccagtggataagagataagagggaacattcagaccacaagctgatacagaattggaggctgagttggacttatttacttacaagttccttttccggatgagcctttaactgaaaagatgaagaaatatttataaaaataatacctactctatagatatcctcaacttacaaagcttttgtttttaagcagaagctatgctagaaaaaaagaagacgagaaggaaatcctataatgaagtatgacgaacactggcagatggagcagataaaatttaaaaattattgaatgccacttttttggacactgaaaagttctcagggacttcatagttatacagaatatctggcattgtttttagcttttgagtgttgtatatttacgtttctcttttacagtcaagaaatagagcttcagggaaagataatacttttcttttccttttttttttttttttttggtgacagagtctcagtctgtcgcccagactggcgtgcagtggcatgatcttggctcactgcaacctccgcctcctgggttcaagcgatttcctgcctcagcctcccgagtagctgggacaacaggtgcgtgccgccacgcccggccaattttttgtatttttagtggagacggggtttcaccgcgttagccaggatggtctcaatctcctggcctcgtgatcagcctgcctcggcctcccaaagtcctgggattacaggcgtgagccatcgcgcccagccgaaagataatactttctaccatctagtaatgcgttctgatacctctattatagtttgttgggaaatgtaaaagaatgggtttttgtaattaaatactcataatatcttattaatggaacccttggaaagatgccttaagtagcaaaatatttattccatatcatagttcttcatggccagtgaaaatttttggctatatgcccatctccttatatacaatgtctttgtagatagctggtttcttagtccccaagtgaaaagtttgtgtctgaggaccactgagagaaccagatagaagtaagtctcttaggtgctcatgtgtgaattcaccaggaagatcaaatgaggaacagtttcaaagcaggctacatgaaggtagcagaatattttctactctctagtttcagtgttcagggtgtactgtgtctgatacatcctttgtgattaggtgggataggtgccccatgttttcttgggagctgagttttataacttatctggattttgaacacgtttattctttttctttctttcttttttctttttttttttgagacggagtctcgctgtgtcacccgagctggagtgcagtggcacagtctcagctcagtgcaacctctctgcctcacaggttccagcgattctcctgcctcagcctcctgagtagctgagactgcaggcccgcgccaccacgcccagctaatttttgtatattttagtagagacggggtttcaccatgttggccagactggtcttgaactcctgaccccatgatccacccaccttggcctcccaaagtgctgggattacaggtgtgagccactgcggcccggcctacgtttactcttcttttgtgaggaagtacagcatttgcccagttgtatacctgtctgccttctcttaatttaaactatcaaagtaatgtttttgaactctattatccttttacatttatcactctccccatattcctctccaccccagggggctccatttcttagcgttaccagttctttttctgtgaatgatagattttaaagaaattttctggcctgcatattgtggacatgttttttcaatagttatatatttcccatagagactataataattatgttatgaatgtgtggagtctctataatttggtctcttctgtaacttgtgctaatttttcagaatttacttaaaattttttgagtggtttgtgagcatctgagagaagatgtacaagttgtttgatgctaccatgtgttcactaaaatcaagtgatgtcagactatctcacttctatctcacttctttgaaaagctttgtagattggcagatcatggaaatgcaacaagcaaagctaaaccaaaactgagcaggacattttaccttgtcttataagggttttgatggccagatagaaaaatatggactgattgctaatataattaagtggatcagtattaattaagaggacattttctgttatgtctctagggttctctatgtaaaccttcttgatcaacattttaaatcagttatttggatgaagccttctatagaaggcaggattattgattttgtgaatgacatagtgcaggatgggataatgaatacatctgatgacataaagagattatggaaaaggccacagacaaggacaacaagcctaatttaatgacagcaatgagtagatgtaagaataaggccttacacttggagaagacaaaaaaaccctatacaaatgagcccaggatgtgagaggttaggtagctgttaacttagctgttaaatagatggcaagtgcaatgttcatcattccaattttgtagtgaataagtaaagctggtgtggtctgaggtaggttgtgtcaccagaagtctaataacagcacttggaaagtgatgctcacactctaactctgcagcttccgaattacaaggagaattcagttctgggtacagagtgcccttcaggagaacaagtaggacagtttaaagcctagaaattgtatcaagtaagaaagtcaaaggaatcacaatgttataatttctgtggaatgtcctgcagttttgcttttcacatttagggttcttttttcttccatcaattttattttgttatatggtagtgatctaatttgccttatgcatagctaatcctagctccttttattgagtggtctgatttccccctgatttgtagtgccaccattgtctagaaccaaatttctgtgtatgtacttgactgtttctgaattatctgtcctgtccattgatctgtttgtctacccctgggctagtatcacactcttttaattattttgtctttttctttcaaattgtcttggctatttattcttctatgtcaactttagaatgaacttgtcaacttctgtaaaatttccttgtagaatattgattttttttggcataatttgaagagaattgatgtggttatccatcaagtattcatgtttgtgaacataatatatttctccattcatgttatttttggaggtttttaatataattgtgtactttcatctgacagttttacaaattttgtaggattttttccacagttaccctgtagtgtttattgctattgtaattggttttttttaaaaaattacattttctaagttggttattacggtatgtaagagaacactgtcagtttttacaagttgatcttatatccagcaaccctgctgaatcctctttattttaattgtaaattcttttggattttttttttttttttttttttttgagacagtctcactctgtcacccaggctagagtgcaatgatgtgatcttggatcattgcagcctcgatctcctgggcccaagcgaccctcctacctcagcctcttgagtagctgggaccacaggcacgtgccactgtacccagctaaattttttttgtattttttgtagagttggggttttgccatgttgcccagactggtctccaactcttgagctcaagtgatccacctgcctcggcctcctaaagtgctgggattacaggaacgagtcactgtgcctggcctttcttggatttcttatgagagcaatgatagcatgcaaataatgacatttttgatatttcttttttaattcttgtgccttttatttttcttcttgctttattgtattgtctgggacctccaaaacaatgttgtttagaagtggtggtaacgggtatctttattatcttcttgactacccctctttacacgtttagttgtatttttacaaagttttttatatggtaatttcattgttgttcagttttagtatttcataatatctatttagatttcctccctatgagtttttctagtacgttattttctctatatatgattatttctgtttactttttattattgatttctaatttgcattgtgcataatgtgattagtatattattcttagaaattagttgatactatctttgagacaatagtaaatttttataaatgtcttatgtgcttaaagccactgtatattctttttctgtttagcacagttttatatctatatgtgtgtatatatgtatacacacatatatgtatgtggatatatacatagacacagacatgtattgcatatgtgtatatatttatgtgtatatatgtatatgtataagatcagacttactgttgtgttcagatttgctgtatccttggggaatttttgtccatttagtctgtgagtttctggtaacacagtattaaagtctcccatcatgactagttgtgtcagtctctccttattaattgtatctgccattgcttcatatgcatttgagagcttatattattaattgtatactttcattcattatagcttctttgaagagtattcttttttatcattatgtcatgtctttttttttttttttttttttttttgtagagactgggtctcactttattgcccaggctggtctccaagtcctgggcttaagtgatcttgccccctcagcctcccaaagtgctggaattacagcatgagccaccatgcctggcctgtaatgtctttttttattccaaatttgttttttatcttaagttctattttgtctgttaatgttgttataccagctttcttttgcaccttcctgatatatttttcactgtctattttcaaactttctgcatcattttggcttagacatgtctcataagcagtgtatagttggattaaaaaattatttttgtgatttttttctttttctattctggcttctcaataagatttttttttaacttagtctcatagactctgtcttttagtagatgaaagaaagtgtgtgtgtgtgtgtgtgtgtgtgtgtgtgtagagagagggggagctatagatggtgtttctgttcttgtaattgttatttctaagtttttaacattcataaataattataaaaatttctatcaaaatttaaaaggatcttagtgtatttgaacatccccttttcctttctagttccgctttttaaaatggctttactgagatacaatacacatactatacgattcacccatttaaagtgtacaagtcatttttttagtatattcagaattgtgcaaccattgccacgatctaattttacaacacttttgtccccttagttttgtcccccttaaaagaaatcctgtgctcaccaacagtgctggcctactccccactctcttttctgtcgccccagtcataggcagccagtaatctactttctgtctctttagatttgtctattctgaacattttatgtaaatggaattatataatctgtggctttgttcctggattctttcacttagcataatgttttcaaggttcatccatgttgccacttttcttttcatcataatcacttttaatcataatttatttataatctgtaattggttgcatttgataataaattttatcagtttctgtgaccaccaacctgtcttgcttccttctttgggctcttctttctgaagtatattctatgatatatcagttctttactaagagtctgttagtgtaacatggtcattgtaggttttaaaatgtttttattttgcctacattctttatgatggcttagctgggcatggaatcctagcttgagagttcttttctcctaacattttaaacttataactccactatcttcaaggcatccattattgctgatgaagtgtttgctgtcagtctaattgttgttttttggtaggtgatatttctttatggcactttgatgttatgcagtttcactataatatgtctaggtgtgatttatttatgtttatcctgattggtactgagattgcactttgaatctctatgttttatggctatttttcctttatatcctttgagaattctaaatacttattttaaggtcattttcagattgttttattattttcattttgtcttgagtgaattcatctaccaaatagttgattttattggtaatcgtggtgttaatttttttcatgtatttggaattttggcttgaaagcttaactcgaatgacagttgttaaccaatatcatcatatcctacccagcctatcagttttgtggttgcctccatctggttcctgtaggtaactcagatttctgatcattgtgataatggtaaatagtacatatctagccactgagctagcaagtggctggcttagattttggtgcctcctgcctgttttattgtacagtatgacataactgctttttccagtgtcatttctggagtgctgcccacttcctggctttaagcaatgtgcctggcctcagtcccctgccttaagtgagacaccttaaattttcattgacctacagaagttgaactcctgaccatctttgcttgctttcagatatggaacccattaggcttcactgactgctttctgtttctgttccatttatagtccttggaaatatttattctaaataattactatcatataatcatataatttattgtcattttgatggatatggcatgtatgatagatgggctaatttagcatctgttttaacctccttctggtatgccttcctgtgctacagtgactggaaagtaaaaagtactagttaggcttccttacctctagagttcctgatatgattccgattccattaatcatatttacttgcatgagatttgaattcagaattgagtcagtggggagagggtggtagggcacagagcattcattttgctgatgcagatccagtggtttggcgtttacagtgtttctaatccccaaattgcagccatgggctgcattcctcagagccagcaattctggtgggagcttattgatctaactgaagctaaggcagtatgttcttggagacagcaatcacactggtggctaccgaattcctggactgtggctaaggaggtgtgatcctgtagccagcacttggcacaggagtgccttgcttcctcaagctttccgatggtggcagaggtggcagttcctttggcaggccagttctgtgtggattctgagttacattccttaaggtctagcttataacctcctcctccaactcttacatttattttattagcatctaagtgttagcacctaaatattaaatctgatcctgtttaaaatattagaggtttttttatacctgcaattgaactctaactaatatggcagctataattttccttttttaagaatttttttaattttttatctatcgctgttgtgtgaagggtgcaggagtttgtatgtgttggggtgtgtgacctcaaagtatgaacctacacagccattttaacaagaattatctgttacttatattgtttttcaatttcaaatgatttcgttttgttccttggtatgtaaaaccattattgattgcaaggttgtctcaaccataacattgcaaaactgaaatataatggcatgtgttaccctagaagaggagaaagaaggcagtgtttattaggattttaatgcaaagtgattggcctaaggacatttggaagatgcaacacatttttctaccactgcaaggtaataaagggttgtgttccttgactatgatgaattaatatgatcaaaagtagaaaatatcaactagctacaaataaatcttactctccctcttttctttctacttttatattttatcatagccagtttgtgacttatgtgcctagagaaataaagtccttctccagaatttatagaataaaaatattaactctagccatctttgtgaaagggttctgggatttctgacattccatttttattaaaatattatttgcacctgataagaaaagttttatttcaggccaggcaccgtggctcacgcctgtaatctcagcactttgggaggctgaggtgggtggattgcttaaacccaggagtttgtgaccaccgtggacaacatggtgaaaccccgtctctaccaaacaaaacaaaacaaaacaaaaaataggcaggtgtagtggctcacctctgtagtcccagctactcgggagacggtggtgggaagatctgggaggtgaaggttgcagtgagccaagatggcgccactgtactccagcctgggtgacagagccagaccttgtctcaagaaaaaagaaaagaaaaaaagggaaatgttctatttaataattttcctggcattacttactgcgacccaaaacttaactggtgtcagatttgtattttaaataatattatgaatatagttcaggaaataagcaaaaatatcctgaaaattttatgcgtctactaacttgtctccttgttgcctttgatttgtagttttttttttttttttttttgagacagagtctcactctgtctcccaggctggagtcagtagtgcgatctcggctcactgcaacctctaccttccggattcaagcaattctcctgcctcagcctcctgagtagctgggactacaggtgtgcaccaccacgcctggctaatttttgtacttttagtagagatggggtttcaccattggccaggctggtcttgaactcctgaccttgtgatccccactgccttggcctcccaaagtgctggaattacaggcgtgagccaccatgcctgacccaatttgtagttatttaaaaactgatgtcagagtcacaacacagagaaatgtctgtaatatagtaaaatctataataattaggcaataaaacatgtctatgttataattgtaactgaaaaatcaggtatgcataggaataggtactgtaaggaaatatgaaaaaattggaaacagctgatgctttcttagaggaaataaagccagtggggcttgttttgttcatagtaggcttgttttgactcctagtttctgaaatttgcctttccttttctccatttgtgaaaacttagaaaaacatttaactccaggcttctggcactactcttgttttttataagttgtaaaaaattattgagggtggttgtatgaaccacacatctttacattttttcagtactctgaggtatagtttgtatagatttggggattcaaacttttttagaaatgagagttcattcctgtcctgaacttgtagcctcctagcaggtccgtctcctttcatgcttatccctcaatagtctcttttctacagtagcgagagtaacactttcaaagtatgagtcagatctttccacctatttcttgttgctctttccttgttccctccattctagccctaatcttcttgctgtttctcacataggcatcttgccaactcagggcctttgcatttgctatcgcctcagcttgcagggtctttctcccatgggttgcaccctcatttaattcaggtctgcattcaaatgccaccttctcagaaaggctatcactgactagctaaagtacacctctcggggctgggcgcgttggctcgtgcctgtaatcccagcactttgagaggccgaggagggtggatcatttgaggtcgggagtacaagaccagcctggccaacatggtgaaaccctgtctctactaaaaatacagaaattagccagacgatagtggcgcgcgcctgtaatcccagctactcgggaggttgaggcaggagaatctcttgagcctgggaggcggaggttgcagtgagctgagatcatgccactgcactccagtctgggtgacagagcgagaccctgtctcaaaagaataaaaataaaatatacctctctatcctcttacctagctttattttttaaacaattaccacacccttattctcctcactttctatgcctctaagaagcgctgttaatattgccctccatatttttcatgagccttagctcattttgggccttcaccttccagatattcttttgtaagtatttgtaaagctggacgtggtgatgcacacctgtagttctagctgttcaggaggctgaggcaggaggatagtttgagctcaggagttccagctatgactgtgccactgcactctccagcctgggcaacagagtgagaccctgtctcaaaaaaaaaaacaaagtatttgccagtcttttgcatgtcttgctttggccatctgattattttccatctatcttttgaacacatcttttaaagtttgggtgcttcagagagttccttgaccatccatattggcttatttagagttctctcccttttattccttttcttttagttttgattttttcagccttctagggctaaaattattattattatttacaatctctggacattggcttatatctgattcttctctgaacttttgtaatctattattaaaaactttaaaactcttaaactttaatatgtatgcctgatatgaccagtgttaattttttgtgtgtgattaaatacttgaattttatataggcttcttcttctttttcctagagttttgttatcgttacaacaccaacctattctttctggtttgtcagaattaagttctatttagcatcttttctttctttattttttctttttaaataagtagttttaaagattcctcacagacatagttaagaattctatcttttttcagtttttttttttttttttttgagacagattctcactctgttgcccaggcttggagtgcagtggtgcgatctcagctcactgaaagctctgcctcccaggttcatgccattctcctgcctcagcctcccaagtagctgggactacaagcacctgccaccacgcctggctaattttttgtatttttagtagacacggggtttcaccgtgttagccaggatggtctcgatctcctgaccttgtgatctgcctgcctcggcctcccaaagtgctgggattacagatgtgagccaccgtgcccggccttttcagttttttatagtactaaaatacatataaaatttgccattttaatcatttttttgttttgttttgatttttttttttgagacggagtctcgcagtgtcgccaggctggagtgcagtggcgcgatctcagctcactgcaatctccgactccctggttcaagggattctcctgcctaatcatttttaagtgtcatcatttttaagttcagtggtattaaatacattcatgtggctgggcatgatggctcatgcctgtaatcccagcactttgggaggccaagatgggcggatcacaaggtcaggagtttgagaccatcccggctaacgtggtgaaaccccatctctactaaaagtacaaaaattagccaggcatggtggcaagcacttgtagtcccagctactcgggaggcaaggctgaggcaggagaattgcttgaacccgggagacggaggttgcagtgagccaagattgtgtcactgtactccagcctgggcaacagggcgagactctgtctcaaaaaaataaatacatacatacatacatacatacatacattcatgatgtccaggcatgatggttcatgcctgtaagtccagcactttgggaggctgaggctggaggatcgcttgagtccagcagtttgagaccagcctgggaaatgtagcaaaaccctgtctctacgaaaaatagaaaaattagctgggtgtgatagcacatgtctgtagtcccaactacttgggaggctgaggtgggaagatcacttgagtccaggaagtcgaggatgcagtgagcagagatcatgccactgcaccccagcctggatgacagagtgagtttctttctctaaataaatacacacacacacattcataatgtactaccatcatcactatctgtccccagtaactcttctcatcttgtaaaactgaatctctatacccattacatcagaggtcccccaacccacgggccatggactggtgctgatctatggcctgttaggaaccaggccacacggcaagaggtgagtggtggacgagcaagtgatgcttcatctgtgtttacagccactccccatcgttcacgttaccgcctgagctccgcctcctgtcagatcagcggtggcattagattctcaaaggagcgtgaacccttttgtgaactgcccatgcaagggatctaggctgcgcactccttatgagaatgtaatgcctgatgatgtgtcactgtctcccattacccccagatgggaccatctagttgtatgaaaaaaacctcagggctcctactgcttctacatatggtgagttgtgtaattatttcattatatattacaatgtaataataatagaaataaagtgcacaataaatgtaaagcacttgaatcatcccaaaaccatctcccgcccacctgtggaaaaattgacttccatgaaaccagtccctggtgtcaaaaatgttggggaccactgcattatacaatacttctccattttattctcccaccacactctggcaaccaccgttctactgtctgtctctatgattttaactagtgtaagtaccttatataggtggatttattcagtatttctctttttgtgactggcttatttaacttagcctaatgttttcaaggttcatctatattagagcatacgtcagaatttccttccttttaaaggctgaataatattccattgtatgtatatcccacactttgcatattcattcatctgttgattgacatgggttgctttcatgttttagctattgtgtataatgctgcttatgaacatgggtatacagatatctctctgagacccagttgttttgagtatacacccagagtagaatctttggatcatatagtaattatattttgattttttttttaggaattgccgtattgttttccacagtggctgtatcattttacattcctaccgtttataggggttccattttctccatatcctcaccaacacttgttattttttgtttttttgataatagacatcttagtgggtgtgaggtagtatttcattgtattttttatttgcattttcctaatgattagtaatgttgagcatattttcatgtacttattggctatttgtagatcttctttggagaaatgtctaaagaattacttttttgatactcatttgaatgaaagtggatagcactaaccttggcagcacagtaagatttggagattttataaatgcaattgaaggattagaaactgttaggctagatagcctttgagataaagtttggataactataaggctaaatcctggcttggattcatcctttggtcagtagaggtcatctgtgtcaaagaaaacaaattatttatttatttacttattttttgctactgctattactgtgaaattactagtatataaataataatttcttttaatgtaaacaccaactagtttatgctaagctggcttctgcttgccagagtcaaggttgtaagtaaatctgtaaatctatgcattttgtgctttgaagttctaatgaatgaaagttccacaagagatgctatgctttctccctcttacttttttccatttgttccatacaactgtaaacaggtgctgccctgtaatttgtaactattcaagtttggaagaaatatgtaccttctgaagtgctaagcatacaaattcttaaacaggttttatagttctagtagataataacatattatggaaagacttgctccagagtcattttttagaactttgaagaaggttcactttgcctggactgcaatagatttatcctttttcttattagttattcagggtcacctaaaactaagctttactagtgagccaggtgtctcacttggaagttccctggaatagtagaactgaagtgtaatctttggaaaaagagttggaaaggaatgccatcagggtcctggggaaggaatctaatagactttgccaccgtggggaaaaaggccatgaaggcgaggcagagctgtcccagactagtgggcgaatcctcttgcctccaaggattggcggggatgtcagtctctcatggtcctcaccttgcacagggtaatagatgtgataatggtgacgagtgttagcaacctgctgaagcatgatgggtttagaggggagagggtggttatagtattagtgcagcccacctggagggagcgccattgaccacaggaatcaccaagcaaggtgcaaaccatcccagcatcttttaagagaaggaagaggacactgagttagggagagttgacattgtaaatgtggacattgaggtccttggttggccttccccaagctgatgttctctgggaaacagtggttataaaagtttgctgacccatgtgctttgcctggggctcatttgttccttgccagaagtcaatcatgggaagggtcctagttactaacctgaggaactgctgcaagtgaaagcatctagaatgacttttctgttggaagaaacaaaatgactgtgaaaattggagaggaaaaggctcttccttctgttttgggctctagttaggtcatttttgtgatgtggacggctgttagaagcttcactctaaaagcctatcctacagtatctcttgatgcccttggaaatgactttaagctgtctttcctagtttggagttaatgggatattgaagcagaaactgagttctaatatctggggactgcagagaacctctaaggattactttaactttttgtttattttaaattaaaaaaaaagtgcctctgagatatagatgacaggataaagacataatcagaggaattgccatcactcctcactggattcttcagaaacaggacaaagttgttacagttccatagccctgggataaagtctgtgattcctttgcttattacatttttgggacaatgcttcttgcaattctagaatctgacttataatcaaaatggtcaggttttaggtttatgaaatgtttactaagtatacaaaagttgggttttggctttagagacaaaattattttttactagatggagtttcttgaattgactttaaaaaatagcatgtaagcaagggattttttttttcattttagattggggaatcataagagctttctgtacatgtttccaatataattgacattgatccttaagggctatttggattaaggttagcctgtagtctcagtttttgtattatctctttcaaagtaggacttgcctgagattttataatgtggaaatgttttatgcccagtgctgttgactgtgtaaagagcttcagacctccactaatgttgtactcctagctgctgtttggttaacactgcctaccttctccaaaagtaactcattatatatgccttctctccccactcatgcttagggacttcgtaccacatcattctgtgttgtttttttttctttttcttttttttagctcctttaatttccctatttctatccttgttcaaatcttaaaaattcagtcttaattccttctgattcctatcatcttcagtttaaaggaagaatgatgttgaggggatggtagaagagctcctgaaagtagtcatattatttactgtatgactattttatttttgaataatggtaccagtttgcttaggtaagcacatatctaggaataccctaacctactcaatgatgaatgccaatattgaaatcctagtgatgtatgcctaccatatatcttaatcagcttcataatcccatttctttctcaatgatactactttgtgaaacttaatttatttttatttatttatttttttgagatggaattttgctcttgtcacccaggctggagtgcaatggcatgatctcgactcactgcaacctctgcctcccaggttcaagtgattctgcctcagtctccccagcagctgggattacaggcctgcgccaccacgcccagctaatttttgtatttctggtagagacagggtttcgccatgttggccaggctggtcttgaactcctgacctcatgtgatccacccgcctcggcctcccaaagtgctgagattacaggcctgagcccctgtgcccagtgaaacttaatttcttaactcatgagtgctaaatagtatggatataaaaatagttgctcttttgggcattttttgaagattgctttttttctcagaagcttcattgaaatgtaactgccatgattctgtctgtacggtgggggcgaaattttaccttcctctctcttggcatagctgctaaataagttaaataattaaaaatggaagcataagcaaaagggaaaatgttgaaaagccagattgctacagctgcctccttcacgttactaaaagtttgttatcttagaatattatcgacatctgctgggttatttatttatttattttggagacagactctcattttattgcccaggctggagtgcggtggtgagatcacaactccctgcagcctcaacctcccaggctcaagcggccctcccacctcagccttccaagtagctgggactacaggtgtgccccatgcccagctaatttttgtatttttttgtagagatgaggtttcgccatgttgccctggctgatttcaaactcctgagctcaagtgatcctctcgcttcagtttcccaaagtgctggcattacgggttgtgagccattgcacccggcctggttatttttattaataaatataattgagggaaaggagagccaagagcaatgaagttgagattgtacagtagtcatggaagtggggagtggtgatggatagtcattgcttttcagtttctgaaatgaacactgaagactccagattgagatctgggtataagtctcttactaccttcacaataaaaaagcatttattaggctgggtgtggtggcttacgcctgtaatcacagcactttgggacatcaaggcgggcagatcacttgaggtcaggagtctgagaccaggctggccaacatggcgaaaccctgtctccaccaaaaatacaagaattagtcggtgtggtggtgaatgtctgtaatctcagctgcttgggaggctgaggcatgagaattgcgtgaacttccttgagcctgggaggtggaggctgcagtgagccgatattgcaccactgcactcaagcctgggcgacagagcgagactccatttcaaaagaacgtttattaaatgactatatgaaacatgttctgttctatagaatacagaaagattgttcctctctaggtgtttattatttaaagtgaccaattgcagaatgaacattcattaggatcaaagtacttaaaaaagtatttatagttcatgaatgtagcagtgcccagtgattggtatgagggaagtacattagtttaattagcttaacgttctcttgactggactattccccttacttctagttacttgggaaagtttttatgaaggagactaatttccaaagttatttaggcaatgacaggttggaagattggtcagctgagagtgggaggaacataacgtatgagagccaaaaggaagggtggaacaatgggctggtaaagagaatgaggactagataaattctaatgagggaagagtctagggcctatgtgggagagtatgaagagtagagggtccttggagtgtggcaataagaatgtgaaactcagattggaattggctcctggtcaagaggatggtgtgatgtttctgcaaaggtttatggcaggatcatgtcattgtggatggaagagaaactcagtgttttttagatgctcacattttattaggaactgcatgatacccatagtctctaaaactggcataacacagatcacatacaaacttagattattttaaagatttattgtattagttcatgcatttcagctttttctaaaaatgaagtttgatctaaagtaattactgtggcaaagaagaaggttaaatctatggaaagtagcacctgtcatagggaaatgccattatctcaaacactttgaagtgcctggatttcaaagctgtcagttggagccatatttcttgaatctttttttactcaccaagctggattgtgtcattttaatgtggtaacatatataagagaaaaggagaaaatgatcctggtactgattatctcttgggaggaggttcagagaggtgaatttttaatgagactttggtgtttgtccagcagaatcattgcagtagctgacttcacttatattggtttttttgatactatctgatcataactctgtgggaatttcttcaagtgaaaggtaatttatagaatttaccgataagactacttacattttcaaaagctttttattgcttttagatagactcggaaaaggctaagatgtcctgggcttccctgtcaatgtgcttccctgaagtcagtggtggcagggtagcagagtcaattctacatgacagtaaaggaggactactgtggcaagattggtgatgagtgctgtattcagtgatcattgacacattaaaaataccacaagaggtcataaaaatgatgtcggaatttggaagactgttaagaaaaactgatttttattatcttcttagtcctcttttcttcttcagaaataagagtttttattttgtctgaatgtcaaatcacagtagttagtattcatcaggccacccgtctcatgtctaagaatttcatgatctcagaaattgtagctgaggctttagcctcaattccataggccctgaggtaaagcaaaggaattttaaaatcagctttaacctcagcatttagaaagaaactggaataaatcatctaacgtttagcttggtattatgtgtaagagcacaaggtactatggtaataatcagaatggctctgaaaatcagccatgtcagatctatttcctgttcttctctgatagaatgaaagacccatagatgaggatgaaatagtaaattattattattattattattaagagatgggggtctcaccctgttgcccaggctggagtgcagtggcatgatcctagctcactacagtctcaaatgccaggactcaagcaatcttcccgcctcagtgtcctgagtagctgggattatcggcatgaaccacaatgcccagctagttattctttcctagttttagtaaggttttgattttgacttgcacaacattcttattgacaacctaagaaaacacccttttcatgaactgaagtaacttcaaagaaaaaaggactacaatacaataaaaacaaaactttatttacatttttccaaattaattgttcttatttgtcagtggatttttgttgttgtttgagatgagatctcactatattgcccaggctggtctggaactcctgggctcaagcgatcttcccgtcctcttctgctcaatccaccacgcctggcttctggatatgttcttaattgttgttttgaagtctgtcttattcatatatcctaatttttataaccgttctctttctgagggatacttggatgatttctagtttttcactgttttaaatagcatgtctaagaacatctttttaaaattattattattgtttttttgagatgaagtctccctctgtcacccaggctggagtgcagtgggatgatcttggctcactgcaacctctgcctcccaggttcaagtgcttctcctgcctcagcctcccaagtagctgggactacaggcgcgtgccaccatgcctggctaattttttgtatttttagtagagacagggtttcgccgtgttagccaggatggttttgatctcctgtcctcgtgatctgcctgccttggcctcccaaagtgctgggattacaggtgtgagccatcgcccacaagaacatctttatttttcttctttcttcttccttcctacctctttttttccttccttcttttattttgaggatactgaatatttccttacattccttgtaataccaggtggaattattgggtaaaaagatatgggcacggtggctcacgcctgtaatcccagcactttgggaggccgaggcgggcagatcacctgaggtcaggagttcgggaccagcctggccaacatggtgaaaccccatctctactaaaaatacaaaaaatagccaggcatggtggtgagtgcttgtaatcccagctacttgggaggctgaggcaggcgaattgctagaacccaaggaggcagaggttgcagtgagccaaggtcatgccactgcactccagcctgggtgacaagagcaaaactctgtctcaaaaaacaaaaaaacaaaacaaccaaaagatatgaacaattttatagtacttattacataatcttggtttttttcaagaagagtttaccaaatgataatgtcactaagtagaaatatagcccagtcagcctcagattttgtaatttacatcttgctagttaagcggtagtactttaaagctattttaattagcatttctttaatttctaacattgtattttctcagatgattcccatttgtattttctttttcaaaatttatctttttctctctttgaccacttatgagtgaattttaggtgtcgcccttatgtaattgcatgtttgttttcttttacatttttggacaagaaacttttgtcagttttctcaatgtgttgtgttgctttttataaaagttgattttctggtttctttattttttaaaaaatatttaattctacagatacataggtatatgaaacaagctaggtatataaataaattttctgtactaatagtcagttatcccaacaattcccaagtggtgattcctttacccaacattgagttgctattgatttccagcttgtttatatacgaaaatagtaccaaataaacttgtctatcatattccttgagggtcacttttctttaaccctatgccatatcactttttttttttgagatggagtttcactcttgtcacctggctggagtgcaatggcgcgatctcagctcaccgcaacctgtgcctcccgggttcaagtgattctcctgtctcagcctccagagtaactgagattattggtgcctgccacaatgcctggctaatttttgtatttttagtagagatggggtttcaccatgttggccaggctggtctcaaactcctgacctcaggtgatccacccaccttggcctcccaaagtgctgagattacagacgtgagccactgtgccaggcctgccatatcattttgattaatgttcacattatgatagccataaaatgattcttgccatgttattttctgtatttatcaggctcatcatcactgaaaatatgaaaggcttttaattggtattgaattaaacttattaaattagaggttttatctttttttttaaattttttttgatacagagtcttgctctgtcgtccaggctggagtgcagtggcacgatctcagctcactgcaagctctgcctcccgggttcacgccattctcctgagtagctgggactacaggtgcccgccaccacgcctagctaattttgtttttgtatttttagtagagacggggtttcaccgtgttagccaggatgatctccatctcctgacctcgtgatctgccctcagcctgggttgggcccctcggcatcccaaaatgctgggattataggtgtgagcaccatgcccagccattatcttttgtttttgttttgttttgttttgtttgaggcagggtctcactctgttgctcaggctggtgcggtctctgcttactgcaacctctgcctcccaggctcaagcgatcttcctgcctcagaccacacagtacagcccaagtgcacctgggactacaggcatgcaccaccatgcctggctgattttttttgtatttttcgtagagacaaggttttgccacgttgcccaggctggtcttgaactcctgacctcaagtgatctgcctgccttggcctcccaaagtgctggattacagatgtgagccaccatgcccagcctattatcttttcaaaacttagtcttatctacttgacgtataacttttaatttatttatgccttcttttaccattaacagtttgtctctttccttaagtaaatagcttacgtttggttaaaataatgtctgagtatttcaaggtttgttacgtttttttaatgaaatttttattttttaccaaagcttctacttacatgtcactataatttaggaatgtgatttgaataaatatatttcatgtgttacagtgaaaagtatactatttcttttccttttttttttttttttttttgagtctccctttgtcacccaggctggagtgcagtggtgcaatcttggctcactgcaacctccacccctcaggttcaagcgattctcctgtctcaccctcccaagtagctgggactacaggcacacgctaccatgcccggctaatttttgtattttagttagagacagggtttcgccatattggccaggctggtctcgaactcttgacctcacatgatccatttgtctcagcctcccaaagtgctgggattaaaggtgtgagccactgccccagcctgaatagactatttcaactgtcatataaggagtttttttgtttttgtttttgttttttttttggtaagtttcccctttaaagcctggagatacccatgaaagatctagaaaactagagagaaagggtcaagcttgagagaaacctcgagcttgagagatttggtgattagactctgtctactcattggggactacagatcttaaatcttgctacatttagaccagtgatcattggattgaagactgaaagcagatcaagatttcagcactaatatggcaatacttttttaatagcctttcccactttataaaaatcctttaattctattctccctcttctcttccatagccaatctccttgaaggatatcttgctgttttcatctccttggcatttattcccttcacatccactgaaagctgactccccctcccacccccctgccccagatgtcctagttaatgtccttagtgatacttcatcagcccttatactaattgagctttttgcactattcgacattgttaaacacttctttttgatagtttcctcaaaatcaacataattactactcttttccccttcattcttttcctgcatctttgaattctttgcagcttcttttttccttccttcagggggttatacttgaacttctcatttctcactctgtgttttctttctgattgattttacctgtggcctcaatttccactaccacttaaacactgacgactactaaatttataagttgactgagttcaggctgtgttcctaagcacaaggtatgtatacccaatttcctgctacatgtctctacttgggttcattccagcacctctaactcagcatgttcatcatctcatcttcaaaatccactcttcccggctgggcacggtggctcacgcctgtagtcccagcactttgggaggctgagacgggcggatcacgaggtcaggagatcaagaccatcctggctgacacggtgaaaccccgtctctattaaaaatacaaaaaaaaaaaattagctgggcgtggtggcaggcgcctgtagtcccagctgtttggcaggctgaggcaggagaatggcgtgaacccgggaggcggagccgagattgcactcctgcactccagcctgggcgacagagcgagactccgtctcaaaaaaaaaaaaaaaaaatccactcttcccaataatccctacttttggggaattcttccttatccttctagttacccaagccaaatctagtacttattctataattcttcttctttcccacctatacatgaatctcttatcatgttttgtcggttctatctttgaaatctgtcttaaatctggcccttctccatttcttctgcctctgtcttatttcaggccctcattatttttgcctgagctccagtggcctcttacctaatcttcctgcctctagacagttctttcctattcattcctatttctggcaaagtgattccagagagatctttctaaaactcagtatgcccctgccattcttcttgggatactttaatgttccattattgtcagcataaagcccaaactccttggtatggtttgtaggtccccctatgaactttctcctctgtacctgttcagaattgtatgtcttgacattccctgacaggtgttctatgctccagtcatattgaactatctgtacatctctgggaccatgctgtttattgcttattatgcttttgcacattctgttcccttgaaatatattctgtcttgtttagttggttacttcctctgagatgctcagtcatttattcagtaagtatttttttaccactcactgtatgttaggtactgttctaggtgctggaaatagtaatgaataaaacaggcaaagatccctgtgctcatggagtttgtgttctggcagaacccagaactgggttaggtgcttttgtcttcacacagtgccttaaacttaaaaaaaaaaaaaaaaaagaagtagacagtctctatgatttcagcttttctatcatgtgcccttctgaatccttcctaggagatggaaccattgctaatgcataaactgccttctctcctttattatcagaacctgctctgatgaaaggatctgaaatttattcatgggaaataaaaataagggtttaaaatatccctcccagggatattttattccaaaaggccagagaaactttaagcttggggaattttaagcaccagattgcctaaaataaagtttaaactttggaaacaagaaagaaaaaaacaacctagaatggaaccagttaagttatggtgggtagtgtcactgtacgtctcgaagtcagtagccttgcttacctccctttacatggatcttgggaagattggtaagccattttagaggaaaggtgctgttttcttataaatggtaataaattaatgagtgtgatttaaaaaatattagtggccaggtgcagtggctcacacctgtaattccagtactttggaaggccgaggtgggaggatttcttgagcccagcaggagtttgacaccagcttgggcagcatggtaagaccctgtctctacaaaaaataaaaaaaattaactgggtgtggtggtgcatacctgtagtcccagctactcaggaggctgaggattgcttgagcccacgaggtcgaggctgcagtgagctgtgatcacgccattgcactctggtctgggtgacagagcaagaccctgtctaaaaaataaaagttaaatttaataaaataaaacatttaaaaaatttagcatggtgggatgaacctgtagtcccagttactcaggaggctgaggtgggtggatcatttgagcacaggaggtcgaggctgcagtgagcagtgattgcgccactgcactccagcctgggtgatagagcaagatcctgcctttaaaaaaagagaaaggaaaatcttagagaacagattccatacaaagctgtgtattatacctttcgaatcccatcgggggatctggttgaatctgagattttgactggctggtttatgaagatttcctgctttaggcttgagtttgaattggaattttaaaaagagaagtaaatgctgtgataaattgaggtaataatcagtacagtgaaatggtaggataggaaatgaaaagaagacaggttcatagaaaagtgagtataggggccaagaaagtgattgaatatagaggcaaaatgatgtagaagtggtaaatgggaaatctatgctaaaataatacagagtattaaataaagttggccttgtagtggtcagaggaggagaccacaaatatgttctggatttttagagccccagaaagacccttaaaatctgccttaaaatgtgttttccatttactagtgaaggctgaacattcttttaaagatgtctttgtccttgtacaatacaatatacccagaagggaaaacactttatagcccttatggactaacttggtctgctttgaaatttggctcaggtaggccttaccatggagttacctggtagctattaaagaagtttaagtacagaagttttcataattacttccttaatttcttcctcatagtttgattttaaattagaagagaattactggaatacatgtatcctcctcaatcactacccctagcaagcttcattagtctttgaaatgtttctccctgtaaagaacagtggcaaaaaaaaaaaaaaaaaaaaaaaagtaaaaaagaaagaaatggaatccagattaactgactagtttttagtccttgctctaattcctcaaagcaaacctttaaaggctgagtggttttgagagtgagggaaaatttattagtgattgaaaactgctgttttatttagaaattccttttaattttaatttaggttataagtatcttggacaaaggaagtacacccagctgctaggtcccctgattgtatttatatcactttcccttcaacctcctctggcctctctaaggccttagccttcataaatgctaaggcccaggtgggccatctctgcagaattgcatgcaaagaagcacagtccagcatccagaaggaatttaaaaggaatctcagtcttgatgtgcttttctcaaagattgttaaataacatctaagttgtaacccatagcaatgcttcttacaatctctttatcgtccctccaattctttcattgtagcactgctcagaaaccccgaaaatgctcagcctgaggtctttccgctaccccaatctgatttttttccctttcatcttgtcctccccaactctttattagatgggcagacttagtctttttggcttattctctaatttttctcgattccttgcccattactcagattctctacaaaggtgagttcagaaactgagcaagcaggaatattttcttctttcttcttagctcttcagtcctgcctttctctaccactcattctcttgattctgaatcacagtaagtcctgggaaagtggatagtccaaagagaactttcattagagggcagtgaaggcaaattaactgggtgaagacaaaatacattttagctatctcttcctcctggatgggtgcattcacactttttttttttttttaagacggagtcttgttctgtcgctcaggctggagtgcaatggtgcgatctcagctcactgcaacctctgcctcccgggttcaagtgattttcctgcctcagaccacgcccacccccctgccccaccccctgagtagctgggattacaggcccacgccaccatgctcggttaatttttgtatttttagtagagacagggttttaccatgttgcccaggctggtctcgaactcctgacctcaggtgatccgcccgcctcagcctccctaagtgctgggattaaaagtgtgagccactgcacccagcccgtgcagtcacactttaataaattttgtaaggttacatgaagtttctttgaggatccaagaattctgttttctgagcccaagggaggaatgatgcagacagaaaagattggtaaccaacactggggagcgaggggcataaaggagatagtgctgacccttctccctctctcccaaccctaacctgttgcagacaaccggttccttgtttaaccctttagccagttaatgaaagtgtattatgctggcaacaacatgtctacttgacatcttcagatgcttttgtgacagttttcaaaatgtaccctttctctggctgttgtagccctgtagtcaggacacaggctctgccagttgttaaagccaaagaaatatatttggagctgggtgtggtggcgtccttagtcccagctgccccagaggctgaggtagggggatcacttgagcccaggatttcagagttaaagtgagctatgattgtatcactgccctccagcctgggcaaagagtgaaacagccagaccctgtctcttaaaaacaaaacaaaacaaaactctccctctctctctctctctatatatatataatatatatagttatatatgtatataaaatatatatagttgtatatagatatattctgaaacattattccatctcccctaataaatcatctttcctcctcttccttatcgcactccttcccctggttagcattcatctgagcaactgtcattttgaggaaggctggcaatcaaataggggtgacagaacagggcctgaattattaacaagcaataggttggactccagtgctcacattagttgctttgatcagtcagctgcttattagcataatccagagaaagaaaggacctgccttgttgtaccctggatgctttcttatcctgatgattgcctcagaatttgcatctgctccttattcaattgactctacgtttgcagctgcctgaaactgcacctacctttgtagcagttttttcctacaaatgtttagaactcagatttcctctgatcttgtttctctgatctgattccacatgctttctttcctttgagaaatcctcaaaatctgtgatctgcttagcactcttccttgctttcactgaaaatttgaatttattcttttaagtatttcattttactggatttaggatggaaaggggttcagttatgtgcataaagtctatcatctcaacccagtcttagtttttattattttacatatatgtatctgtagtttcatataatatcatccctatgtatgattgactcaaaatgttattaaagatctgaacattatttctagttttctttactgtaaagaaacgcatttccagctgaagtatacttaaaactatagaatatgttaagtttattttgcaagttgatccaagattaaaagaataaaatgcaatgtgacatatatgtttgagtagtgcagaaaactactgtttttatggagataaaagttgatgttgataacagaatttattactggcttattacatgtattacatgtaacgcatgtagatagtttttatgtatctgtttatgagaagagtatgttgtatttatataatttgacttatgttccaatattagtgttttttatataacataagcatttttcagagttgcagaacagaattcaaactggtagactccaggccagatcaggctatagaaatgttttgtttggtcttcataatattagcttactcagttttttttaaaaagtgaattaattgccaatgtttgaaagtaaagctatttcaggaagagttcctgacttgtagcttctcttgaaaaatcagaagatttaacaactttgggtccacattcctctgtggcagtaaatgaccagtgctgagtagtggctgcccttgttagctagtagttggccacagtcttcgtcattctttataatctctcaagccagtctacttttctctttattgcttctttcctgatcctgtaggtgtttgagtttgtgacccctactatataaatcattattttaaagtattatgaaatattcatggaataagggtactacaattatcagatttctttctttttaaaagtgtatataattctgtgattttcaactttgtaaacatattctttcacattggcattataacctggaagcagaagtatagagtcaaaaaaatgagaacagttacatggctcttgataaatatgcaaagtgccttcacaataaaaatagctaatgttgaagctagaaagaggagtcaatagagaagtcagaagaaatgctggccttctacctacagagcctcatagtgtccctgtggagatcttgtcagtttaggtctggtttttattcttgctgatccagttagtaatcagaaagtggcttggtgaacacagactcagaataaaggaagcagtagttttgaaggagatttcattataccttagcgaggactgatgtattaagtttgctttatagtacaaaacatttgtctctcaaaatcataatgcctgctgagtcagtatccattttccttggacagtgttgggtgaatactgcgaaattctttttataaccccctccttctttctaaaaactccatttatactactgtcttctgttaatacattctttatatgaatttcagtatcattaggttacgtctttatatatgtcatttttttttctgaaatacctaattaccttattggacttgggctagaggaactcaaatggtctttttatggtggacgactgttatagatagagataccatccattatatgtttaccctttctagattcatgtttagttttgtcttctaaattctgagtatactttgttctcatatgtcgattaatctggtgtttgtttaatatttcatagttatgcaaataaagttcacatatatcatgttgttttatccagttcagaccctgtgtcagttatctgcgagtgtgtcgtgattcccatttttaaaaacaaagaaactgatgatcagagaatataagtgactttttcaaggtcaaaaagctagtaagatgattactagaggctgggaaaggtagaagtggggaggaggggaagcgggaatggttaatgggcacaaaaagttgttagaaagaatgaataagacctagtatttgatagcacaacagagtggctacagtcaataataatttaattgtgcatttaaaaataactaaaggagtatataattagattgtttgtaacacaaaggataaatgccagagagggtgaataccccatttaccataatatgattattacacattgcatgctcatatcatgtacctcatgagagatatcaagtgtctcatataccccataaatatatacacctactgtgtacccacaaaaattaaaaagtgaaaaacaaagctattaagtaacagggttgggaattaaagtgagattttctgacttcaaagtccatgtttccaagataagcagtagaatcaggcagtggacttagtgatgcgaaatgagaagggagcaaaaccctacaatgcagattgtttcttttgaaatttctttctttgctcctaccgggaaagcagggtcaccctatttggtataagtggcatagagcttgtcaagaggtgttcttggggatatagtcataccctgtttgtgagggagaatcctgcaagtttggtaccctttgatcttctctgggacagctgcagatagaagggcaaaagttaaagaaaggttttatgtagaaccattcctataagacccccttctcatctggctaaatacaaaggtattcactaatgaagcttaacttatctctgaagcattttcattttaatagaagacttataaagagaaatatgaaaggaaaaaatcagtgaaggtggccgagtgtggtggctcatgcctgtagtcccagcactttgggaggccgaggtgggtggatcacaaggtcaggagttcgagaccagcctggccaatatggtgaaaccccatctctactaaaaatacaggccaggcgcggtggctcaggcctgtaatcctagcactttgggaggccgaggtgggtggatcatgaggtctcgatgagatcgagaccatcctggataacatggtgaaaccccgtctctacaaaaatacaaaaaattagcagggcatggtggcgggcgcctgtagtcccagctactccggaggctgaggcaggagaatggcatgaacccgggaggtggagcttgcagtgagccgagatggtgccactgcactccagcctgggcaacagagcgagactccatctaaaaaaaaaaaaaaaatcagtgaaggtgcagtggcagataagggattccttttttattacatttttgtttcagtattttttaaaaattagaaagattgaattatgagttttaaaatagtacacaaataatataaggagttcttaacagtcccttcaggcttttattctcttaaaatgatttctaaaaccatataacaggaatttttaaataaaacttctagtataagttcactataattcctgtgcacttaagcaatatagcacaactttaaaatacaaaaataagatatacttctatctccagggacttctgacatttttatatgaaaagagagaagtatttggccaggcgctgtggctcacgcctgtaatatcagcactttgggaggccgaggtgggcggatcacgaggtcaggagatggagaccatcctggctaacacggtgaaaccccgtctctactaaaaatacaaaaaattagccggatgtggtggcgggcacctgtagtcccagctactcgggaggctgaggcaggagaatggcgtgaacccgggaggcggaggttgccgaggtggtgccgctgcattccagcctgggcgacagcacgagactctgtctcagaaaaaaaaaaaaaggaaaagagagaagtattcaacaaatcagttttggcgtatgggtttcctcgtgttgacttttgaaatactgattggtgactgtcaccaaccaatattccctagctccttcgtgcacctcaaatgactaagaatggagagagtactaggagtagcatctatttcttttgcagagattagaaacaagacgcttcttgctctgcttcttcaaagggttccgattgggtgattaagaacaactttaaatgttttggagttgagagaaagttatgagtcctttttcagcctgagacttttctgttatgaaggaatgcatacgcagtgagccttccaaggatactagcagttgctttaaaatattcttagggacattgttttatagacaagtcccttgaacctgatgatcaagagaaataaattgatcgggcccttgcaggagcagtttatcaccctggaatacttttgacaattgctgaaaatgcgtgctggcaggaagttttttaattaccaaaaccatcagatcatttgcttggttctttcagagtcagtgaaatatatgagtgagtaatggagtctgttcaagaaaaaattagctaagcattgaatctggcactgtccctgttgcagatggaaggccagatgttcaggagcagtcacgaatcatcaggttcatatatatagaagcacacacatatatgtatgttacatatatatgtatacatgagagttaaaataagaaaggaaagattttgtagttcataggagaacgtcatatttacagcaggttgaatttctggaaaaggcattttaattaaatggaagtggttttcttaagtttaatttggttttcctttggaagtagcattataatagagttgtatgcttaactgggggagagatatccgagtctttataaaattggttataaatgtaatatttaatcagctattagtgatagaaaagggcaataataggcaagcacttttcaaagattatacattttctcatttaatttctcacactattatcttcattttgcaaatggggaaacaagtttagagagattcagtaatctgaggaagatcataaggcaaggaagtgctagagcatggcttcattaaagggattagaaaatgctaacctttgagagtttcagggttagcagtagctagaacggtgaaaaaatattgaagctagagatggattataatggaaaagtagagatggtccacactttttctgtgttaagagaggtaatggaaagtagttgccagaggattgtatcagtgatttactgtgttgaatggtagtaaattgaggactgtctgtactgcagttgtgaaatatatgaagtcctgcaaaaagtagacttctcagaaaccttgcaagcagtttattacaaacctgaagatactcttactatataatctagcaatcacactccttggtatttacccaaatgaactgaaaacttacatccacacagaagcctgcacgtagctgggcatggtgctgtgggcctgcagtcccagctactcaggaggctgaggcagagggattgcttgagcccaggagtttgaggctgtagtaagctataaatgcctgtgaatatctactgtgctccagcctgggcaacatagcaagaccctgtctctaaaaaaacaaaaactgcctgtggatgtttataacagctttatccataattgtcaaaacttggaagcaaccaaaatgttcttcagaagaaaggaggttattttacaagaaggtgaataaatacaaaaaaattacatacaaaaaatttacagtaaatacacaaagttacaagaaggtgaataaataaataaaccatggtacacttagcactaaaaagaactgtgttatcaagccatgaaaagacatggaggaaacttaaaggcattttacaaagtgaaagaaaccaatcaggttgtatactatatgatttcaactatatgacattctggaaaaggaaaaactattgagacagtaatgatcagtggtttccaggggttaggaaagaaggagggaacttaggtagagcaaagaggatttttagggcagtaaaactcttctgtatcatatgacagtgatggatatacgtcattgtacacttttcaaaacccagagaaagtacactaccaagagtgaaccctaatgtgaactatggactttgggtgataatggtatgtcaatgtaggttcataatcaatgtattgattataacaaatgtaccaccgtagggtgggatgtcaatagttgggggtgggtttcatgtagggggtaggggagtatatgggaactctgtactttctgctcaattctgctgtgaaccccaaattgctcttaaaaaaaacaaaatttattaactaaaaagaaataaaaaaggaagcaaagaaagaaggaaagaagagaaagaaaccttgcaaaccagaagataataggtgacatatttaaatgggaaaatattctgtcaacccagaattctataaccagtggaaatgtctttcaaaaatgaaggagaaaaatggtaaattttatgttatatgtattttaccacagtaaaagaaaggagagatcaagatatataagaaaaagctggatgaaaagaatgcaaagagcaaacagtggcactgatacttcatagttaatgtgatgagaccaattttagaaattaaaaaattattcaaggaacataaccattaatgataatagaagacagcaataatatcacaatagtatctaacattttattgagtacatattatgggccgggcactaagctgaaatgctttatatctggcaatggcattggcaaacattttattttattttattttattttattttattttattttattttattttatttttatttagagagaagtctcactctgttgcccaggctggaatgcagtggtaccatcatatttcactgtggccttgaattcctgggctcaagggatccacccaccttagcctcccaagtagctgggactacaggcttgtgccaccatgcccggctaatttttaaattactggtagaggtgtctcactgtgttggtcaggctggtctccaactcctagcttcagagatcctcctgtcttggccaccacccaaagtgttgagattacaggcgtgagccactgtgcccagaggttttttgtttttttgttttttggtgttgttattgagacagagtttcactcttgttgcccaggctggagtgcaatggcgtgatctcggctcactacaaactctgcctccagagtttaagcaattctcctgcctcagcctcctgagtagttgggattccaggcatgcacccaccacgctcggctaattttgtatttttagtagagacggggtttctctatgttggtcaggctggtctcgaactccagacctcaggtgatccgcctgccttggcctcccaaagtgctgggattacaggcatgagccaccgcgcctggccttattttttttatttttatttttttaaagagatctcagagtctctggctttggactccggggctcaggtgatcctctgatccttccacctcagcctctccagtagctgtgactacaggtgtgcaccactgcacctggcaagggagactgttaaaaataaaagtccagacagtaagtattttcagtttagcagactatttacaatttcttttgtctattattcttttttaattttgttttgtttttataccttttaaaaatgtaagaaaccattcttagcttgagggctatacaaaaactgtatgagggctcagtttggtttagtctataatttgtttacccctggtctagactttaagcttttgacctcagtgcacatgactacttaacaaaatccaaaccaattgcacatccctgaaaagtctgtagaaaggaccaaaggcatatggaaattgagaattaattgtcatatttctgtggcttttgttgctgtaggagcaatgatataacaaaattaaagaagtaatttaaatcatctgtaattctaccaccctagcacaatagccaaatccaaattactttccaatcctggcctttatgcagcatattttaagaacagtaatttttaatgtattttcagcatgtaaaaataacttcagcatttctaattttaaaatctcattaacattttttatattttaatggaatgttaaaaaatttatcagttgaattccaatcatgcagcttcatgagagctgttgctttcccccctctaatcatataacctttgagcagcatttttcggctgataactacaaatcaagagagaatagatatccaaaagaggcagaagagatgtgtaataaagagcatatgaggactgagaaagataaaaagatgggagttgtgtggaatagaattgttaaagtggtacatttcctacccaaaagatcaatttttacttaaggtttcgttcagacttttgtccttctgtgtcgttcctgtttttggttttgttggtacagaattacttttagcttctttattatttttcctaagactggtgatgtttatactactttattaccactcttccttggctttgcctctctgtcctcagctattttctctagctatggttaaggttgtatcccccttcccttcctttatatcttttcatttgcctatcaaccttctcaaatatttcgtttgtgaatgaaaatacattttgtaatttgtgaaacaaacaacccacaataccattgtgctggggccctgggtggtccctgacaccctttcagagagtccttggagtcacagatattttcaaaaaatgctaagggttatttattaacttttcttttcttgaattgatgcatattttaaaaatttctcagtttaaacatctaaaatggtaaaaatataccatatatcatccacataaacaaagctcattgatgttctcagtcatttttagcagtgtaaaggggtcctgagaccaaaaagtttgagaatggctaatgtatttcatcagcaaactaaaaacatttattaagcagctttgtattttcagtcccagtactagttgtgtagaatcggtggcagaactttgcctcacagtttagaggtgaagacatacttctcaaaggataagtacagttggagtcagtaagtgcagagatcttacacaccacgggagtccagagggaagtatacttaacttgtgattatgttactggtgataggggaggggtcagtgagaggctggaaccacatttattaagccttcctagaggaggtgaccactgaaccaattattttaaaaatcagaatgaggcaggtgaaggatggttgtaggaggccttctagacgaagcagcaggagcaaagacagggaagcaaagagtgcaatatgtacaggcaaacacaagcaggcctctgttactgcatgcagggtgggtttaaagagtagtggcaatgaggctggagatatggcagggaacagttcttagagagtcagttttagccttttaggagtttagactctatccttaaagggaaaccccacatttatttatttatttatttttgagcacatatgtggtattagttcgtctttctatgcatgaagaatttggcttattaaaataattttaattattgggtatcagacccatttgtaaacagaaaaatacagttaagtgttttcttaggaaacagaatgtaaccgtactttttaaaacatcgtacagccatggattcaaccaactgtggatggaaaatgtttaggaaaaaaacaagaaaaaataataaaaaaccaatacagttaaacaaccatttacatacatttacattgtattaggtattataagtaacccagaaagataaagtatataggaggacgtgctagcttatatgcaaatactactctattttatataagggacttgaacatttggattgtggtatctgtgggggttcctggaaccagtccccaaggggcaactgtagtgagcttaataagaagaaattgtgtggtaaatactcaccatccatttagttctaatgggcagtagtaattatgggttttcttgtcgaagctaatgaaggtaaaaaataggtccatttttttaaagactaagttgagaactaatagagctaaaagcagtacaggcatgaaaggaaaaatgacaagctacaaataaatagtagtaaagtgaactctaaacctttaaattctcaactcagtataaatgacaaaacatgttaccaaatctgcatcatttttattgccaccatttaaatctaactgatggtttcctacaactagcacactaaaaaaaatgaagaacagaaatgtatttcccacagtctgggaagttcaagatcagtaagttagcgccttggtcactctgcttctaggatggcaccttgaatagcacaggtgttttaaagaaattttgccttccacacctttgaaataatttgagctgggcacagtggctcacacttgtaatctcagcactttgggaggctgaggcaggtgtattacttgagcccatgagttagacaccagcctaggcaacatggcaaaaccctgtttctacaaaaaatacaaaaattagctgggcgaggtgttgcgcgcttgtggtcccagctactcaagaggctgaggtgagaagatcacttgagcctgggacatcgaggctgcagtgagttgtaactgtgccactgcactccagcctgggtgagaccctgtctcaaaaaaaaaaaaaaaagaaaagaatttgagtgatataggctctttactaccatgtatggtactactatgaaagttttatcagcattattcatgatagccaaaaagtggaagtaacccaaatatctgtcagctgagaaatgaataaataaagtgtggtatatccatataatgcaatattgccaataaaaagaaatatatgttttctacatggatgagcctcgaaaacgttatgttaaatgaaagaaaccaatcgagaagactacatattgtatgattccagttacagtcatgtgtcattacttaacaacagggtatgttctgagaatagggtgattttgttgtgtgaacatcatagagtgtacacaaccctagatggcatagcctactatatatactacccaggttatgtggtatagcctattgctcttaggctacaaacctgtatagcatgttactgtactgaatactataggcagttgggacacaatggtaagtatttgggtatctaaacataaaaaagtacagtaaaacatcaaacatctttaacgtatgaaacattaaaaatggtacacctatatgggacacttaccatgaatagagcttgcaggactagaagttgctctggatgaatcagtgagtgagtggtgaatgaatatgaaggtctcagacattgatgtacactactatggatttaataaacactgtacacttaagctacactaaatttatgtaaaaatttttttcttcaataacaaattaagctcagcttactgtaacttcatgaacttttagaatatttatactttttgattcttttataataacacctagcttaaaatataaacacattgcacagttgtacaaaaacatttaaaaatattctataagcttttcgctatttaaaatttatttttactttttaaactttgttaaaaactaaggcaaacacacattaacctgggcgtacacaaggtcaggatcatcattatcactgtcttcaatctccatatcttgtcccactggaaggtcttcaggggaaataacacacatggttaatgataaaaagtatagtataataatacataaaacagtaatagtcattgctattatcaagtgttatttactgtacataattatatgtgctatgcttttatatgactggcattgcagtaggtttgtttacaccagcatcatcacaaacatatgagtaacgcattacattatgatggctatgacaccactaggcaataagaattttcagcttccttttagtcttatgggaccactgtcatatatgagatccattgttgaccaaaatgttgtatgagctgcataactgcataggcaaatccatggagacagaaagtagattaatggttttccaagactggggaagaaggaagttgggaaatggggaatgattgcttgctaatggatatgggaggatttctttttggggtgatgaaaatgttctaaagttgattatggcaaaggtcgcacaaccttatgtatgtaccaaaacccactgaattatacactttaaatagatgaattgtatggcatatgagttatccctctataaagctgtttgatctatctgtatttcaacagttagagtgataacttgaatattgaaaactttgaaaatacatgttgtgagggaaggtaaaacgccaaagactacattttaccagtatatgtctaatcaaaactattccataaaactccttcctaatttgaatagaatgattttttcctttgaaggtaaaaatcctctatatcttttaccattttattaatatttaattccttcttccttctttctggagaaactttggattctgacagagctccttctatactgacctgacaagttctcagagactggtactgttgcagctaatgagtcaagtggacactcatgctggctgtgttcccaagactattcttacattagggcaaatggcatgaggacaatgcatccaatgtatcaggcacaaagaggtttttcttcctaattgaccatgtgtgtcctcctttctttgaataataggaggaaaatctccctaccatgacttttggaattccttcctttccctctcctagtacccaaggttatgagtgtaggcaaggcttttgttccaaagctgtcatctccttttatcaatttccccttttcattccttttaggtctccaagcctcagagcagaaggctgtgactagtgagcctttctgatttgtttactcattcaggcacacacagtgaacagctgggagtccagccagttttgttatactgttgcttgtctaagtgattcccaagtgagtcagtgagaccttaggtccaactctgaccatccatttggttagtggtttgggtaggctgtggactgggaggctttttgaactcttacatggtagcttttgagcccttacccttttgttctgcaggcagaatgaaagtctgcttgggaactcctgaaaagcctcccatcttcaaacaaacactatatttaattccaagctaggacaatttctttctttccttttcctatggaagagtagtctgtttgtgagatcttcatttccataccctgatttctccacagccctgtttcaattagcttttatttccattgatttgtcagatccgtttaccagaagtacattcttagattgaggacctccttcatgccaaaaccttctgtcctcttttgacttaactttatgtgataatattcctgacaactccttccttctcagaactcaatctttccttgagtggaactcaactgatgcttgttggatttgactatatttttcacactgtagcatccaggcttacttcttacctttcagctgattcatctttgtttcttgcattgaactacacattcctcacattctctaatcagagtattctctgaaggttctacatgccagtgcatgatcaactgcatctggtttgtatttagaccttgtggtccaggggagtggatatgtccaagaggttaaaggtatgcaaagaatggataatggtgccaagtggactgcttctgccattgagtgtgatacggcagtcaccataagaataaattacatggctttcaactagtcaatagtccaaagcttttcaaccctgcaataccttaagccagagtttctagactttggtagcggtttaaaatagatttctggaacacctccaaatctgtgatttaaactgtcttaaagttgggcccaggaatctgtgtttttgaaaagcacccaggtgtttctgatagagttggttcaggcatcattctcagaggaaacaatgtcataaccacctttcctttagtaacaggctccatccctagagatttagaaagaactaagagtaatctgcaaaatatagtaaaagttgcctaggacctggaatgtatctacttgtgaagtaacaacagtactcatcatcttatgtttgttcatcctcaccttgggaacaagtacattcattgtcatttatagaaaagatccaaaagaagcaggcttaccagctttcatgataagtctattttcaccttcataggagtttcagaatcatctgtaagaggcctggaatccagaggcacccaagggaattagcaacaagaaatacatagtaagtaggttagttaatgaggctatggagttagtattgttttacagtgtttaagatactctactatgcctacattttgggaaagatgtgtatcttgtgacatttgtacttgatttggtttgatttcataccctgcctgctatccacaagcttgctttatattctttctgggggaaagcccctcagaatcatgtgaatagctgccaggccacaaagctgacttctccaccctggcatcacagagtgggaaagactagtttatttccttcttttcttttttcttttctgtttgtttgttgtttttttttttgagatggagtatcacttggttgcccaggctggagtgcagtggcgcgatctcggctcactgcaacctccgcctcctgagttcaagggattctcctgcgtcagcctcccgagtagctgggactacaggcgtgcaccatcacacccggctaatttttgtatttttagtagggacagggttttaccatgttggccaggatggtctcgatctcttgacctcgtgatccacctgcctcggcctcccaaagtgctgggattacaggcgtgagccactgtgcctggccccaagactagtttatttctagctgcaggaactagttcccttgtttaggccatttagtctaatgaataaaaagaattcagaaaaaccgggtttctttccatacagcaacttctttgggaggtaaagaaaaagaatcttagtctcagaagtcaagctatctgtggttcacatctgccttgggagatagcacctccttgcactgtgtctcattgatggttgtcactttctgttgttacaagagagcttgggtcccatgtgaggtcactaatattaataatgtagaagtggtttttagttcagaggagcagcttgtcaacagcttgtatttttaaatattgtactaggaggaagtatactgtattcatagggtatgtgcttctttattagtaatcttaatgcatttatgagcagtttgacatacactaattatttatagtgctgtggattccatttgctgctaggtgacaatgtggagagttgggatgcaaaactgtgattaagaagctattagttggcctggcacgatggctcatgcctgtaatcccagcacttcgggaggccaaggcgggtggatcacctgaggtcaggagctcaagaccagcctggacaacatggtgaaaccccctctctacttaaaaaaaaaaaaaatttagccgggtgtggtggcacatgcctgtagtcccagctacttgagaggctgagacaggagaatcacttgaacccgggaggtggaagctgcagtgagtcgagatcatgccaccacactccagcctgggcaagacaagaccgaaactccatcttaaaaaaaaaaaaaaaaaaaaagagaagaagaagctattagatacagtcaggatgactggatttcagcttttgtgtggctagactcagagtgtaggggggctttcagagtgcttgttaaatgctctgggttaaatcagaaagaaggaaagctagcaaaaattgcttaatcagaatagttcggttgaactcatacaagcttatctttttagatgttgtggaattctttgcaactctataattaattccagattgttcagatgtatttctagtgccagagatagtgttgtggctgcctccatagcaagcctaaaagtaccccagagctggcctctttatggtacttgcaagtagaggataaaagatgtatctttttgtatcttggatactggtggcccttggcaacaaacaatctccatctctcttgagggagtcaggatgccaagcaaattttgaggaacagataatagaataatgatatgaatcaaaataggggccaagaatcccaaattcacttcttccttccattctccagaacccatgattgcagtttccacatttttttttcagttttaacagtctcctttttcataatcatatgatgggaattcatgtgtgtcaaagagattacttggacattaccacctccaagagaggtcatggtagattgtcttactgttgaaaatgtggtccatggatcagcagaagcagcagcagcattacctgggagtttgttaggatttcataatctcaggccccactctagacctactgaatcagaatctgtattttaacaagatcctcaggtggtttgcatgcatgttaaagtttgaggagcattggtagagggaactgtggctatttattttattggtcatgtgcatactaatttcccgacctctcttgattattaaaatgactgtgaacttactagaactacaacatattgatgtgagggaggtgtttatatgtgaaggtgattggcttccatgcagaaaccatgtaacacccagcctgaacagtttctgatgaggttgcccttaacctaggaaactgaaagataatgttgtcgtgtttttgatatatgactgctgtcctgctcaactttataaacatgtccaggaggtggggagcagtttgctactcttcatttgcaaatcaattatctttatataagtagcaaatagtctattttaaaagctcaaaagataatttttaaatgagaatttgctttgcatgaagtgtgtagatgttggaaaaaggtgactttgtctaattattctaatatatgaagtttaaaggaattaagagaatgtaaaaaatggaggcagtaaaacgtagagtcttctttaagtcacaactgtgacagggtctcttcaagaggcatcagaagtgacaaatgaccattggtgaggaaatggtacatttgcagtttgggttcatagttttctaactctgtggataaagaaagactcaaggctctgacagaaactaagtcatagattgcttttctgcttatgtctctctctctcttttttttttttttttgagacagagtcttgctgtgtcgccaggctggagtgcagtggcatgatctcggctcactgcaacctctgcctcctgagttcaagtgattctcctgcctcagcctcccaagtagctgggactacaggcatgcaccaccacacccagctaatatttgtatttttagtagagatagggtttcaccatgttggttaggatggtctcgatctcttgacctcgtgatctgcccgccttggcctcccaaagtgctaggattacaggcgtgagccactgcacccggccttgtatcccttttagtagagagtatgcttcctgttcattgaagagtcaggtgacagagagtaacataatcattgaagcttggactttttatttagttttttgttgttgttgtttagtttttttttttttgttttgtcactctgaacttttgggagcatggcattactttctggctgctttaggcatttggctcttgctgatgcacataacacagggtcaggccaggttcatgctgctgcaggtcctttctcccagactttaagaagatgacattttacattaggatgcagtaaacatgtcattcaaaggccattctgcagctcctggagcacaaagacttgctgagtttgccatgattgcatgcaaatttttgaaaagtcaaatgcatgtataaaacagtttgtcaggctgctattggaggaaaacaagaacaagttgaaatcaattgtttgggaagaacattttggcatggtttctctgaagttgagtaaacataatttgtcctatgtacccatctgggcacacagtagcagtccttctgcccacggaaggagtttgcacacattagacaaattactagtctgaatctccaagacacagatagacggttctgtgtgtgtatatatttgtgtttatacactgtaacatattattctatatacagtgttaaaggcagagccctccccgaggtacactgctttcttcagagcttccctatagtctgctctggtagcacctcctacttcttttaaggttagtacaggagcccctcttcttgtctggttgacctggacactttcatagccatgtcattctaagggttcaggtctgacccagataagccctaaggcccagactgcttgtctgaagtctcccaagagcacagttttgcagaggcaaagtgaggctttgctaaaggcacttcagaatttttctacaaagcttgctgttcctacaggtgagggtagctgtttttttctccccttaggtttactttactctcactcatcaactctggcaaagtggatttaaccatcagatgtattctttatttcagagaacaaagtggttttgttggacttcttgttctctcactagcttttgtgaaggaaaaaaatcctgcatgttccatactaaaatgatagcattataattttgcatcattacattatttaactgttatcagtaaatctatgaataaactcttcgagacatccattctctacttgtgtttgttgattcattatcatgctttttgtactttccaaagcagaccccacattttttgtatgaagcatcaataagggtgagatatggcaagggtcactcaccatcatccctgcttatcactgtctcctttcttgctcctgacatttttcagtgagtagtacccctgtgtgacagctggaatacagagtggtgactgcacattgaccttaagaacacatttgtggttgtgaaatgggctgggtcaaggactgccctcctgcaaattcccttctacaaaatttattttaaagatacacactactaggctgggtgtggtgacctcacttacaaagtgctgtaatcccagcactttgggaagctgaggcgggtggatcgcttgaggtcaggagtaaaagaccagcctggccaacacggtgaaacctcgtctctattaaaaatacaaaaattagctgagtgtggtggctcatgcctatagttccagctacccaggaggctgaggtaggagaattacttgaacccaggaggcggaggttgcagtgaaccaagatcacaccattgtactccagcctgggcaacagagcaagactctgtctaaaaaaaaaaaaaaaaaagatacaccgtactagattgatccttcagtaatacactgtagcatttgttttaggttgttaaatgagtgggcttatgctactacgattgctttagtgtttatatagcataagtgtggcatttgtgattaaatggatcaccctgagttggaatgatggacataatttaatttactctttttttttttttttttttttttgagatggagtttctctcatgttgcttaggctggagtgcaatggcgtgatattggctcaccacaacctctgcctcctgggttcaagcgattctcctgcctcagcctcccgaatatcttggattacaggcatgcaccaccacgcccagctaattttgtatttttaggagagatggggtttctccatgttggtcaagctggtctcaatctcccgacctcaagtgatccacccacctcagcctcccaaagtattgggattataggcgtgagccgccgcacccggccagtttactcttatgtagtaagagtaggtcagccttcctggagtctgttaaggatggaagtgggctttcaaggccaggccatatccagtcaggcatgcctttgagtgcagcatacagttggaaggactagggcaagaatggggagaaggtataggagcagttcctttatcttagtgggtttccagttggccatgccaggagggaataaagtaactgaactctggaaaagctacagaatcctgctgcagggggtacatttgaggagaagccagaacattaaatgaaggtaagaaaatgcaagaaagaagaagcagcacaggtgaatcagagctccttcagcaacatctgacaggggctctcttttgggcatgaagctcagggttcatttttaaagtcatgctaaacagaaactgtgaattcaagccaggcgtgttggctcacacctgtaatcccattactttgggaggccaaggtgggaggattgctgtaacccaggagtttgagaccaccctgggtaacatagtgagactctaactctacaaaaaatttttaaaaattagccaagtgtcgtggtgcatgtctgtggtcccagctactcgggaaactgaggcaggaggctctcttgagcccaggagattgagggtgcagtgaaccacagttgtaccactgcactgcagcctgggcaacagagcaagaccctgactcaaaaaaaaaaaaaagaaagaaattgtgaatcccctggaggtgcttgttagatgaatggagtccaagtcctgtctcatagagattctgatcaggtctcagatggactcgtggaatctgtatgttttcaaatgctctagatgagtcttatgcttgggtaattttgagaaatactctgctgctagattatattaatcctgttgggtgggactctatgtcggctggctccctaggggtccagtgagtaatgcatcgtgaatcactggatcatggtcatgttatatccatggatataataattttgtcaaagctttctagagaggccatttcaatgtgtccctcaatgaattttcctaaaactatctatcagcacaattgaaatttgtggatgaacttggtctgattaaagagatgaaaaatggcttttgaactaattgcccctttatctcccaaagtgtctttcagaatattgatattcatatatcagtagctcagagtgaatattagctgcaaaataaaacaggaatcataggctttgggtttacattatgacacaaaacttttaagtgtgtgacctaaaataatttgtgctacaatcaaaagaaaatgttaaataaaatggaaaataaaactcttagatttctgtacactggtgatgaataacttgagcatggtaggagcttgataaatactagaggaattccaacacactgtttagtgggagtttggtggctcaataaaacgtttatgtcctagttaggactaatgggttgtaggtgtctgagaagaactcgagctagccttagcagaaagaggggtttattataaggatgtagaggttgccagacctaagaatgggagcagctgggcctcagagagagactggaattaggggacaaatggaaagccagcccggacctaggaggtgcccatgctccctctccctctgcttttgtttgcatatctgcctcttatctatatacagacaagatttctttgttccacagtctacttggtagaaaaatcaccaagctgcagtacctgagtaactcatgaagacactgccttgatttgttgtcatgatttcaattccaaactctcaggagaagaaatctgactggcctggcttgagtcagtttgtatcctgggttcatggtaagcacatatgccagagtccatatgtttctggagatatggaatgcaatgtggaggtatggtctttgagaaagagggttcttgcaagctgattcattcaccccaaaaatgcaagtattatgatatataatggtgaagacttttattattttttttttcagtggggctgggttgtattgctccattaagatattaggggccgggcgtggtggatcacgcctgtaatcccagcactttgggaggccgagacaggcggatcacaacattaggagatcgagaccatcctggctaacatggtgaaaccccgtctctactaaaaatacaaaaaattagccgggcatggtggagggcacctgtagtcccagctactctggaggctgaggcaggagaatggcgtgaacccgggagatggagcttgcagtgagctgagacggcgccactgcactccagcctgggcgacagagcgagactccgtctcaaaaaaaaaaaaaaaagatagcatggttgcagtgttttgtcaaccaagtattgtctctcatccatgcttttgcataatctaatggatgtagtcatttctacccttcttcacctgactagcctcattcaagttcaagtttcagattaaataactcttcaggagaagtgctcatcagccagtcttccttgttgcttcatgcccttccctttccctacccctgataagatcaagttgttttttttttgtcctgaaggaaggaatggaagagagtttagaaaatatgtacattcctaaaaatactccctatctaatgtatacaagtttctgtgctaatttttataagtaataaaaagggagtaatggctgggtgcggtggctcacgcccataataccagcgctttgggaggttgaggtgggtggatcacgaggttaagagatcgagaccatcctgaccaacatggtgaaaccccgtctctactaaaaatacaaaaattagctgggtgtggtggtgcgcgcctatagtcctagctactcgggaagctgaggcaggagaatcacttgaacccgggaggcagaggttgtggtgagccgagattgtgccactgcactccagcctggcgacagagtgagactccatctcaaaaaaaaaaaaaaaaaaaaaaaggcagaggatagaacaaatatacaattactataatgcaaagtaagataaaagtttccgaggacagtatagggagagaaacattaggatgtggggtcagcgaaagactttatgaaggacatttcactttagacaggccttgaaatttagattaagtttctagaaggtgatgtgggtagaggtgggagaggattctgggtgcagaagtcagaaaaaaatagcatggttgtagcaaaattctagatgagcaaaacccatttcactagaacagagggcaagggtgcagtaggagataaatctggaaaggatcacttagctcatatcctatgatgaacacagtgaggaaattacacttaattccattggcagtgggttgatgaattttgcacagagtatatcattagaatgtaagcttcatgagataaaatgacaacaacaactgtgtgtctttttctctgactctttagagtctagcacagtgtctggcatagagagtgtgtgcttaagaaatatttgtgacttcgtgaatcacagctgtatcttagcaacgttaatttggcagcaccaaatagaatgagttataggggaagactgggagctgtgagaccaatttggaggtgaatatggtagcttggctgagaattaatgaagacctttgagctgagctagaacagaaaggatggaggctgactggtagaacattgtggaagtggaatctgaaggactagacatacaggagaggcagagaccctttcaatcaagggactagattcccaaaacagagggactagattcccaaaagagagtgacgaccaaaagaaagaaacctacacgttactgttttatgagagaaaaatatgaagcagttattccccttgctttttaaattaaaaatcgggagcattaaacttaaatacttcaaagtctgcttctcttgcatcccatgtcgtcatacagtgaggtgctctgtttatatttcatgtaggatgtcaggcctcacctctatcctaaattcatacataggcactatgtatttttccttcctctcttgactgaggggaagcagggagagaggagagtagaggctcaggcagcacacaattctagagaaaaagcaaatcctgtcagttaaaaaaaaaattcccatggatggaagaaaattaagataagagttagcactggcctagagtttcttttctcaataaaaaaaagtttgtggaaaaaagatgagtatttaatgaaccagacaccatatatataagggtatttcttatatacctccttctggaacttagcactataagattcattcagttactgattcccatttttcccatcacaaaatcttgttcacattaatgtgctgtgatttatcttcttccaaagtctcttgtgcttagaaaagagaagctaaaattagttaggaaagcattcattaaggactggatcatgggcattccactaagcactggtgataaggagacttataagttatgttttatgttcttaaggaatttattaacctggttgaagaaacaggatatatatgtgtgtgtgtgtgcatgtgcgtgtgtgtgtgcatatatatctatatatatcaggctatatatgtaaaatgtaaataatatcataaacatatgccaagtgctaaataagcttgatttcataatgcttgtttcacaaacaggttaaaaaccaccagtcaggtatactgtaacacttaggtggatttaacattttcttctcctgaagaaaaatacttaagtatttcctaaagatttcattgagagagaaaattgtgtttgacaaattaaatagaataccattattaatagcttacagttgctataaattgatctcaaatgcttggtacttgaataatggaacaggttctgtgatttatagtgtaacttcattaacaggtgtttccatagttacagtgctctttgtgcagggtccccaagctggttgtgttaggttgtcttgaattgcccattttctcagattgggtatttgcaggctttagtaatggaaagaatttagttgtcatggtaaggattcatagtagtcttttaaaaaaattcaaaacatgggacatagagtgattaaaatacagcactttctttggaaataagtactataagacttaatttaaacatgcacattgtcagaagaaaattgcagttattcgcccaggcacagtggctcacgcctataatcccagcactttgggagggtgaggcgggcggatcacctgaggtcagcagtttgagaccagcctggccaatacagtaaaaccccatctctactaaaaatataaaaattagccaggcatggtggtgggcacctgtaatcccagctactcgaaaggctgaggtgggagaattactggaatccagaaggtagaggttgtagtgagccgagatcacgccattgctcttctccagcccagacaagagtgaaagtatctcaaaaaaaaaaaaaaagtagttattcatctctttggtaatttagacagggcttccataacattttatctttaattttaaaatattgagctagctattgtggctaaatcttgtatattctgaaatatagttacaaatcaattgggacatctaaagagagcagtactcactagggattttatttacatcatctcagtaattttatgggcaagcattctgaggatctaggagattaaataacttgcttatgaccttgcagcttataaatgggatctaaaattgtaccctggtgtgtctaacattcacctataccacagattttcagattcttggcctcaacttcaggatagacaagtttaaaatgggaattcaagtaggagctccctaaacatagattaagttcaagtgaagtgagggacggaggtgagcatgcatgcacgtgtgtgtgcatgcagggtgtacactgctgagagatactgtgatggaggcctttgctgtgttctttctttatgataaagagtgagagaggtggaagacaaagtttcattaggcccttaggcctaatcagccactttctctttgttcctgctttataataggcacttctgatgtcttgacttacctggctacatgcactacagacatctttcactgaaattctgttttttatgtcccagttcctttgcttctgcttgctctgactgcagaaaaccacccaaataaaatgccttctattaggaagtgaccaactttttttttgacgtaggatctggctctgttgcccaggctggattgtagtggcatgactttggctcactgcaagctatgcatcctgggctcaagtcatcctcccacctcagcctcccaaatacctgggactacaggtgcatgccaccatgcccggccaatttttgtattttttgtagagacagggttttgccatgctatccaggctggtctccaactcttgagctcaagtgattctcccatgtggactcccaaagtgctgggattacaggcggggaccaccatacccagccctgaaaaactttttaaaggacaagcagacatgcctgtttatctcctggaaactctggtactgacaaggagtggtcagttccacattacacatatacttaaaaccatcgttaatagttttatgtggtgtttattttcttgttctatatataaaaatggactcacaaagatttaaaagcatgtctgaggttataaagtacattcatgctgtagagtgggaaaagggagggcaaacaaatgtgagaaacatggatagatctggagacacagagtcaccatctttctgtcccctcctgtgctgataaattctttctattatatcagtctgctggccaacttttattttctcttgaaacctgagtttttaatgtaagtctgtaaaatagagaataaatatgaaagtttatcagcaatattaagaatccatttatattatacattaaggagttccttgaagaataagccactttgactgggtcaggagaaaaccactactgagtgaaagagcttaacagtttaggggcttagggtcttacggctttgtagtcagactgaacagggttcagatcccatctctgacatcactggctgtgtgcctttgggcgagctagttaacctttctaaatctcagcttcctcctttgtaaaatgaagatactagtagtttttgtctcccagagttattgtgacaattaaaggagagcacatatataaagtacatcatagtgcctggcatatggtatggaatgaataactgatagcctccagtattgttttctctcctcttaacttcagtcctgagtacctctctgtacacccaaggttttgggggaaggaagaagagaaaacatgaggagggataacctgaaacagttgatagctgtcagaggtgcacacatggaatcaaaacatgtggaacaagaatcagggcatcatttctcttttctaagtcctgatattacttaaataaatataattatcgtggagtggtcttaaagttgttggatttttaccatatatttatgattctgtttatattaaatgttcagaataggcaaatctatagagacacaaagtagattaggggttgcttagagctggtggggagagagttaatggaaagtgaggagtgactgctaatgggcacatggtttctttcgggaatggtgaaaatgctctaaaactgattgtgatgatggttgcataactgtgaatacactaaaaaccattgaattttatatgttaaatgagtgggattgtgaattatatctcaataaaaatgtttaaaattgggggagtttttgcctatctcaactagaatgtaactttcttggagaacaggacctatatctttcctctctaaacactcagcctagcataaaaactagcacatggtagatgttcacgaaatgctgaataatgaatgactccttgagtaagtccaggacagaattctcagacaatgtgactcaccatacaggaattacttcagctagagtagttttacttcaactcagtgtaactattgggctttcaattttgattttatttgcattccccaaagagtttgaacattgctgggctggaacaccaaattttattcctaaatgcaatttactccttcttcaatgcctgggatgatgatgatgatgatgatgatgatgatgatgatgatgatgatgatgatagcagctgatatttactgagcactttctatgcttcaggcactattctaagcatttaaaataaatgaataaatatgtgtatgtatatctcatttaatccttacaacaattttgggatgggttctattattattctcatgtttcaggtaaggacattgaggaaaagtaacttgcacaggttcaggcaggtagtatgtggtggagccaaagttcaatattgcaggaaaacctatactttaaactactgcactagaatgtgccgtaatgttttggttcatatatttcaaaggaacctgccttgactactttctcctctgaattcattgcatatgttgactgcattactcttaagtttatatgttattacgtgttataatgtagggctctttgtgagttctacttactctattttaaaacttgggcgggcgcggttgctcatgcctgtaatcccaacatttagggaggctgtggcggggtggattacctgaagtcaagagtttgaggccagcctggccaacatgctgaaaccccatctttactaaaaaatacaaaagttagccaggtgtgttaccacacacctgtaatcccagctacttggaaggctgaggcatgagaattgcttgaacctgggagacgaaagttgcagtgagccaagattgcaccatgcactctagcctgggtgatagaatgaacaaacaaaaaaacactggtaagggcagagactacctctttatctgtttctaacagataaagccattgttgtcctgtgttgcccttatattatcaagaccatgaatgatgatgatttttacagtgaatggaaatcctttccatagtactgctttattttaaggtcagtatcccttttataatacaaatgtttcataaaagccatgattattactttttaatgacagactaatctttgtccctcacccctatcagtcctactctttaaatatctccatccatggaagtactctatcagtaggccaatattcaccttttaaaaattgtggtaaatacacataatataaaatttaccaatgtaaccatttttagtgtatcattcagtggcattaagtacatttacagtgttatgtaacctcatcactcactagttccagaatactttcatcaccccaaaaggaaacccacttagcagtcactcctatttctctcctacctgcagcccctggcaaccactaatctgctttctgtctctgtagatttgcctattctggatactttacataaatagaattatctaatatgtggcctttggcatctttcacttaacatactacattttcaaggttcatccatgttgtatcaagtattaatactttattcctttttacaactgaataatatttcattgcatgaatataccacattttgtttatccattcatctgttgatggatgtttgggttgtttccatcttttgggtgttatgaatagagctgctataaacattcatatgtaagtatttgaacacctgcttttaattcctttgagtgtattcctagaagtggaattgctatgtcatatggtagttctatgtttagtttattgaggaaactctaatatcccttgtataattttatagatattgtataacacatatggatattattgcttgtatcattattaaacacctctgtttctctcattcctgcagtcttcaggccctcttggttctaccttttaaaattatctcctgaatatgacaggagataataaaaaagcttccatttccattcaaaccatcagactcttagtatattttacctaaccagttgctaagtgatttgggcaaattatttaatgtcttcaagtctccatttcattattgataagatagaggataatgtatatatggggttgtcataattgagataatacatataaagctcttagccttctgattgcataatagggctcaataaatgtttgtgattattaataatcttttaacttgtctctcttcctcaggtttggttacctcaaaattcattagccatactgctggtagagtaatttttctaaaatgcaaaattaaccattgcttccctattttatattttcttacaactctctatgcctataagataatgcccagacttggtttgagatacccctctttggcttctcttgccctatgtggctccttatcaagaccagtattggcatcctaaccacccacagggctgccatagtatcaggtcatttgctttctcttctgttttcttacttaatttttctactttgacctatgagtcgttgccttatcttcttgaaaacttagctatgtatttttaaaaaatgtttgctatattttattctgaagtttctttgagttttgttggcagaggctttttaggttatctggtctaccctattgacagaaataagtcttttttatatttcttgtctaatctcctgtctttccactttgcttctcaaataggagttagggctagaagtgagttcagtgtatctttatattcctaggctctagaacatagtgcttatataatatctatttaatgaatattctccaaaccacattgtttatttggaatacctgttcaccttttaaaattcacaacaaactgattgttgcaattgccaaataagaatctatataaatgacagctgctgagtgaagtttgtacgtaggggaacatttcctggtagccatattagatttccataggtaaatctcttggtgctcagatcacagtcatttgtgtgtaatgatatctggatgtggtttataccacacccccagattgcttccccagattgtatatcaaagtcacgatcttttggcagaattataattgcccatggggaatggtggcctctgagtttcatagctcagggatgtattgttggagctgctgtcagtttttcactagagatataacaattgaagtgtcttacatttctatagttctttttaaaaaacaaatttgagatacaacacataccatttaaagtgtacaatttaaatttaaagtgtacaattcaatggaataaaagctaaaggattattagcctggagaagagagaaaacttataagaatgtgacagcttcctccagtattagaaggtctatcatgtggataatatacaaaaaaggtttaagtctgtgctgtgttgccccagagggaagaaccaggaagttgcaaggagatagatttatatcaacatttatatctgaattcatatcagaagaatttctaacagttggcattagttgaaaataaagtgggctgcctcgggagttcataaaactctccaacaataatagtatccaaacaggagcaagatgactggtagtggggaattctgtaatggtgattcaggcatcccatgggttgtattaggtgatttctgcggtctctttctaccatgagagattgattctttgaaggctagagaaaacaaagggagaagaagtttacagcttgcaaaacagggggtatgtataatgtaaagataggtgtgttatcatcttcttgaaatttggtagtcaaaacataaaatttgagattagccgcctcattatataggtgggacattcagatacagaggttattaaacattgcccaaggtcaaatagccagtcagtggcagagttggaactagattccctattgttttaagacaaataatggaattattcattttaataattaagataaaaataatttactggatggaaaaactgacaggtccaagactaggttatgaccacatccttaatgtattattaatgaaaggtaggtatgttcaggatacctttcaagccttttgaggataagatcaaacagtacaaatgacaagctttactacaaaacttaccctggtgctgctgacagaaagaagatattgaactgaatgaaccactgatttaacacacaatggcttttaaactgtgtatgtctttatgtcttttctctgtttgcttttatcattgtttttgaatgttttattatttccatagtttgatcccatgtgtcccgttttattccaagtccacttttatctcagcgtcttgaatggttaacacaaacaacaaatgcattaaacagcaaggcattgtaacttctaacatcaataacagtaaaagcagtaagacattcaagaacaatgaaataaaagcagtgggggaaaaaatcctgggttcagttgaagctcggctaggtgtatatcagccagtagtgaagcttgagcaggatcacagaggttagaaacaattgttccagactatgaatggacagcaattctgtcctccaaatttaaacacatagcattaaaatattacaattagtaaccatgcaagactggcatgagaaaatgaaatctaatcttgatccttgttttaaatattttaagaggagtttatcaaataaattttcttgctttagtggatgcatttagaagaaatgggaccatatagatttgtcctgtgagattacatgtcttcatcttcttcctagcataccaaagagagtaggatatttgcatatttccagttctcttttcactttctaaaaatcacatgaaatatcctgtgatatttatatatgaccactgaggtccaaaggtaaaagaagggcattttaatctgtcttttaaggcatataatcagaaagtgtttgagaagcttgtcatgaattatgagcactttcagtgaatcacgtacagagtattttcagcacaaaatcctgtgaaatttaggttcataattgcatcacactcctttggtaccattgttggagtcagaattcacttgggaaaacactgacttaattggcaaactttatctcttcttccttcagtacacctgcaaagtgcttatcataataggaattatgcttgttccaaggagaagctatccttgtgaattagccaattagctagtgtttcatatcttatctttcattcccaagcctgtgatttttttcctctaagtaccaacatttatttgtgagcttgcaaattgaaatgtatgtattcctttccttgacatctcatcactgtgtaatatgaccttcagctatgcttttaggaaatgattatgtatgtctgagttaaaaaaatatcttcagactgtttgtggaaactgattttttaaaacaaattttaaaggaacttcctgtctcatagaatttcttggcatataaaacaagggagtcttcaatagaaatgaaagaatactgaatgcaatttgtacaaaacagcatatttggctgtcaattatggacaaaatcaccagaaatcaaacacctggtctctccagggaggaggactgattgtcacatagcaagaatactggctgacctagcatagttcaatatatggggtggagagtatctcaccaccagaaaagtcatttgagaatacatttaaaaatatattagtttggttttgccagtgcagacttattctcgattagcagatagagtgtttttgaaggagatttgctgcaacctttaaactcaacttttcccctctgtgttccgatatgagctagtggcgtatggggacccttacctttgttttgtagagttaatgtgagcaagaaagaatttgtgtgaaattttgaacagtcataagaattttggtatttataaaaataaaaaattcaatttatttttgaaaataaattgttctactgtccctaaagtaccaagaaaatgaaagaatttttgggaaaagcaggtctcagaataatttcacagccaattgccatttcttggatcatgaaaggccttaggatattggtgttgacgttttgggttcacttttcttcttcattgtcctctgaggctgtctatatgtagcagatggaccagattgtggcacagctgacctgttaattttcactatttccattattagaaactttcactggttatgtcgcaatttacattagccacaaaaatggccaaaatgggtagatttttaaattaccttgtaagctattcatttatggccccaaaatgcagacaaaatgtcagttcagaattttatttgaggaggatataaatcagtttgaacaataattttaaatacatattaataattctttttattaatcctctgagttccaaagcacagagaaagaatcccataggatctcagtaaacgtgaaatataagtaaacgactggaccatagttcatttttgtgtgtgaaagaatataacttgtgtcttcctggtgtttattatttctggcttgttactggattccacctaaaagtttctgtttcctgaaatagttgatcccagatctctttatgaatcacaatgccgatttgcttttctttctgtatgtgtaacagagaactttgtggtaacacatagactttcccaagttcatagttgaggattttaagcagtcagtaaagacagaaaattaaaggagagaaaatccagaacaagctgttcaaaactaatcagtaggaaattatgtaaacttaattaactagggcatcaagggaagggctatggagtgtaatgaattttttttagaaatgaggcaaagcagccaaactaaaatagggttagttgaagtgttcccaaaagggaaggagggaatatccttcctgcataaggagccttccttgacctcctgccttatttttggctgtgaatctctatgccatgatcctcagtggggtaggtatgcaaggagagtatggtgccaaatgaacaacaacaaaaaaaatctcatttgtattatttattgaatgatgctcatatagtaaaatggagactgaaatataggcattatggcctagtcgcaaacctctgaccttccatttgcaaatgaaccaaaatgattagccaagatttagaggaaattcataaatttcacatctaggtagaccagctggagaaagacttgagggttctctgtctaggactcaattcagttcaatttttaaaaaatttattgaagacctacctgttctgttaaaaatgatgtgctaatgctgcatggaacaaatagctgagtgaggtgtttcattgccttttaagagtgtataatctattatggagaaagagacaagtatacaaacaataagcataccagaaagtggtacaaaataatactcctatgtctgaagactcctaaacgtcttttcctagtctcattttctcttgtaagccccagatctgagtagtcaactgccttttggacctctcccatcaacttttgagtagagaaatgtaaactttccatttctgattacttcaaaggtagatttagaaatgtagatacacatacaaaaatggagtgttttctcaaagctatcatttatttgggttgcaaatgtagaattcaggtgttttaggcacacacgagaactgatcattgttatatatacgtacataatcccatatacctacaaaccctttatgacaaggacagattgtaaaacacagtactgtcaaattttggaagacaaagaatgcatatatgaactcttaatttaaaattgggtttggaaattcaaacaaaattaaaggagataaaaagttttattttcttattcctttatagcctcagtcacatgcttcactttttttagttgtggtaaaatatatatataacataagcattttaaccatttttaggtataaagtacagtggcattaacaacattcacattgttgtgctaacatcactgccattcatccccagcacttttaaatcttcccaaactgaaactctgtatccattaaatagtagctccccattctattttctgtctctgtgaatttattctagatacctcatataagtgtaatcatacaatattcgtccttttgtgtctggcttattccaccaagaatagtgttgtcaaggtccatccatcttgtagcatgagttagaattgccttcctttttaagactgaataatattccatttcctttcaaggctgagcaatattccattttgtgtatataccacattttgtttatccatcagtcaatggacatttggattgtttccactatttgcctattgtgaataatactgctatgaacatgggtgtacaaatatccattgaagtccctgctttcagttcttttgggtatatacccagaagtgcaattgctagatcatatgggtatagttatcatatgggtatacttacccagatgggttttgttttattgtttaagagacaagttcaatgttgcccaggctggccttgaactccttggctccaatggatcatcttgcttcagccttccacttagttgggactacaggccaggtagaccagcacccagctcaattgctggatcatatgatacttttatgtttacttttttgaggagccactatactattttccacagtggctgcaccattttacattcccacgaggaaagtgcaggcattctaatttctccatatccttgacaacatttgttaccttgttttgggtttttttttgataatagtcatccaaataggtgtgaagtggtatctcactgtaattttgatttgcattttcctaatggattagtgattttgaatatcttttcgtgtgcttattggccatctgtttatctttgatggagaaatatctattcaagtcctttacctattttttaattgggatgttttttgttattgggttataggagttctctatatatctgaatgtcaattgcttattagatatgtgatttgcaaatattttctcccattctgtggcttgccttttactctgttgattatgtcctttggcagactttgatagtgccctttgttaattttgatgaagtccaatttatctgtttttgctttggtggtctaagaaatttccaaatctaatggcatgaaattttttccctatgttttcttctaagagttttatagtttgggctcctatatgtagatctttgatgcactttgaattaatttttgtatattgtataacataaggatccaagtttattcttttgcatgtggatatcccaaagccatttgttgaaaagacttcctttacccattaaatggtcttggcattcttgttgaaaaataatttggccattggcttatttctcatagcataatgttttatttctgggctctattttattcctttggtctatatgtctgttcttatgcagtacagtaccacactgttttgattatggtagctttctagtaagttttgaaatcaggaaatgtgagacatcaatttgcttttcttttataagattgttttgactctgggattcttgagattctatgtgaattataggacagtaacatacttttacttgtggtctttgaagtattttataggaagtcctctatgacatttttatataaaaactccttttgaagtaatcctctctagttcatctaagtttaggataaatggcagggtctgataatttaagccagtatagggctacatggtattatttaaacccttagggggaataaaagattacaggataaagaatttgaaaagatattttctttgtagagaaaaagaaggaaaccacatttgaaaaaacagttatcatgccttttgaattttttaaaagtttgattggaaagcattcagctattcagcatttgcctttagcaaaggttttagattgactcccctcccacccattctcaataatcttattttttgctttgtaaatgaataagctttggggattttattctgcaatgtataagatatgtatgtaatatagacataaaaaatatacatagtttaaccactttaacaagctgtaaaaatccaaatcttcaggggctaccttttgttatttaaggatgtataaatcatgagagcttttagataagtccttctcatcttcatgagcttcatgtaatctagcacagttactttccatagcagatgtttgataattgttttttagtgaaattttaataagaattttatgtctgttttttcttgttcaataataggtagtatttgaaggaacttttctggcttagttacttcatacatccagtcacttcgtttcctcccctatctgtttgaaggaaaggtgcttactaaatttgttagtgatcacatttttttgaattttctggattcactcatttttattaaaaggtaaaaagttagtattttcccatcaatatttgtatttatttgaattatcaaatttcttttgctttgaacttaagcatgctgcagtcattgttgtcttcttttttaatcttgcagttatttatcatttctttttgtaatctcttacagttttggtttagttttttgacaatgcagttgaatatattctccatgtgtttaagaacattttaaataagtgcccatttctttgtaatgatttttctcagaaacaaacaaatcctcaagctactctagtaatattcctactccagagtagtacaccatagctcttgagaagaaaaggaaaaataatagtttctgtgtgttttaagtggaaagtagtttctttgatttacatgaacattaaggcatgataggtaatgacaatttattcctaaaatgtattcagttacccattgacatggatatgtcataacctgttatgcttgacttatagatttccccagggaaaatgttccaagagagtgagcaaaagaaatgttttctggggaaagtatcaaggcgagagtgttgttatttcagacatcacaacatttccctatagcagtctatatccaagaataaatctgtgctagccaagcagatgaatctggcatttctgagaatacatgtgatggttgaattgagatttttggtaacaactgtgggtcactctaagatacccatttctggacatctcagactgagagatgactataagaggtatcattttaagtctggagaccagaaagcctctatacttgttcatagagctttttttttttcttttcttttttattattataatttaagttttagggtacatgtgcacattgtgcaggttagttacatatgtatacatgtgccatgctggtgcactgcacccactaactcatcatctagcattaggtatatctcccaatgctatccctcccccctccccccaccccacaacagtccccagagtgtgatgttccccttcctgtgtccatgtgatctcatagttcaattcccacctatgagtgagaatatgcagtatatggttttttgttcttgcgatagtttactgagaatgatgatttccaatttcatccatgtccctacaaaggacatgaactcatcattttttatggctgcatagtattccatggtgtatatgtgccacattttcttaatccagtctatcattgttggacatttgggttggttccaagtctttgctattgtgaataatgccacaataaacatacgtgtgcatgtgtctttatagcagcatgatttatagtcctttgggtatgtacccagtaatgggatggctgggtcaaatggtatttctagttctagatccctgaggaattgccacactgacttccacaatggttgaactagtttacagtcccaccaacagtgtaaaagtgttactatttctccacatcctctccagcacctgttgtttcctgactttttaatgggagaaaattttcgcaacctactcatctgacaaagggctaatatccagaatctacaatgaactcaaacaaatttacaagaaaaaaacaaacaaccccatcaaaaagtgggcgaaggacacgaacagacacttctcaaaagaagacatttatgcagccaaaaaacacatgaaaaaatgctcatcatcactggccatcagagaaatgcaaatcaaaaccacaatgagataccatctcacaccagttagaatggcaatcatagagcttttcatttatctgagtgttttcctctgcttgtcgggacttgtgctttcacgagctcctgctctcatatcaggggagtgaataattgaatttggatagttttttggtttttagttggaacactccttttcctgtggaacgtctatagaaaaaatgagtcaaacagagaatatgcaggggaggcaactctgaatgcttccatggctacatacatacctgttttctttgatttgctaaaccctaagttaaaaggaaagtactgtctaaaatagggagaaattccctatatttataccatcatttgagtatttacaatggagtgttttgtattataaatgtcaaaaaggttgagacaggactcacttaaattaagaggggaaacttttttttaatgatggaaataggggcttaataaacttacatctccttaactcctttaatatttgtaataaactatgactgttcaagagttgagcagtctcttgtttgaagaaatttattcattttccttcaaaattggcaccactttagaatttccagttgagatctatttggctaagacctcatttcccatccaattcattaaaattgttgatgttcaagccagggagaggatattttctgggtctacttatgatggctctgtatcaaaccagccatgtttagaaaccctccaaggcctatgtgattttttaaaaagaaatttattatgtggaatgaagaagcaaacatgttctattttatactattcagagccaagtaatcagccatttccctcaggagtcacttgtgctaagagctggcctggaccgggaaaggcactgtaatggctgctcatcacccagagctgcccaagcactagcttcaccttatagctcagagggaccccaatggtcttttccttagtgcttaggttattagtactagacctctgaaatgcagacctaagaaatgcctggtgatggcactaaagctgacgtcactatgaaaagcaggcaggaggtattgtaccccttgtgaggaagtttaaaagtttcttatagcaactaacttctccattaacaaataaatagaccttccatagcagctagaaggtacctcatcccctttattgaactgtggccatggacttctcaatgatatccctgtaaccctaagacctagtgaaaaacctggtacaggaaaaagtatacagtaaatattagatgaagaataggcaggagaatcacttgaacccggggggtgaggtgcggaggttgcagtgagccaagatggtgccactgcactccagcctgggcgacagagcaaaactctgtctcaagaaaaaaaaaacaaaaaaaaaattcagctctgtgatttccattttttctcctgccaaagatcatgttaattatttctgtttctcatggcctccatattttgaaatatttattattctctattgattaaataataattcatttgtttcctaattttactgaccaaagccaaccaggacttctggtcaatatgagaaaattacagttggttagctgcagctcagaaaaaagaaaaaaaagatatttgtgtaacaaataagctttttgaaataaaaataacttccaggcccaattattactttgggggggcttctatgattctgaacacgcagactaaaaatcaataatattgtctaaactactcattttatagataaacatggtaatgcttcaggagttaggtagaaatgacttacctgcaaagccaaactaattgattcccagttcagagtctatttaggatggatatataggatagggcttggagagggtattctagaatgaggccttaagttcttggctcctttttaagaatacatggtgttggattactgttaacataaatttggacagaatttatggatagaatcccatttaacaaatactgtattatatctagttatatataatgtcattacatatccccatgatctaactcacagttcataccaatgttttattgtcgtaagctgcaaaattctattagattttaaaaatttcatatgaataggtgtcatagaggacttgtttttgtctgggaaggatgtgggaaccccctccttatggccccaggagagggaatggcttgagagtgcatgttattaacttgagatcaggactaggcatccattagagagtgacccttgtgggcagtgggatcagcctttgtaaggcctataaagaaaaccaaggatgaaactatgcagtcagggccaggtcaaggatttgaagtggatcaagattcctatgtccatgatgttttgcatttctgctattattaacatgtcagaatataataggtagtcagtataatttgattgttccaaaaaaaattaattacaagtccttatccatttagcaggcagtcttcaaattaatatattaatccatttgctacagcacttatggacaataattatatgcaaacacccacatcattataaatattagtaattaactttaaggtgtttgggctgaatattaagtttgctcttatacacgtatgtttttgtgtgcagagtgtctggaagggtcaagaaaaggaatttgaaactctggaacaggcaaataaacaggaaatcatgcaatagggagaggaatacgtaagatttacctgaaatatggacttttactattttttatcttaaaatttttagttttgtttctttagagacagttttgctttgttacccaggctggagtgcagtggcatgatcaatagctcactctaacctttaactcccaggctctggcaaccctcctgcctcagcctcccaagtagcaggaacttccagtgtgtgccaccatgcccaactattaaaaacattttttaaaaattgagatggggtcttactatgttgcccaggttggtcttgaactcctgaccttgagaaattctcccaccttggcttcccaaagtgctggcattataggtgtgagccactgtgtccagccttgatctttcattttattcaggtataaaacatagataatggaaaacacagtttgtttttttttattgctagcgcaaatttgggacaattttatctttgaaagggacaatatttgccatctagaatcataatccaattagttgaaagagtttctttcaatctgagcacagtcttcatatgaatattagtatgacataaaggaatacagcatggtatgttctggtgtcctacaaaagcaaaaacatccagaactttccactggaaggcttcataatggaggtaagcagtaataattctaaagcattttaaagctggttaaattgtctgtaacagcaaatttttatagtaatcttttttttccaccttgagagggcaaggtagtctagctgtgtttcaaaatctcttactgtattaacaagggagaatcatttgctgttataacaagtagcaaaaaggtacaaacatttatatggtagtgtggagtgggttcttttctatcaggcagttccaacacactgagaggcataccctgttccttattttgactgttgtacgtcatacttagaaactgttaagttttagaatctttaaaaaagaacttacgaggtcgataggtctaaagcatgttttgtctgtttgtacaatcagaacccttaagaaaaattttaaagttttaagaactcggctgggtggggtggctcacacctgtaatcccagcactttgggaggccaaggtgggtggatcacctgaggtcaagagttagagaccagcctggccaacatggtgaaaccacgtctctgctaaaaatacaaaaattagccaggcatggtggtgggcgcctgtaatcccagctattcaagaggctgaggcaggagaatcacttggacccaggaggcagaggttgcagtgagccgagattgcaccactccactccagcctgggtgacagagcaagattccgtctcagcatcaatagtaaggaaacattttttgtatacaagcacttgtgtatatagtggaatattaaacgattttaaaaatattttcttaattattaagaatatagtcaatgtactttgactaatgcaatgaataacacaagagtccaatgtagcttcataggctgaaatgatggaagagatggaaaagagtacattaaccataaataaacataaaatcatgaacttaggttcaaaaaatcaactctggatacccatgatagagaacacagcattttatgggaagagaccccaagtttataattagctgtaagctcaccgtaaagcaaggtggtaaaatgttagtcccaaatgcttaaactaaattgtattaagtagggaggagagagttttatagtacacttgactactgttgccagaactttagtttgttttgttttgttttgttttgttttgttttgtttagacagggtcttgctttgtcacccaggctggagtgcagtggcaccatcatggctcactgcatccttgacctcctgggatccgatgatcttcctcctcagcctccctgagtgctgggattacaggtgtgagaactttagttttgtgttctattctgggcatcaaattttaagaaagatgctaaccagctagggtgtactcagaggaaggcaccaagtggatgtggggactgaaaactgacctgggaggatgaatcagaataactgggcaaagacataagtaaaagtatagctcttgcttctgggagaagaaagcctgagagattatttgatctgaaatcctgactttcaagttgaggaagcaggctcagagagatgtgtcttgggtcacatgaagagagaggagcagactacagactagtttccaaatatgccaggcaatgggatagcaggtgccaaacatgtgatatgctgtgcagaagaggggccagaccttttttggcagcttaaaaaggcagaaccaagactaacgtttgaaagttacagagatgatttgggacaaaaatcgaaggaacaactttctagccattgtagctgcctaacattggaatggattgccttgaaaagcagtgagttacctatcagtagctatgttcaggtaaaggttggataggatgttaagaatgttgttgagtgattcctttcatgcaggaaatgttggactacataagttaattactctagccccttttgattattaataatagcaaacatttattgagcttatggagctaccatgtcaagtgtggcgtatatatcatctctttgattcttataatatttgaggaagctgaggctccacagattacttatctgaggtcacacagtattggtgaggtgagattcaaatctggaggtagttttgctaacttatgtgctatagctgcagatctctaattcacataactattagttagatccattcttttgtgatttgttctttaagcttttgttcaagcattatttgttcaagcattctggaacagaagcagactctcaatgagagggcctagcttgcattagaggatctgccttttttttttttcttatttttattttataaataaggttttggtctgtcacccaggctggtcttgaactcctagactcaagcaatcttcccaccttggcctcccaaagagctaggattacaagcatgagccactgcacccagccctggtttcctatgggtttcaggtatcattaatttaccctttgaggcacttatgccatcacattcccttgagaataaatcctctggaaatggttagccatttgtagttcctaagccatttcaatagtggtagaagtaatattaaattaccatttgtcattaagagaccttgtgttcccaaatctccttactttgtatacatttaaaaaatttccttagtagttattataatcctcttatgaatatgaaaactgcatgccagattttgatttgtcttgcctcccccttaacctgagctattttttaaaaattaaactgagataattgtagatttacatgcagttgtaagaaataatacaaagaggagagcctatgtatcttttacccagtttttccctatggtaacatcttgcaaaactgcagcacaatatcatagtcaagatactgacaatgatgcttgcagtcaggatgtagaacatttccgtcaccatgatgatccctcctattgccttttatagacacctctcaccctctcatccttgacacttggcaactactaatcctttccccatttctataatttagtcatctcaagaatgtcatataaattgaatcataccatttataaccttttgggatttttttcactccacataatttcctgaagattaatgtaggttgttgagtgtatcaacagttttttttttattgctgagtagtattccatggtataacagtttgtttaacctttacctgttgaagtacatctggattgcttccagttttcagctattatgaataaagctgttatgaacatttgtgtaaaggtttttgtgtgagcataggttttcatttctttgggataaatgcctaggaatgtaatgctaggttatgtggtagtttcatgtttagatttgtaagaaactgccaaactgtttcccagagtggctgtaccattttacattcccactgacaatgtgtgaataattcagtttctttgcatccttgccagcatttggtgttgtcactattttttattttagccatcctgataggtgtgtagtgatatttcatggttttaagttgcctttccttaatgctaatgttattgaacatcttttcatgtacttatttgccatcagtatatcctctttggtgaaatgtctttgtatgtcttttgcctattttctaattggattgtttgtgtttttattattggattttgaaagagcctgggctttatagatatcaatttcagcaatgtgctattcattccttgactctgccttcctgccttcccaataccttattcacagtaaccctcacatctgacttctatgatgtgttgtagcctgagaaaatcatgattccattctgaatagatctggaacaaaatacaggtcatctaaacttgctagcaatcttttcaacacaagattcacatgtcataaaatttgcctgtttaaagtatacaaatcagtgggttttagtattcataaagttgtacaaacatcaccagtatgtaatttcagaacatttttatcactgcaaaaaaggaatctcgtacccattagcagtcactctgcactctcccattttcccattccctcagcccctggaaaccactaatctgctttctttctctatcaaattgcctattgtggacatttcatataaacggaattctgcactaagtggccttttgtgtctggcttttttcatttagcataatgttttaaagattcatccatactgcagcatgtattaatgttagtacttcatttttatggcaaataatattcaattatatggatatcccacattttctttactcattcatcaagtgatagacatttaagttgcttccactttttggctatcatgtataatgctgctatgaacatttgtgcgcaagtttgtgtggctatatgttttcatttctcttgggtatataggaatgaaattaattgctgggttatatggtaactctatatttaactgtttgagaaactgccaaactgtttcccaaaatggctgaaccattttatattaccaccagcaatatgtgagagttccagtttctttgcactcttagcaacacttgttattttttattatgtccatttgtgttttttactatgaccatcctggtaggtaaggaatagttcactgtgtttttgatttgcatttctttaatgataaatgatgttgagcatctttacatgtgcttattggccatttgtatttacttgaagaaatatctgtttcaatctttgcctatttttaaattgcattatttggtttttcattgctgagttttaagagttctttgtatattctgggtgccagatgattatcagatatcaaatttgcaaatattttctctcattctgtgggttgtgttttcacttttttggtagtgtctgctatggtctgaatgttgatatttccctcaaatttatatattggaaataatccccaatgctgtagtattaagagttggggcctttaggcgtgattaggtcatgagggctccaccatcatgaatgggattagtatgcctataaaagaggctcaaggggcttgtctctgccctccaccctctgaggatgcagcaacacggcatgatccatgaggaacaggccctcaccagacaccaaatctgctggtgccttgatcttggacttctagcttccagaactgtaagcaataaattatactgtttataaactactcagtctatggtattttgttatagcagcctaacactgattaagtcagtgtcctctgaagcacaaaagtctttacattttgaatatgaccattttaactattttttatttggttgcatttactttggtgtctaagcaatattttaaccagtacttttttgctcatgattatatccctctcaatgtcttttctaagtacacctaattcatggcacatacctagtctctccccagttctccatgcaaatgagcttgcctcctattctctgagaaagttgagattatttgccataaattcttcaacttcctctgtctcaataagtttccatgtattttcactcttttcccttttatactctctttcttttgaattacgggaattttccttttcaaaatgaatacctccacctggtccattccatccctcttcttcttggactttaattcagtgattgatctttttctccccactagcatcaataatattttgttctctactaatctttcttttctgccttcatacaatctcaggtctttgttgcccctttaaggaaaagaactgagggggagctttgcccaattttatttttcctttaagctaccaacctctctgactccttccctttacttttaatcttgaaagagcagtttcacttcgtctaaaatattgtagtaaccctctcagtggcctccaactccaaagtctccccttggactcttcttacacactttctatcagatgaatcttcccaaagtaaagttcttatcacctaactctcctgcctaaaaactttgatgactcatttaatatcgagttatctataggacctcccagcctaatattcaaagcccttcataacatgttctctcaactctgatagatctgaacaactcatttttccgtgaacacccccttgccactagtttcctgcgtaatgccttttccccagaatgcctgtcttccttcagttcttcctatggaaattctgtgtaaaatttaaatgccttgaagtctctgttgatcatctcttccccttccaccagagggcgctctccaatctttgaatccctatcacatcgtaaacgactgtgtggcccttactatttgacctcgtattatagcttttgaaagtagattgtgaattctgtgaaggcagagacttacctatctgtggacctctccagcagccacccagagctagtagagctagtaggtatttcttgaattgatttattgaattgagtatttcttgaattattttgatttaaattgaaaacaagaacctggacacctacatctgtggagaaaaatcttgaaaagataaagcagaaaacatggggtagacagtgggaggtgaaactgagaaggtaatttatgctttagctttacagcaaatcagagcacctggagttgaaaacctcatttttctgaatgtcagttttgtttttgaaaaacaatcagtgcatagcatatttactctttaatctcaaaacattaagagtaaaaaaaaagtggaactggttgagtaaaatgatataaagtcaccttatctgacaaactgtatcatctgttttgaatgaaggccctagaattgttgtgaaggatgtcatgttcatctcccaattatggagataaaaagtaatgagtgcaggaactttgtaaactctaaagcactgcatataagttgacctttaaagttaaaaatatttcttacaaaatgtaggtcagtttatatgcttattgactactgttagctggttggtaggtggtagcagtctctcagctggctctttaaggatgggtgggtcatgaaatcaatatcatgaccaaaatcaatatattctcaaggataaacccagtcccaaacttttatattaaactgtctaagtcaacctgtgtactagatcgtactcaacctccatcatatgcatagtgttattaactctgttgagtgttcaaatgacactaaatcgattaaatatttacctgtttgggttgggtgacttaaagtgattttgttttattaactttcaggtcttaataggaaaatgatactcttcattatttttccttccttcattaccccttccttttgggctttttgaattgatttctaaattgtaagttcttgaaagctgagaaactgtgccatatatttttgtaaaccctagtcctaccaggacctctttaccattataattattcagtagtaccaatagtgataatccttaatatttattgagtgcttactaaggggtagacactatactaagtactgtatattcattatttcgtttaattctcatagcaactttgtgagttatttcaaaggaagaaatgggacttaaataatttgcccaaggtcacacattgcataggtggctgagccaagattggaacccaggtggtctgactccagagcctgtgctcttaaccgctacactatcttctttaataaatgtctattctcagtgatgctagttagaaccaagctgtgtgcatggcatatgtgcagtgacatcctgtctatgtttttattgtgtaatatacccatgatactgtgagcccacagctggtgtccattaatgataatggtgtgggaattcaaaaataatttccagagcatcttgagtacaagacataattttcatttttcagtgatctttaaattctgggacttaaaagggacttgttatttggttacccaaaatagttttcttccttttctgaaagttggatttgaaatggaggtaatataagactacagtgtgctttctgatattatttcagtaggattttttcacttttattttttctaagctcctctaaagggggaggtagaggcaatgtgttttgttttgttttgtttttttgagacagagttcactcttgtcgcccaagatggagtgcaatgacgagatctcggctcatcacaccctccgcatcccgagttcaagcaattctcctgcctcagcctccagagtacctggattacaggcatgcgccaccacgcccagctaattttgtatttttagtagggacggggtttctcaatgttggtcaggctggtcttgaactcctgacctcagctgatccacccacctcgtcttcccaaagtgctagaattacaggcatgagttttactgcacgtagcctgtttcactaccttcttgatgtcattatatttgccaggtttctctagatagcagatcagatccatgactgacagacacagtggtggtgggagacatggaagatcatgccagtgaccttcctgttcagctcagggatgaccttacccacagccttgtcagtgccagtagatgcaagcatgatgttctggaaaattccacagccattgtgccatagtttcccagaggggccatccacagtcttctgggtgtccgtgatggcatggactgtggtcatgaattcttccatgatgccagaattgtcatggatgaccttggccaggggaactgagcaattggtggtacaggaggcattactgacaatcttgaggccgtttttgtacttctcatggttcacacccattacaaacatggggacgtcgacagagggggcagagatgatgacctttttggttcccccgtctaaatgagtcccagccttcttcatggtagtgaagacaccagtggactccatgatgtaattagtgccagcatcaccccatttgattttggtgggatctctctcttggaagatgatgatggcatttccattgatgacaagtttcccattctcaggcttgatgatgctgtggaacttgctatgggtggaatcatactagaacatgtagaccatgtagttgaggtcaacaaagggatcattgatggcaacaatatccactttgccagagttaaaagcagccctggtgaccaggtgaccagtacaactaaattcatttaccctggccttcaccttcaccatggtgtcccaggggtgcagctggccctgcacaagaagatgctgttgtcaaacgggaggagcagaaagcctaattttcaaaatatttatttgaaaaattgttttatacattggtggactttagactgttttatattaaaatacataaatacatgaataaatttatgctaataaatttgacaactgaaatgacatttcttgagagacataaacaaccaaagctcacccaggaagaaaaagataactggagtagtcctatgtcttttaaagaaatttaattaatggtttaaaatctcaaaaccaaaaataaaactgtattcctagatagatttacttatacgttgtactagttctatacaaactcttcctagctggcttttttaaaaaagaagctgacaaactgaaatcatgtggaaatggaaagaacgtagaatagccaaaacaattttgaaaaagaaaaggctggagatttcactgtcattgattttaagtttaaagcaccagtaatcaaaattgtatggtttaggcttaaggatagatatattcatcagtgaaacagaatagagagtccagaaatggacccacatatatacagtcaattgattttttttaacaaaggtaccaaggaaaaattggatatccttgtgcaataacctcaacctttatcatactccttatacaaaaaaaattacagtagtccctctgtatctgggggggattggttccaggacccattgaggataccaaaatcccttatataaatggtatagtatttgcatgtaacctatgtacattctcccatatacttttttttttttttttttgagacagagtctcactctgttgcccaggctggggtacagtggtgcaatcttagctcactgcagcctctgcctcccaggttcaagcagttctctgcctcagcttcccgagtagctgggattataggcacccaccaccatgcctggctaatttttgtatttttagtagagacggggtttcaccatgttggccaggctggtttcgaactcttggtctcaagtgatccgcctgccttggtctcctaaagtgctgggattacaggcatgagccacagcgcccagcctgtagctactaacttttgaagtaatactgatacttcttcagaaagaccgtgtcttctagttttaatattggaagtaacatctctgtggtccccatggtggatacagtattttgtgtggtatacatattcataatcaacttacttgagaaggaaatttgggacttaaatttttataaacatgaactttttaaagtttattgctgccaaaaatgtttattgcaaagtaaaaaggcatcaccacacaagaaaataaagtctttatttacatcaggaaaataaatgacaaaatcactgtgaaagagtatacagactactatctaaatatgttgcagcaaggctgttcagattgtatttcctgcacttgtatctaacctacaatttctcacatttcccactgacctcactatctggaagcctagcagctttgtgcatctcacaaaagacatggtcaggaagaatgaactgtccctagccactcatgtacctgtacacttcatttgttcagcaagcatgtgcatgccatctttgaaagagaagtattacgtccggtatcagaaaatggtgggggaaagtgattgctggccgtatttcagatttaacaccatatgggaaatgttaatgcatctcgccattagaaaagaccatgacaaaggctggaaatttaaagcaaagatcctgcaacattcataaccacccaccccagcttattttaatgcaacgagtaataatagtttttgaaaagttaacattctgattcaaatgtcaaatgtcaaactttatggacttccctgacagcagcaggtaaattggactggcataacaaactgggatgagtagttacacatttatggcctatatcagaagctctaaacaattcaaagcataaagggtaatgataatagtccagccaaagggccagactaatagtgagagaccactggccgccctttattgctaaaaagcagtaatcttggtgaagcttgggagaaccctacacttttctttaggactgaggctgtgagagcatccatggacattacagtttgtctactttaagcccagactgaaaccataatctctcccaaatgcattgagacttgtccctgaaatctgcccctagattttgactgtgaaggagtcagagttaagtaactatgatattgagaaaagctggaatgtctaggttgtgggaagtgagagaaaagagaatataatgataaaattgcatctgtaaatcacataagagtagggagtcaggaaggacataggatttccccattgatgtatctttgtgtcaagagctgaaaaatgtaggagggtactgccttactcttctgagctaatcaaaagcagcagcaagtacacagtgaaataagatttagttgttaagtggcagagaagagtgttacagtttgaaagtttatgttgtatactagacattatgtctaagtactgtggaggatagagagacaaataagaaacagtttcctcctgttcactgagcctatatatttttaagggatataaaatgtttgcacacaggggcctgtctcagttcctctcttagagctcaagcccttaatccaagtattctcagattcagatgtgaggaataagttagtgtgccagggatttttttcctttttcattattttatgtaattaagtggcttctcaccttttctttttttaggcagtcgtcatagaattatcatttctgccctcttgttccattatggaatgaaatttctgttgtcctaggtcatcagtgcctaagccatttggggactaaaaaaataagtgtgctgtatagttgaggattttattatttctgccccaaatattttgactttaattttgaagggaatatttctaagatgtacctttttaaacagagaatgtttatcttactttaatctattgttgattcaaggtcatgtttaggaatgtcagtgttctgtgttgtagatatatatggtgcagggcatgaagctgaatgatttaatttgtcactgtagagctcagcactgtcacagccccttctcccctgggcccttgaactgccttggttttcacgcttctgggtatccacctagtgtggatactaaggagcatgtccttaggcactctttgcatgctgtcttccctcgctgccttcaagggctgcttatgagctggtaactctttgttggattaggctgtagaatgagtttcttttctccctcttttgtaactggctttcttatgtgccagtgtctgctacttgcaaccttgctgcctactctgtcatcatttccaacctctgcttctgcttctaatctctgttctatctgacagctctctccacttaccttcttgtcttctcctttgtgtcgtacacattgtcagcagattggaagaaggcttttcctacaaatagccagtgcagctctttagcacttttggctatttttgttgccaggtgttcagggacttgatctgaaacttaaatactattttttaaaggtgtttctgaatttgaaaccagggatttgtccagaaacctgtctctatataaatgaagttttactttaccttataaaatatagtgaccctagctgggtgcagtggctcacacctgtaatcccagcactttgggaggctgaggcaggtggatcacgaggtcaggagatagagaccattctggctaacacggtgaaaccccgtctctactaaaaatacaaaaaaaaaattagctgggcgtggtggtgtgcggctgtagtcccagctactgaggagactgaggcaggagaatcgtttgaacccaggaggcagaggttgcaatgagccaagattgtgccactgcactccagtctgggtaagagagcgagactccatctcaaaaaagaaagaaagaaatatagtgacccatactaagaatatctcttgttttaaataagagtagaataatttagtttttgtatttattatccagcatattggcttggtattctcagatgtttaaggcccagagaaaattctagttcttctatgaaggctttctttacccttctagaacctatgcagactctatcatagcatttattcacctggccttgaaatgtgcatgttctgtcccttaaaggctctttgaaatcgaggagggggtgggaatctatttatatcatctttatatttccctctttactacagctcttaagataataccttgtatatcatagctttctccaaaatgttctgttgagttgaataatccgctcactcccaggtcccttctgtagtttgtgattgatgctagttgagggttcttcacaccaaatgtgtcatcttgcatttgctcacattaaaacttctctgccagttgcacaggttcctaagtttttcctgttatttgtcctcaaagatcctggctctttgttgcttggggaaatttagtgtcaaacagaaataaagttactatatgcttccccttccagagccatttaaaagataaaatctttaaaaatgctctgttcttacagaaaaatgcctatttgttcctcacacatttttgcttctgagccagttcattccccacaataaaacagccccatttcttcttcttcttcttttttttttttttttgagacggagtctcactctgtcgcccaggctggagtgcagtggcgcaatctcggctcactgcaagctccaccttccaggttcacgccattctcctgcctcagcctcctgagtagctgggactacaggcacccgccaccacgcctggctaattttttgtatttttagtagagacggggtttcactgtgttagccaggatggtctcgatctcccgacgttgtgatctgcccacctcggcctcccaaagcccattacttttaaaaagagctttactgagatataatttacacatcatacaatttatctatttaaagtacataattcagtggctttaagcttattcacggagttgtacaaccatcaccacaatataattttagaacatttcatgacttccaaaagaaacctcatgccccttagcagtcactccacagttccccagcttccggtctgaggcaaaccacaaatctactttctgtctctatagatttgccaatgctggacatttcatataaacataattatacctaccatgtgtggtcttttgtgactggcttccttcacttgatactgcttgatatttgtttttttgaaatattcttgtatttataacttctcctcagaacagatgtggtcttgtaattctcataagtccttctgtggcctggttttattggatttgtgagatttggttaagttgcagaatatactgttacacgtcaaataacattggctgctgatgataatgaaaatggccctgtttcagagctaagattaggttatagatgtatttcataaagctgatccaaactatggatgtggtcaaatgaattgggatatataggactccatggttttcacactgacccattttctaatgggttatttgaggctttgaggtttttaattcctaaggatcataaagcgctggaactggaagggacccagcagtcatgaagcttagtccctcttctctaactcctatcccattttacagaattcagaatgttcattgttcaagatcaaatagttaattaataacagaaccaattatagcaaaattagaactaatgtgtgtcgattcctaatccaaggttctttacttccttttggattttgttgctgttgtatcctgggttctctagaaacaagagcctgactggaaattaagtgaagctttatttggtggtacaatttcagaagagtaagagtgaaggaaaagagatgagaagtgagaagctttgagaagcaaagcaaggcgattagattaccatgttagcaattgtgtcatgatgatcctcaaagagacacagctggttattcagcaagtacatatgcttgaccatgtgcaatatctccagataggatagatagaacagttcagccaggcgtggtggctcacgccagtaatcccagcactttgggaggctgaggcaggtggatcacttgaggtcaggagttcaagaccagcctggccaacttggtgaaaccccgtctctactaaaaatacaaaaattagccaggcgtggtggctactggggaggctgaggcaggagaatcgcttgaaccccggagccagaggtggcagtgagccgagatcgtgtcactgcactccagcctgggcaacagagtgagaaaaaaaaaaaaaaatagaacagttcataagagcaaagagggagagggaatttatctgcccatctcctctctggctgcttgtttcccattatcaaaggtcagtcatggagagtgaactcacagttctgagtggtgtcatgctgcccttccatttggaaagccagattccatgccctggtgaaggatttcatccaagtttggaagtggtaggagaatccataagctctgggtatatagttaatttgtagtcaacagggaagatttcctcctccctcctgcaatgtccctggttgtcctcagggatgatgagacaatggtgtggagggaaactgaggaggtgtttaagggtcaatgagataatggtgtggaggagaaccaaggagaggcgtctgacacacttgccaagagagtgcccttcctagcctaggtttctgaagtcatcctttatgagcatgatgaccccttaactagtgtatttgaaggaattgcttaaattgacagtcatgttcttttttctaatgagacattttttcacactgctatggctgacactctttagactattgaaacatgtaactaaaactgtcattaggaaacttgttctcctggccatctctcttttctagaaaaaagaaaacacctggaaaggcttttcagaattataattgcttggtacctgggtttctgtgtaggttgccccacatgcagagatttcctcagtcaattcaattcttattcttctttgcagatgaactgactagcctatattgagatttctgctgctctggctatttagagtttattttcactgtatttgccctactctctttcatttaaatattacttcagattttttctatcctggtttgtttgtatgctagttttcctcctgggtatctttaatttttgggaatccccccactaccttgaattttaaatgcttgttgactacctaaatataagctggagtatttgttctaggccaagttgtcagaaagaatttggacagtggacaaagaagtaattaaagctttaagttcttcagtgaataactgcaaatgaaaatgttaaagttacttgtttggaaaggtttgaagatgagagagaatcatatgttgattaatgaataagggaggaggttatttcaatttggggacaaatgggaagaagtaccaggataaggaggtaaaatggtggttagaaaatacctggtatagaaaatgaagaagatcacgcaaagaaaaggagatgtataatcatgacatttatagaattagagaatcgtcagtgctggaggaggccttagaaataatttagtttaatccagttaatgtataggtgaagaaactgaggctgaaagaggttaagtgacttaaggtcacacaatagttaagatcagaggccaagatttgaactgaggcctttggattgcagatgattgtgccacatctaccttgtaccacagagcaccacagctactttaagaatgtttcatatttcctttcctgaagagttatttttcctatttggtggctttttcatagcaataattggtaaaatttaaaggacttgatttttaatttattttcaatgttttaaaatgcattgcatagtaaagcttgtagtgtgtatagtgactttatgttgatagtatagtgtcagttacagggcttcaacaagcaaatgagatcctcttagtagctgaggatagtgctaatcatttaataaaagcactttagtagttgcttttgtcgtaaaaacatagactactatctaaactcaaatcaagttataaaagactccagtgtttttctggagtccaaataattgttcttgtgtttgatgcttctacagtgctactactagtctataaggtgccagagtcattaatcctgggccaagtaaaaaaataaaataagacacaaacaacttccaccccagctacccaccctagctcctggtcacaaagctttgtgagagaagcagggctgcatttcagatcctatagccaggtgcctttgagcagtgcacaaactgtgcaatcttaggaaacagctccactcttttttttttttttttttttgagacagagtcttgctctgtcacccaggctggagtacaatggtgcgatctcagctcactgcaacctccatatcctgggttcaagctattctcctgcctcagcctcctgagtagctgggattacaggcgcatgccaccacgcccaggtaatttttgtatttttagtagagatggggtttcaccatgttgatcaggctggttttgaactcctgacctcgtgatgtgcccgcctcggcctcccaaagtgctgggattacaggtgtgagccactgcgcccagccagctccactcttttggaagcagatccttgtgtacctttcatccttgtgattctggtattacctttttgaaaactgacatatcactcacagttttatcccaaagagtttacatatgattaaaatatgggtagaatctaattagaggattattaatatattctccaaagaatagaattagctataattctatagaattattatagctagaataattctattctttggcggacaacccctacgaaaatagcattcagttgatgattacaagctgttaaaccattctttgtattagatgtttttgcattcactcaagaatcagtttctataatcaagatgttatttgttgtggaattagttaatgtgtatttgaagagactctagtaaaatctggcgggtttgggacttttatggttgtaaacagttgttccaaatggctctggagagcggacgattgcagggaagataataggatagaggttgggataaaagctgctcccacaccctgatgctttcttccctcaatgcctcattttcacctgtgggccaatgattaggaaaatgaaataacattaaaacaacactgtttgtcatgttattagtagctgttaatcctttactataactgccagagattttgtgttttaaaagacataagtgatcatatatacattacataaagcagttgaacatgagaaggcacacaaccatagatatattccataggagtgttttttataaaatgcacaatttcaatgctttaaaggttgggtgcttacagtttgctatttgctttcacacatgtgatgacgtttaatcctgactataattctatgaaatggaaattattaatctcattttgtgaataacttgtcttgctcagtgcctcttcttttcatattctgaattctttcctaaactatcttatctgtgcttacagcttcagttaccatctataaaattagtaactatatcaaatttatatttctcaccctgagcttcagtttttttatatctaattatcttgttagcctttccatttggatatctcagaatgaactgcgctcgtggacttccctatcaaacctggtcctcttacagtgttttctttattaatgaatgacatcatccatcgtccatctgattgtgcaaaactagaaacctaggtcttgccttaagccatccttattcttgtttcatatccagtatgtcacagagtcttctcaattttgcttcctacataactcaaatctgtctgcttttctccatctccactgccaccgctcccatccaagctctctagcatcatctttttctgctattccagtaaaaatactagtatttgggcttttcacccactcatattcattctccacacagcaaccagaacgatccttgcaaaacactaatttcaagatgtcactacccatcccaccctccttaaaactctaatgaactttacttcaagaacttcccattgctcttaaaataaagactaaatctttaccatgactggcaaggactactgtggttgctttccttccatgttcatcttttgccagtatccccctaactctctgagctttttaatgtaccacattctctcctgctgcaaacttttgccttccccttgtttgaagttgttttcatgctctaagttagttacctcctattccatctgattttagcttcctctgggaagccttccctgactcctaatccacaacagatcaagtctccctgcagtattatctcataatatcatctacctcttctttgtaacacttagcacagttacactgttgtaattatttgtgtgatattttaaaaatagcatgcatctctcttaccagaccatggactccctcatgacagggagtgtgtctcattttatgtcctgttacatccccatcacctaggatactacccagcacatactagaccctcaatatacatttgtgaatgaatgaacaaatgaattcagtattctctaaggccctttctggctctaacattctatgattctataagggacagagaagtataccactggataagtattaaatggagtgtaattgttcactgtgtttaagaaatggtcatggtgtcttttgttgggactaaaactgatatattagagtggtgcttcccaaaatcagagtgaaaggacttctggtctctaatattgttcctaggcactatctcagggtgtcctgagcaatattttgattctggaaatggaaacaaatgttatgtaaaaagaagtggctgtggaagcaatagtacccaactagtaacaagtacaccttgcacttggctcttagattcgaataccattctcaggtaaaggaatgaaggatccttagagaaatggctgattctaggatggggacaggaaatatacaatataggcctgaagcatcttatagtgccagacagtaagtgctcaaaagaaacacaatggttgcgtatgttaaagggacacaggatccaactgaaagagctcccaatggtcaatgccagaaaaatttgagcaacaaaataaagtagtattgcattgtaacccaaagtataaaaccaatatacataagtccatactgatataaataaaagtctgaataaattggagagactagaaaaagctataataattgggagaaaagacaaatctcccatgaagaaaaattcaaaataatatatgtaactactttgttctcaaggaggtggagcacaactcctcactcctttagtatgggctgtacatagtgacttacttccaaagaatagagcacataaagaggaaaaaaaaaaagagttaactttacagtggaaaattctgacagacattgccttagccaggcaatgaagatcagcattaacagtgataaatgttcatagtattacccttgatatgatgtgataaaaatggcactttatctctgtagttcttcctccctataagttcttcctccttataaaaacctataagctcagttaatcatgaggaaaacatcagacaaatccccactgagagacattctacaaaatacttgactagtactcctcgaaactgtcaagatcataaaaaaacaaggaaaatctaaaaaacagtaacggccaagaggagcctaaggagacatgactacagaatatattgtgagatcctagaatagaaaaagagcattaggttagaactaaggaaatgtgaataaagtatggattttattttaaaataataatattggttattgtgacaaatgtgctgtactaatgtaagatgttaataataggaaaggaaatggtatcagatatattggaagtctgtactatgtttacaactgtcaatctttaaaactgtaatatctttaaaactgggctaatttttgtatttttagtagagacggggttttaccatgttggccaggttggtcttcaactcctggtaaaaccccgtctctactaaaaatacaaaaattagcccagtgtggtcatgggtgcctataatcccagctacttgggaggctgaggcaggagaattgcttgaacccaggaggcagaggttgcagtgagcagagattgcatgactgcactccagcctgggtgacagagcaagactccatctcaaaaaaaaaaaaaaaaaaaaaaaaaaaaaagtgactgaatgtatacagtaattaggaggtgaaagatgaaaagagtttaacagggctctggaatttcaggaccagtgagaaatagtcaatttaggatctaattatttgctttgtaggtttatgtattgcccatttggggtagatttaggaaaatattttctaaattcaagaaaaaaaggccaggctgggcacggtgactcatgcctgtaatctcagcactttgggaggctgaggcaggcagatcgcttgaggtcaggagtttgagaccagcctggccggcatggtgaaaccccgtctctactaaaaatacaaaaattagctgagtgtggtggtgcgcacctgtaatcccagctaccagtgtggtggaggctggagaatcacttaaatctgtgaggcagaggttgcagtgagctgagattatcccactgcactccagcctgggcgacagagcgagactctgtctgaaaaaagaaaaaaaaaaaaggccagtgtgcctcacacctgtaatttgggaggctgaagcatgaggatcacttgaacccaagagttcaaaaccaggctggacaacatagcaagaccatatctctaccaaaaaaaaaaaaaaaaaaaaagggagccaggcatggtggcatgtgcctgtagtccccagctactcgggaggctgaggtaggaggacagcttgagctcaggaggttaaggctgcagtgagccatggtcacaccactgcactccagcctggccggcagagtgagactctgtctcaaaagaaaaaagaaaaagaaaaatactctttagttatcagatactcctcaagcataacttctctatcatttttttctttctagtgttttgaattttattacttgagctgaaatattctaaagatgtaaccactctctttttttgcacactgcttaagatgagaagaaatcatttatatggaaactagaatagctgatattccagactaaggtaataagcttctgcattaataattcatagatataatttttgtgaaagatatggtttatattaatcttctggtgttcctaaatttgatttttttaaaaagtttattcactaaactaaaatttattgtggtcatatacagggtgatctaggggtcaggaaggttacttgtacatagatcctgcccacaagaagattattgtttagtgctggagacaagacatgtttataaacaactaaatcataaagtagagggttataactttccaataaagatgttgataaaatactatccaaaatcagtaatggaaaagatcattcccaattggagaactctgggaaggtttcatagaggaattagtaggttgacctagacttgaataatttcagattcctctaagtcaagagttatatattattgatatatgtacttccagcacatagtaggtattaaataacatttgttgactgactgaaggattttaaatgcaaatggagatgacagaaaggacaaggaaagatattctagttctacctattgcttctaacaatgttgtatgaaacaaatatctattctatctttttttcttattgattcctcatttgataaatgagttaatttgattatgtcactttccatttttacatctcaacaaatatattatttataaataaattgtttgcaaaggctttttatagtgactttttgatggctggaatatggaatggaggagcaaagccagccctttattcactagggttactctgttttttaaggagcccactgtccagcttaaggtttatttgggttacttatactcttgtgtgccttatttctttaagctactttgaagcttgtggaagtattggtcagatggtggtacagattccaggagaagtaaaactcagtcaaatgagtggtctacttcttaacaactctggttagaggtctggtttgggagccaactctggttagaggtctggtttgggagcttaaaactatgtttgaaataaagattgcatatcatctgtggatttcagttgcatgggctatctccctcatttctatggataactaagacatggctggtagcacatgccagccatttttagcagggtttccctgttggttgcactattgcaatttgtttttaaattgacccaacttttaaatctgtaggcaacagcaataatgcatgctgcctttccgccaagaagtacaaagtggcttagcagtggatttctaggtatatgattatattcaaaattagtgtagatatgagatcaaaatcataatgaggccgggcatggtggctcacgcctataattccagcactttgggaggctgaggcagcagattacttgaggctaggagttcaagaccagcctggccaacatgacgaaaccctgtctctactaaaaatacaaaaattagccaggcatggtagtgagcacctgtagtcccaactgcttgggaggttgaggcacaagaatcgcttgaacctgggagacggaggttgccgtgagacgagatcacaccactgcactccagcctgggcaacagagtgagactctatctcaaaaaaaaccaaaatagctaaattggacttcatcaaaataaaaaactttgtgctgcaaatgtcaccaagaaagtaaaaagacaacccacaaaatgggagaaaatatttgcaaatcatgtaactgataagggactcatatccagaatatatgaagaactcttacaactcaataatgaaaagatagcccaataacaaaagggcaaaggatttgaatagacatttctccaaacaagttacaaaaatggccaataagcacatgaaaagatgttccacatcattagtcatagggaaaattaaaatcaaaacgacagtgagataccacctcatacccattaggatggctataattaaatggatagacaagccttgcttgtgaggatgtggagaaactagaaccctcctatactgctggtaggaatagaaaatggtatagccactttggaaaacagtttggcagttcctcaataagttaaactctatgtttatagagttaccatgtgacccagcaataccactcctaagatgacaaccgagagaattgaaaatagatgtccacacaaaaatttgttaatgaatgttcatagcagcatttttcataatagcttaagagtggaaacaacccaaatgtctatacactgagaaaaggataaacaaaatgtggtatatccatgtaatagaatatgattttgcaataaaaagaaagtactgatacatactacaacatagatgaagcttgaaaaagttatggtaaaacccaaagggccacaagtcgtatgattccctttttataaaatgtccagaataggcaaaccattagagacaaaaaatagattagtagttgccaggcgttggtagggattaggaaatgtgttggcaggaatgagaattagctaatggatacagggtttcttttaggagggacaaaaatattctaaaattagattgttgtaaacatatcaaaaatcactgaattgtgccctttaaatggtgaattttatgataggtaaagtatatctcaataaatccatttttgaaaaagaattgtttgtcatagatgtttgtattataaaatttattgatctttatggtagggaaagggtcaccccaccaacacataacatttaaaactttccacaggcctaggaacattaagctaaaggacaaatcagacagcaggccagagggcacccgtgtctggcctagtaattggtcagaggaagtttaaacagttttttctttttccctctcccctcctttcccctcctctcccctcccctcttttttgagacagtcttgctctgtcgcccaggctggagtgcagtggcacgatctcagctcactgcaacctctgcctcctgggtttaagcaattcttctccctcagcctcccacatagctgggattacaggcacccgccaccatgcccaattaatttttttgtatttttagtaaagacagggtttcaccacgttggccagagtggttttgaactcctgacttcaagtgatccgcccgcctcagcctcctgaagtgctaggattacaggcatgagccactgcgcctggccttagttttttcattgactaacagttgaattatttcctaagaggacgtcctcacagtaaagatgatactggcatgctagacctctatagcaaaatctgaattaatatcttctaagaatggttccagttggtattcagtgtagaaaagttataggataatcttttcttaggctatgtggatgtctagtttttgatattttcagattaagggaagttgaacttggctatccttatataacttccaaatgtattacattatgtattgtggtgtttccaagaatttgcaaacactaaaatgtaaaaaggttaggaactgcttagaaaaattatagtgaccattgctattcttggaaaagtaattacaccaacattgtattttaattccagagccaaaaaaatgtgtgtcagagtcagctagcaaacaccaggaaagcggctgtgaaggaagattgaaatttaaattcatattagcctcttgagccagtatttttgtgcatggcccattgtacttttctatttgccttgagttggcactggacattgaataaaccttgaagacataaatgaaaatgtgtatgggtatggaaatgtgtaaggatatggaagtgtccttggtgcaataaagcgcataatgcattttctgtcatttgtcatcaaaattattttttcactatgtgtggcttgtctacttccattcttgctgtgaggtattagcacatttgtagctatttattaattcccctttttattttctcttgagttctgtcctacttgttccttattcagggttaaatttaaaatgttcacatctttttctttggggaatatttaagaaaggaagactacgacatcactccatcttcttcaatgaaaggagaacttcattcattcattcaggaattatttgctgagtatgtactctgtccagggtattatgctaggtgttgggtgtttctaaattaatcaaggagatgactgcagagctgatttctaaggtactgtttaaagtaacatttcagtgctgtgcataatgatagcagcaaagagactatacaactgtaggtcagaagaaacagaataattccactgaactatctgtgacagagtgacaaatgacaacagatcttgttcaagccctgatcatgagctgaaggaataactgcatttcctattagtcagatagtgctttgacctgatattaaagtcagctgttctcatatttaggatacaacagcattgtattcacttatcaaagagaatgggtgacaaatactacatttctcctttctgctcttctccttctgccccttccttacactctgaatgccctttctaaccactcctatcattttgtttctcctccttctatattagtgtactgtctattgaagaatagtctttattactagttttattgtcaactgatatttcttaataaatcatctgatcttccatgttgaatttatacgtgcatatacaagtatgtacataggcatagtaaacttttccactttcccctgtttttgctttttttaattgattcttgttgatgtgggttgatcagccttttggtatgaatcatttaagtgtagtcaagatactccagagaggggaagtgaatgtcagaacttaacagctatttctctttcgttagaaaagagacagcataacaggaaaatgagtccttgccataaatgccacgttcaaaaatctaaggttaaattggaaaatatctaggacaaatggtggaatttgctaattatttacttcctggacacatctgactgggtaatccaagatagactgaaattgacctaattgaattttgtaaattattgaataagaatacactttacactgaactgaacatttagttattttttcccactaacttgtgagtgtaggaaggagagtcagattagttctaaatgaaatgaagaaattttatttttctctccacatctgaattatagtgtgagttatgtgtcacagttttatttatggggaactcagaggatgtatagtctttaaagcagtctgggacagaaagcttaaaaaggaaatgaacatagaacatgtcatattagggaaacaaagggaatgagaatttttttttaaatactttaagttctggggcacatgtgtagaacgtggaggtttgttacataggtatacatgtgccatggtggtttgttgcacccatcaaccagtcatttacattaggtatttccctaatgctatctctcccctagccccccaccccctgacaggccccagtgtgtgacgttcccctccctgtgtccatgtgttctcattgttcagcacccacttatgaatgagaacatgcggtgtttgattttctgttcttgtgttagtttgctgagaatgatggtttccagcttcatccatgtccctgcaaaggacatgaactcatcctttttatggctgcacagtattccatggtgtatatatgccatatattgtttatccagtctatcattgatggacatttgggttggttccaagtctttgctattgtgagtagtgcctcaataaacatacatgtgcatgtgactttatactaaaatgatcctttgagtatatacccagtaatgggattgctgggtcaaattgtatttctagttctagatactagaggagtcgccacactgtcttccacaatggttgaactagtttacagtcccaccaacagtgtaaaagtgttcctatttccccacatcctctccagcatctcttgtttcctgactttttaatgatcgccattctaactggcatgagatggtatctcattgtggttttgatttgcatttctctaatgaccagtgatgatgagctttttttcatatgtttgttggccacataaatgtcttcttttgagaagtgtctgttcatatccttcacccactttttgatggggtttttttttattgtaaatttgtttaagttctttgtagattctggatattagccctttgtcagatgggtagattgcaaaaatattctcccattctgtaggttgcctgttcactctgatgatagtttcttttgttgtgcagcagctctttagtttaattagatcccatttgtcaattttaacttttgttgccattgtttttggtgttttagtcatgcagtctttgcccactcctatgtcctgaatggtattgcctaggttttcttctagggtttttatggttttaggtcttacatttaagtctttaatccatcttgaattaatttttgtataaggtgtaaggaagggatccagtttcagctttctgcatatggctagccagttttcccaacaccatttattaaatagggaatcttttccctgttgcttgtttttgtcaggtttgtcaatgatcacatggttgtggacatgtggtgttatttctgaggcctctgttctgttccattggtctatatatctgttttggtaccagtaccatgctgtttttgttactgtagccttgtagtatagtttgaagtcaggtagcgtgatgcctccagctttgttcttttttgttaggattctcttggcaatgcgggctcttttttggttccatatgaaagttaaagtagttttttccaattctgtgaagcaagtcagtggtagcttcatgtggatagcattcattctgtaaattactttaggcagtatggccattttcatgatactgattcttcctatccatgagcatggaatgtttttccatttgtttgtgtcctctcttatttccttgagcagtggtttgtagttctccttgaagaggtccttcatgtcccttgtaagttgtattcctagatattttattctctttgtagcaatagtgaatgggagttcactcatgatttggctgtctgtctgttattggtgtataggaatggttgtgattattgcacattaattttttatcctgagactttgctgaagttgcttatcagcttaaggagattttgggctgagacgatggggttttctaaatatacaatcatgtcatctgcaaatagggacaatttgacttcctcttttcctaattgaataccctttatttctttctcttgcctgattgccctggccagaacttccaatactatgttgaataggaatggtgagagaggctatccttgtcttgtgccggttttcaaagggaatgcttccagtttttgcccatgcagtattatattggctgtgggcttgccagaaatagcacttattattttgagatacgttccatcagtagctagtttattgagagtttttagcatgaaggctgttgaatttcgtcaaaggccttttctgcatctattgagataatcatgtgctttttgttattggttctgtttatgtgatggattacgtttattgatttgcgtatgttgaaccagccttgcatcccagggatgaagctgacttgatcgtggtggataagctttttgatgtgctgctggattcagtttgccagtattttattgaggattttcgcattgatgttcatcagggatattggcctaaaattttcttttttggttgtgtctctgccaggttttggtatcaggatgatgctggcctcataaaatgagttagggaggatttcctctttttctattgtttggaatcatttcagaagcaatggtaccagctcttctttgtacctctggtagaattcgggtgtgaatccatctggtcctggactttttttgattggtaggctattactgcctcaatttcagaacttgttgttggtctattcagggattcaacttcttcctggtttagtcttaggagggtgtatgtgtcccggaatttatccatttcttctagattttctagtttatttgcttagaggtgtttatagtattctctgatggtagtttgtatttctttgggattggtggtgatatcccctttatcattttttattgcatctatttgattcttctctcttttcttcgttattagtctggctagtagtctatctatgttgttgatcttttcagaaaaccagctcttggattcattgatttttttgaggggtttttcatgtctctatctccctcagttctgctctgatcttagttatttcttgtcttctgctagcttttgaatttgtttgctcttgcttctctagttcttttaattgtgatggtagggtgttgattttagatctttcctgctttctcttgtgggcatctagtcctataaatttccctctacaccctgctttaaatgtgtcacagagattctggtacgttgtgtctttgttctcattcgtttcaaagaacatctttatttctgccttcatttcattatgtacccagtagtcattcaggagcaggttgttcagtttccatgtaattgtgcgattttgcatgagtttcttaatcctgagttctaatttgattgcactgtagtctgagagactgtttgttatgatttctgttcttttgcatttgctgaggagtgttttacttccaattatgtggtcaattttagaataagtgtgatgtggtgctgagcagaatgtatattctgttgatttggggtggagagttctgtagatgtctattatgtggtcaattttagaataagcgcaatgtggtgctgagcagaatgtatattctgttgatttggggtagagagttctgtagatgtctccttggtccagagctgagttcaagtcctggatatccttgttaattttctgtctcgttgatctctcttgtgttgacagtgggtgttaaagtctcccagtatcattgtgtgggagtctaagtctctttgtaggtctgtaagaactttgctttatgaacctgggtgctcctatattgggtacatgtatatttaggatagctatctcttcttgttgcattgatccctttacccttatgtaacgcccttctttgtcacttttggtctttgttgatttaaagtctgttttatcagaaactaggattgcaacccctgctttttttttttttttttttttttttttttttttttttttttgctttccatttccttggtaaatattcctccatccctttattttgagcctacgtgtgtctttgcagatgagatgggtctcctgaatacagcacactgatgggtcttgactctttatccaatttgccagtctgtgtgttttaattggggcatttagcccatttacatttaaggttaatattgttatgtgtgaatttgatcctgtcattatgatgctagctggttattttacctgttagttgatgcagtttcttcatagtgtggatagtctttacaatttggtatgtttttgcagtggctggtactggttgttcctttccatgtttagtgtttcctacaggagctcttgtaaggcaggcctggtggtgacaaaatctctcaacatttgcttgtctgtaaaatattttatttctcctttgcttatgaagcttaatttggctggatatgaaattctgggttgaaaatttttttctttaagaacattgaatattggcccccactgtcttctgacttgtagggtttctgtcaagagatctgctgttagtctgatgggtttccatttgtgggtaacctgacctttctctctggcttcccttaacattttttccttcatttcaaccctggtgaatctgactattatgtgtcttggggttgctcttctcgaggagtatctttgtggtggtctctgtatttcctgaatttgaatgttggcatgccttgttaggttggggaagttcttctgaataatatcctgaagtgttttccaacttggttccattctccctgctactttcaggtacaccaatcaaatgtagatttggtcttctcacatagtcccatatttcttgggggctttcttttcactcttatttctctaatcttgtcttttgctttatttcattgagttcatcttcaatctctgatatcctttcttctgcttgatcgattcggctattgatgcttgtatatgcttcatgcacttcttgtgctgtgtttttcagctccatcaagtcatttatgttcttctctaaagtagttattctagttagcaattcatctaacattttttcaaggttcttagcttccttgcattgggttagaacatgctcctttagttcagaggagtttgttattacccgccttctgaagcctcttctgtcagttcgtcaaactcattctccatccagttttcttcccttgctggcgaggagttgtgatcctctggaggagaagagacattctggtttttggaattttcagcctttttgcactggtttctccccatctttgtggatttgtctacctttggtctttgaagtcggtgcccttcagatggggtctctgagtggccatcctttttgttgatgttgctactattcctttctgtctgttagttctccttctaacagccaggcccctcttctgcaggcctgctggagtttgatggaggtccactccagaccctgtttgcctgagtattaccagtggaggctgcagaacagcaaagattgctgcctgttttttcctctggaagctttgtcccagagtggcacctgccagttgccagcgagagctctcctatatgagatgtctgttggcccctactgggaggtgtcttccagtcagaatacacaggggtcagggacccacttgaggaggcagcctgtcccttatcagagcttgaatgctgtgctgggagatctgctgctctcttaagagctgtcaggcaaggacatttaagtctgctgaagctgcacttgcagctgccccttcccccgggtgctctgtcccagggagatgggggttttatctgtaagtccctgactgaggctgttgcctttttttcagagatgccctgcctagagaggcagtctggccacagcagccttgctgagctgtggtgggctccgcccagttcagacttacgagaggctttgtttacactgtgagggcaaaaccacctactccatccttagcaatggtggatgcccctccccctacaaagcttgagcattctaagtcgacctcagactgctgtgctagcagcaagaatttcaagccagtggatcttagcttgctcggctctatgggggtgggacctgccgagccaggcactggagggaatttcatggtctgccggttgtgaagaccatgggaaaagtgcaatatctgggccgcagtgcactgttcctcccggtacagtctctcaaggctgcccttggctaggaatgggaaatcccctgacccctcgtgcttcccgggtgaggcaatgccccaccctgcttcagctcgccctctgtgggctgcacccactgtccaaccagtcccaatgagatgaactgggtacctcagttggaaatgcagaaatcacctgttttctgcattgatcttgctgggagctgcagactggagctgttcctattcagccatcttgacagccactgagaattgttataaaaaaaaaaaaaaaaaaaagctctggctagccatatgcagaaagctgaaactggaccccttccttacaccttatacaaaaattaacccaagatggattaaagacttaaacataagacctaaaaccataaaatcctagaagaaaacctaggcaataccattcaggacataagcatgggcaaagagttcatgactaaaacaccaaaagcaatggcaacaaaaactaaaattgacaaatgggatctaattaaactaaagagcttctgcacagcaaaagaaactatcatcagagtgaacagttaacctacagaatgggagaacatttttgcaatctatccatctgacaaagggctaatatccagaatctacaaagaacttaaatttacaataaaaaaaaccccatcaaaaagtgggtgaaggatatgaacagacacttctcaaaagaagacatttatgtggccaacaaacatatgaaaaaaagctcatcatcactggtcattagagaaatgcaaatcaaaacctcaatgagataacatctcacaccagttagaatggcaatcactaaaaagccaggaaacaacagatgctggagaagatgtggagaaataggaatgcttttgttggtgggagtgtaaattagttcaaccattgtggaagacagtgtggtgattcctcaaggatctagaaccagaaataccatttgaccaccaatcccattaataggtatataaccaaaggattataaatcattctactatagacacatgttgctgggcacagtggctcacacctgtaatcccaacactttaggaggccgaggcaggtggatcatgaggtcaagagatcaagaccatttcctggtcaacatggtgaaaccccaactctactaaaactataaaaaaaaaaaaaagctgggtgtggcggcatgcacctgtagtcccagctacttgggaggctgaggcaggagaattgctcgaacctgggaggcagaggttgcagtgagctgagattgcgccactgcactccagcctggcgacagagcaagactccatatcaaaaaaaaaaaaaaaaagagaaaagacacatgtacacgtatgtgtattgaggcattattcaccatagcaaagacttggaaccaactcaaatgcccatcaatgatagactggataaagcaaatgtggcacatatataccatggaatactaggcagccataaaaaaggatgagttcatgtcctttgcagggatatggatgaagctggaaaccatcattctaagcaaactatcacaggaacagaaaaccaaacaccgtatgttctcactcataagtgggaggtgaacaatgagaacacatgaatacagggagggaaatatcacacaccagggcctgtcgggggttgggggagctaggggagggatagcattaggagaaatacctaatgtagttgacaggctgatgggtagagcaaaccaccgtggcacatgcatacctatgtaacaaacatgcacattctgcacatgtatcccagaacttaaagtattaaaaaaaaaactgtagttgtaatgttgagtgctgcctaacagtcaggcaaaataatgattgaaaagtacctgttggatttaacaacaagaatttcattagagtcctttaccagaaccttttagtgaccaagtagggaagaagatccaaaagaagtggcagagtcaggaatatgatcaggatgctcaccagcactgcttctttaccactgtactgaaggccgatgcacaaaacaaaaaagtataaggattagaaagaaacaagtgtcattacttacagatgatatactattttgtattagaaaaatccaagagaatctacaagctagtgagttcaagaatatgtaaaactcagtttgatttttgttctaagtgcttgacacatacgattttatttaatcctcttaataactatgatcaactacaattttcagctccattttattgatgaggaaattgtggtgcagaagggttaagtaacttgtgcaatcacacagccatgcaaatagcagtatgagaatttgagcccaatcggctgcaagggcccagctgccggtgcctatactctctaaacaacttctctcctctattttcaaagacagagtcagaaatagtaattagaagggacccaggagggttttttttttttaatttgaagataagagaatgttgagcaggtgcgtgagggtgaagagggactaattgaaggaacttagttctggaagagattgaaaaaagaaaaaacttgagagaagttcaaccttggtcaggagaaatgtgcccttatcctctgacactagcttaagggttgttatgtctgaaacaaaccacagagtttggagtaggcatttctggtcttgttttgatcctgttgacaagtgccctctcagtacatattatgggcaatgctgcgttaggatttgttcctttaatttttgtgacatatgacgcagtttctctggccagaggcttctcttaggtcagcatacatttctcacttagttcatccaagcagtgccttcagagagagtttactacgaggaagatctgtcaggagcacatgtataacattttttagtcattctagttagttggcttcaggacaaaataaaaacctcccagctgatgaatacaaagtacctgatgtcaccttcttaaatgcctcaaagtagcatggggctactcaagttttatgatatataaacataaaatataaaacatagatttttaaaaaatgggatcaacactgctcaggtggcagttggtccaaagaaaaaatagtcaggtaccaacctctaataagaaacatttgcataatggcacatccctgacagatccaaaagggtctccaaattttattacttctgttttaccctagcaacattaataagtacatcataacaggcattttttggccaagaaaaatcaaatactctttgggaggtaaaacggattttgatgccttcaaatgaatgctggaggaatttggcaaaagacattctagcaaatgccaaaatagcagtcatccaggatactgtgtgtttgactcacagccagtcaggcacaggcaaagtctgacgtgttgcttctttacaccaccagagtaacacttaggagaatgttctagatgtgtaaatgttcaaaacttgagctcagaccagacctaagtggtatacaacctgttcaaggttgatttaattgctagcaattgtatattccttaaggtctttatggccttttgtcagcatggcatggcaagacaagaaaaattttaaaaccactggttatgtagagtgttttttgggtatggaaccatatcttgtgacttagccccggaagagtcacctgtgacaccatgattgcaggctctttggggtttggactgaagtctggaaactgctgcatatgctacatcagaaattttaaatatagtaccaggtcttaagcaaatatagaaagtgaaaacagcagaattctaacaagaattaagtgttctgataggccagtggaaatggggagcaaggaacattcactgtttcagggaaccagctttagggactgaggtatcaaaaagaagggattggatatacaagtggacaggttggagagatctctaacctgggtagagggaaaatagttagaagcacccagttgttaggttagggctagaatgagcctcatgtagaactcatcggtgtttgactagggcttcttaactcttctcttcccccctcagctcccaagtttcagactgcccaaagcctggaaaaagagctaaatctaaaattagctgaagttgctgaggatgcaacttggaggttggggcacagacttagacaagccttacgtcttcctgctccagacagtgctaagtaagggggaaatattttcctaagatagatgggcacataaccccattaactcccaaaggagtatgaaagggaatatgtgcttatttcacaataatcttttattgcaaaatttactgatgcagaagcagaaactaatgcaggtggcaagtgagaggaatgtaactttgtttcccagcatttagaagtccgtgaacccaagtgtagaccaagtgaacctttaaagacaacacatgggtattacttggtcagggtaacagaccatataagtaggtagtcaaataattctaactagaaaacctgaaaaaataaattgctgaaaaaggaggttgaatgaacagtaatcattcctgtgtgattagtaaacttttaagaccctgttatggtgaattgtatcactgtacttttcaagtagacaacattcaattagacacctgcctaaggagcatatttttcattgacttttgattatcaaaaattgagatctttctcatgcccagactattgccaaggaaacaagagtaacagtttccactcagcagcctggctaaattccagaaccccatgtgactgggcagactcctggagtctttctgatgaccaatatcagagatgccttgtctgtggcctattgtgttttcctgtataaatgcttcatgggaaaatttatactctagatcaaataaataagagcgaatcctaatcaccttttattgaacacttaataaataccagacagtatgccaagcctcaaacataaatgatcttatttaattcttacgaatcttagggacaaaccgttttcactcatgttgtagaggaagctagcctaagagagttcaaacaacttaccccaactcacccagttactaagtttcagaatcagaatttgaactcaaggagtttgatgtttatgcccatgattttaatcattatattctactgccttttctcttcccgtttttgaaattagctcagaactaaaaccattttcgaaatattagaattgtttactggtgtaattctctgtacaaaaatcttacaaagcaagtgtaaacaatggaataaatgaaagcttcaagtgaatatacacaatgaaaattatatatgaaaatattaagttcatttatgctatatcaaaaaagagacttgaacaaaaactattatttgggatatttattgaaatgcctcttaaaagagaatttgcctcttatcagtttgaaaaactttattttttttttaacttttaggtttggaggcacatgtgaaggttttttacatatgtaaacatgtgttacaggggtttgttgtagatattatttcatcacccagatattaagcccagtatccaatagttatcttttctgctcctttctctcctcgcatcctcccccttcaagtagacccagtgtctgttatttccttcttgtgtttataggttcttataatttagctataattagcaaaattatattttatcatttagctaccacttataagtaagaacatgtggtatttggttttctgtaactgtgttatttttctaagaataatagcctccagctccatccatgttcctgcaaaagacatgaccttgttcttttttatggctgcatagtattccatggtgtatatgtaccatattttctttatgcaatctgtcattgatgggcatttaggttgattccttgtctctgctgttgtgaataatgctgcagtaaacatccacatgcatgtgtctttatggcaaaatgatttatcttcctctgggtatatacccagtaatgggattgctgggtccaatggtagctctgctgttgagctctttgtagcgaggaattgccatactgctttccacaatggttgaactaatttacactcccaccaacagtgtataagtgttcccttttctccacaacctcacaagtatctgttatattttgactttttaataatagcctttctgactggtgtgagatggtatctccttgtggttctgatttgcatttctctaatgatgagtgatattgagctttttttccatatgcttgttggctgcatgtatgtcttcttttgagaagtgtctgtttgtgtcctttgcccactttttaatggggttgtttgttttttcttgtaaatttaagttccttatggatgctggatattacacctttgtcagatgcatagtttgaaaatattttctccattctgtaggttgtctgtttactctgtggacagtttcttttgctgtgtctgcagaagctcttcagtttaattagatcccacttgtcaatttttgctttcatagcaattgcttttggcatctttgtcatgaaatctttgcttgttcctatgtccaggatggtattgcctaggttgtcttccagggttttcatagttttgggttttacagttaagtctttatccatcttgagttgatttttgtatataatgtaaggaaggggtccagtttctatcttctgcatatggatagacagttttcccaccaccatttattgaatagggagtctttttccccgttgcttgtttttgtcagctttgttgaagatcagatggtcatagatgtgcagccttattcctgggctctctattctgttccattggtctatgtgcctgttttagtaccagtactatgctgttttgggtactgtagacttgcaggaattattttctaccctgcttgaattttaaaatagctctcaagggacctgatccataaagatttgcatctataatctatagagttggagcagaataatcatttgataaaaatgaaagatgtccccatttttagtttctctaacgttcaagtaatcttaaagttaaggcagatgtaaggataagatgattggggaatatcatgaaaatagccaccaaatactggactacgtgaaataggaccaaaaggggttaacattgccatggactgaacatgtttgtaccctgcaaaattcatatgttgaaacctaatccccagtgtgatggtattagaagatggggccttcgggaggtggttaggtcatgaggatagagtactcatgattgggattaatgaccttataaggggttgaagataccagatttctccccttccaccatgtaaggacatattaagaaggcaccatctatgaaccaagaagagggcccttaccagacaccatgaatggctggcaccttaatcttagattctcagcctccagaactatgagaaataaatttctgttgtttataagccacccaggttatggtattttgttacagaagcccaaatggactaagacaaacattaattttgtttttatattttcatagagaaatgatgggataactgtaatatccagttgtgtgtggcttttttttctcccctgtggaagaggggccctgggcagaactttatattcttgcacttttcaaggacttcaaccttcatctacaccactattctaattatttttatcacccaagcaggtagctgagtgtgcagcacccatccatccaggcaggtgggagcccaaagcactcctcactagggttgtagagcatgtgagtatctagtcacttggccagagcttttgactaggagacccagtcagactgactgacactcctcctgcatcactttagggcttctttttttttttctttttctggtctcttttggaaaacctgcttcggcaaattcttgttgttttaatagagaatagatttcttctgcctatttagttcagaccattattctctctcctatctttttcagactttgcactcttaagtttctctcatccagcacttccctcttcttcctttccacgtaacttcaagtgtgagggtgacagaaagactgcagattttgtggagacagagtcaaaccatgccaaacttccatcttcctcctccttcaccttctcctttttggggattgtaatgggatccatggtatcactgagctttgctacaaggtggagttgccattgattatagtgtttaactagggagactcagaaagggaaacatacttgctttttcctagcatagggttttgtttccattaagcttgagaatgaatgaagtttacaggaagctagaagtttcactgagtcaatccctgttcgctttattcatccagggctttgaagtcattaacacataaagtagtgctgaattataaatcttgtcagtaacactaagtattttcagttgtacattatactgttgctcaaggagaagtaaatacaaaaataaacaaacagtagagggcagaatcaggatttataaatggagtggctttgtgattctgctcttcataatctgactctgggtatgggatttggatacgtaaatcttattagagcaccaatttcccctccttccctcacccctcaccccagttcaacaaaaattaattttgtaaaaaaaaaaaatcagtgttgtaatgatcacacatgttcattcccatttagtctgcctaaagttatgccaggaattctgttccaggaagtacagatttacaacatcagctgtcaacttttttgtttcccatgttccagtctctttgagagcatcaggctaccaaggcagagaatttgtgatttgtttgttcacttattctttaattaccagaaacattggaggctagagtacaaaaatgaataaaacatagtccatactcaaaaaatatataattcaaagaggcttttcattcataagttctttcagtgtttactgatgatgttcttcaggtgttctcacttgcagaatgctgtggccatgcatcagaatcacctgagacgttactaaaaattagcattgcgtatgctccaccccagacctactgaatcggaatctctaagcatctgttctgttttaaagcctgataggtaattttaatgttattgctagagtgttgagaaacaaatttactgtggaaagtacagtgattgaatatgtctgcacctcaatcctatatagccttgtgttttagttaccatgtcagcatatgtcagcctgtgtctccacctcaatcctgtataagcttgtattttagttaccatattttctctgtactgttccctgttatgttctgtttactaatcctagccactagaatacctataggtttaatagctttaacactgaaattatcctggggcaggtaaaataaagttgctgctaaacaccagagttagtttattggttcagacatcacccattctggttcctattgctgctttcttattgtgactgcaaggtcgaaatcctgcacagctatttgtggttctggtttttttttttccttgaagcaaaaggatgcagcagtgttatccgaagggctttaaacagtgaaccaaatgtaagttaaatatggtggcaggagccattccataaaggttacaaacttgttttaggagtgaagtggggacttttttggcttggtgccaaaatggaactggcattgttttttcaattcagcctgcctggtatttctatcatagctttgctagttgatcagtttcctctcactatggcctcttattcattccttcatttggcaaatatttgttgaatacctacttatgtcaggcactgttaaagcagtggatgtagtggtaaataaaatagaaatggtttagtctatttctttgagccttcctcagagaaaatgtcacttctttgtcaatgtctttacagcctttatcctgagaccaggagagaaaaattacctaaatatccagtctagtttaaagcttaaactgatccagtaattcagacagtcccttggggtagtgtcataaatgatggccataggtgtctcctggtctcaggggcaaggtccctcatccactttagtgctgcttgttctgctgtcatttagggctgaaatatgtggctgtaggctgcttgctcagaacccagtagcactctggctacctgggcctccccctgacttctggttgcacccccctgagcctctggtgtgtctgccatccagttcatcctcttataatctctcagtatctgtgccttatgggaactatgggggctcaggaaacctgaacctcagacacttctctaccagacctgctacaacgctgagtcactgtttctgtgcaccatgttgtggtggaggctgcctgagagttgatcttctctagactcccaaacatgaagaaggagtgggcacttggcctttgattttatcctcacttatttaacaaactgatttatctccaggctgaggaaatcagtgttgctttgctgcacttccatctcgcatagtctggaagtctggaaggactttttcctacattatatccttctcttgccatagacctagcatggcagttatagttggatggaatatctcctctacactcccttttgtatgggcatgttggttgatatagaaaagggagaaaaagtattttggaaaagtctttaagatgacttttcgcttataaactactgttttcctgcatgtcatagattatatttttctctgcttgttcattctcccttccttttccgtgtgatatgcaacacctcctatgagaggagtacacatccttgccccattgatgttaggcttaaatgtgtgactttctttggccagtgacgtgtgaacagatatgatatagaccacatctgggcagaagttttgaaagtcagcacagggccgggcgcggtggctcatgcctgtaatcccagcactttgggaggccgaggagggcagatcatgaggtcaggagatagagaccattctggctaacacagtgaaaccctgtccctactaaaaatatgaaaaattagctggttgtgttggcacgcacgtgtagtcccagctactcgggaggctgaggcaagagaatcgctcaggaggcagaggttgcagtgagctgagatggcaccactgcactccagcccgggcaacagagcgagactctgtctcggaaaaaaaaaaaaaaacaaaaaaaaaaactagaaaagaaagtcagcacaggtttccaccagccctctttattccttctgccgtgaaagtggcatgaccaaaatcagggctgttgcttctgcaagggtcgcagaataagagtcatgtaacagaaaccaagctgcccctgacctgaatccaaactgcactgtagtgagaaaattttgtccttataaacatgaagatttggggttgttactgcagcaaagctgacttaattctttccaaatattccatgttacataacaagaggaactaaatatggaaaatattctaacctctagtttttttgggttttttttgtttttgttgttgttgtgtttgttttttgctctggagaaagaagtgaccatcgttatggaaataaatgctatgcatacagcatatccaggtgaaaattagtaattaaaggatagaaagtcttattttaagattgtgacattgttatagggacgtaatatagagaagaaggtactaaccctattcagtggtgggttaattctgggttgtgatcccagggtcattgtccacagtttgtgaacaaccatgggatcctttctgtctttatttgtgtggatgcaagcgatatagctcagattccaacaaacaccacagattcttcttgctattttttattgcattgtattttaggaatttgtaaacatgtaagatttatttagtggtgaatacacctgtttatttacttacgccagaggcaagcaaaagaactggtagacaatgaagaaagaactgttgatcccacagtgatcattttagctaatctgtgcacacatggtaatcaccatgagcagaataaattttggaaaaagaaaaatatagtagctttttcctttagaaatgcttaggattcctctggatttgagtggttggaatttccctgctgatatatttctggtttgtatatagaactgcccaccattttctgtttgagaaaaatcatttcatcatgctcaaaccttgggtttgctaagaaaaaataatagtcctaacttcggatactttattgtgatagacagggcttgcaactgaatctgataacagattcgtagttcagttctcttgagtaaataaataataagctgtgaagaaaagcaacaatgtagggccaaatcacttttaaagtaattgttcatgtgctataaatgtggaaagggaaaaaaactagatagaacatgagaaatacagtaatagttaatctagtgtattttaatacagtcaaatgctattttaaatcgtagaataggtatgacagaagagggtaatgagtggaactttttgcttaagacaaaacatactgaatgaaatttgtttctatcaagaaagagagaggccagatgtgggggttcatgcctgcaatcccagcactttgggaggccaaggcgggtggatcacttgaggtcagcagtttgagaccagcctggccaacatggcgaaaccctgtctctaccaaaaatacaaaaacaatgagccaggcttggtggtacatgcctgtagtcccagctactcaggaggctgagacacgagaatcacttgaacccaggaggcagatgttgcagagagctgagatggtgccactgcactctagcctgggtgacagagtgagactctgccccaccctgccccaccaaaaaaaggaattaaggagggtggaaggaaattaggctgaccataattgccagagcctgtataagtaaagtgaatgagaaaaggtgtgattttcctggatcaggtttcagaacttatcctgtttaacaaagaaaatcatatgttgctgattcccagaaaggcggtaagtgagcagccaccaagcctggctctcaagagtggtaggctcctcacctgtcattcagtgggcatccatatctgttggctttctgtatactattcatatttaatactccctattttcttaacactcccagctctaattcttccacagatcctactgtaccaaattttattccaaagtcaacagcatttcacatttatacttagaatactaattaaattatgagttaccatttaatgcatagagtaccctaataacctgaaaaatgaagacttgcttctgatgttgacttactcagttgttcctatactttggcagactgcatagatgtataagatattagatataatacatataattacatatatttgtgtgtgtgtatatatatgtgtgtgtgtacattctcccatgcatctcttttgtttgctagaatatccttcttatcaatatctaacttcctttaatgtccatttaaatggcatttcctctatgaagcctccattcactctctcttaacccctagctagacgttacctcttcccatgtctacattccaatagcatttaattatttttttcatagggagttttaatgatattttgttctatattatagttatttgtatatatttgtatcccccctaataatggtgatggtggtagcagctaccatatgttgagaactttctgttggccagccactggattaaactctattcctcacaataccactgtgagttaagtattactaccccacttctacaaatgaggaagttgaggctgaaagagcttgagctaggtgggccaaattcatacagctagtttggtaaagttgagatttaaaagcaaatctgttactctccagatctcatacctataaaccattcccctattactcacttatgaattgagtgaggatgtaggttgagggcaaatggaggaaactcacttttactgaatgtataatctgtgcctgacacttgactaagagctttcaggtattttatcacatgaagtagatgtttttatttacattttatggatgagaaaacccatgcttactataaacaaagataaaaataacagactttgagaagatattcgtattttattttactggcaaagaattcagagccagaatatgtttttaaaattccacaaatcaatttttaaaaaatgaaccaattccccaatttaagaaatgatcaaaagaaatgaacaggaagtttacttaagggtaacctgtaataggaaaaaacgtatgaaatgataactttattagcaattagggaaatataagttaaaagatgagataccatttcaaacctgtaatgttggcaaaaattaaaatgcctgacatgtagttttgctaaatgagaatgcacctaaaatgcacaatgctaggtacaaaagaaaatgatatgccactctggagaacactctggtgttgtgaaggttatcataccctgtgactcagcaattccacttcttaatatatatcttaaagaaattctcccaggagacatgtttagtgccaatattatgagggggatggacaaattgtgatattttcatacagtcgaaaatcataaaaaaaaaaatcatagggagttaaaacaaatgatctgccacacatctggtgtttattttctgtacttttctctatgattaaaatattaataatgtaaaacaaaagatgaaagaaacctagattccaactgtacattgtaacacttaacaaatgtttattgaattaaaatttcatttatgttcacaatggtaatagcagtcacaatttactgagtgcttatttattgctaggtgctacatatacttcatatccttcacatccaacaaccttgcaaggcaggtcttgttaggccagccactagatatggaaaacgagacctaggaaggtaaagaaaggttatcttctttcttgatatcatgctgattctcagaaattcacaaagtactgcccttgtgtcctgaaagcattaatgttccataatttataatcagttaataacctgagctttaaaatgatccattttaatatagtaaaaagtgacattcaaatactgtaaattttatattactgaagactttagtgtttgccaattcttgtaattttgtttttagactactggaggatcactggtgggaatgtgtatggactgcaaacaagtccaatttactttaaaagaggctttaaaaatacactctacagtttttaagtctagacgtttaagttgagaggagcttatttctttaaaagaaataaatgaaaaggttttgtactaaaacaggctctttcccacaaagaaagttccgtattattaagctcaaggtgctttgtaatgttctgcctattgccacctccctgttttctgtccacagccccttggcttacttgtctggcctctgagcctttgtacatgtcatttcctctgagtaaaatgttatttcaacattatagcttaggactcctatgtcaggttataactctcactgcctcatttgcaagcaattcctgtaacaacctccagatggggagatactgggggacctggggaaattgaggggaaatgggagtgtcttcaggtatcatctagatggtaactacatttcaggggcaagaacgtctcttgtagacccctgacctcaacccaggagtgtacataactggtgtggcccaaagactggggctttttgtgtccccttgcccctatttttgcataaatacatatctaacagataagctactggacctctgagctcctctcactcctctccccaacatttcttctccttcaaatttgccccattgcttttttccaaatcaccatgttcttaacctccagggtcatttttctgatctacctgaagccattctgtaacaaatgcatataacccaaaactttgtaacattaatctgatagttacttgactatatgaaaaacggtatgcagctgtggaaatagtgctagactactcagatggtctagagtcagggctggctcttccatttcacatgtgtccctgagcaagtctctttcttcctctccattagaaggaaagtaagctcactggaatcctggaaccagcctatcctggcccacaaaatacgattgttaaatttttggcaatctcatgagctttttttcttttaaaattattcaagtgtaagaatattcatgattacctgccctctttttttttttttttttttttttctggtggagtggggacagagtcttgctctgttgcccaggctggagtacagtggtgcaatctcagctcactgcaacctctgcctccgaggttcaagtgattctcctgtctcagcctcccgagtagctgagattacaggtacatgccaccacgcccaactaattttcgtatgttttttttttttagtagagatggtgtttcaccatgttggccaggctggtctcaaactcctggcctcaagtgatcccccaatctcatcctgccaaagtgctggattacacgcatgagcaactgcacccagccgcctgccctcttttgtattatattaaaatatacataacataaactttatagttttagctatttttaaagtacatacacatggtcatgaagccatcactattatccattttcagagctttttaatcatcccaaacagaaactattactccctcctcacagacccaagtaaccactcttctactttctgtccctatgaatttactgagtgtacctcatgtaagtagatattattcattatttttccttttgtgtctggcttatttcacttagcataatgttttcaaggttcgtctatcttgtagcatgtaccagaattttattccttttaaggctaaatactattccattgtatttacatactacattttgtgtatttgttgatggatatttgggttgtttccaccttttggctattgtgaagaatgcttctctgaatagtggtgtacaaatacctgtttgaatcttggttttcaattcttttgaatatataccgagaagtggaattgctggattgtatggtaattccatgtttaatttttgaggagcgaccataacattttacatagcagctgtatcattttacatatataagagttctagtttctccacatcttcagcaacatttgttattctttctctttttttagtaatagccatcctagtagatgcaaagtagtactttattgtggttttgatttgcatttccctaatgattggtaatgttgatcatcttttcatgtgctcactggctggcaatttgtatatcttctttgggaaaatgttcaagccctttgcctatttttaaaataaaattgtttggccttttgggttattgagttgtaggtgttccttatatgttatatatattaatcccttatcagctatatgcattgcaaatatttcctcccatgctgagttagttaccttttatgagctggttttaaggcacagaaattattaaaaattaaactatatgaactaaaaacttacatatatatgtatatttgagacagggtcttgcccaggctggtgtgcagtgttgcaatctcagctcactgcaacatctgcctcccaggctcaggcaatcctcccatctcagcctcccgagtagatgggaccacagatgcacaccatcacacctggctaatttttgtatttttttgtagagactgggtttagccatgttgctcaggctggtctcaaactcttggactcaaatgagctgccttggcctcctaaagtgctgggattataggtgtgagccactgcaccaggccaagttatattaaaaacaaaataaatacacaaagctaatcattttatggttatctattctcttgagatatttgtatctattatatctaaatgatggaaatcttatgtaatggtgtaccactgcattttttcgccaactctgagttcagtgatttcatgttgatagcttgaaattacctgtgatagaagtacttacaccactgaaatcaacaaacactacaaatcagggcttgatttattgttttgttgattgtctagactcaagaaagtgatgaagaaaatgttaataattcattctctatagctattacttgtgaatagcacaaaagattgagaaatattcttccagtatgggaaaattattcattgatttagcaaagaagtcactcatatgattaataaattaataaagctccaacgtacagttttttgctttacttttgtcttagttgttaaaaaatatactaattcatacattcatggtgacccacatttgaggagctagtttttaaaaatttacaaacacactactgagtaagcatcctaggagcaggaactctgtcttgttcatcactgtaaatctggcacctagaaaagtgcctagctgttgaacaaatgaagatatataacttctcagtgtctcaatttctcatctgtaaattgaggacaacagacctatgctgctacaatactggggtgagggaagagcaaacgtgataacaaagctgaaaccactttatgaacaagcagcattaagcagatgtaaagtggtcttattaagatatattatgaaatggtgagccaagatcgcaccactgcactccaacctgggcaacagagcaaaaccctgtctcagaaaaagaaaaaaaaaagatatgatatgatatcataccatatactgaatgtatttacctcatatgttggttggttaaaggactctaatagagataaggattcgtatatagataatttgtttcattcaaagaaaacatatatttattttatttctttataaataaatattttgcagtctcatttgcctggttcagtgctaggtgttctggaaaatattacagaaatagatttcttgcactcaaaagatgcatatctgctcataatgataacaaatacaacatttagagaacagaaaaattaagtgggaaatgtttggtattagacaccgtgccaaggattttagtgcttgttcttttttttctttctttcttttttcttttcttttcttttccttttttttttttttttttttttttgagacagactcttgctctcattgcccaggctggaatgcaatgggtcaatctcagctcactgcaacctccgcttcccgggttcaggcgattgtcctgcctcagcctcccaagtagctgggattacaggtgcccaccaccacacccagcaaattttttgtatttttagtagagatggggtttcaccatgttggccaggctggtctcgaactccggatctgaggtgatccaccagcctcggccttgcaaagtgttgaggttacaggtgtgaggcaccgtgcctggccctttctttttttttttttaacaggatgccaaagatattttgactagcctttctgattattaaaaacccttctttgatattattttccagggcatcttggatgatggtgttagatcatcatcagtaagcatttaatagatagtcactgtatgtactagctgtgctaataaaaatataaactctaggatttacaaaattgggtgaaatatggtctgcagaaaacaggcaatcataaatgcattagaaatatatgcccacatcagccaggcatgatggctcacatctgtaatcccagaacttttggaggccgaagtgggtggatcaccgaggtcaggagttcaagaccagtctggctaacatggcaaaactccgtctctactaaaaatacaaaaattagccggatgtagtggtgtatgcctatagtcccagctacttgggaggctagggcaggagaatcgcttgaacccaggaggcagaggtttcagtgaactgagatcagccactgcactccagcctgggtgacagagtgagactctatctaaaaaaaaaagaaaagaaaagaaatgtatacccacatcgactgttagccatctctctccctcttagctattttaatatgccaaaaattatttctctggaaataaactgcctaggtcagtaagaccaaaacatggaggacaaggagacagtgctggcttgggatttacagggcaaaagtctctatttgaccagatgataaagaagaatggaaaaagaaaggattagggccatggaagccagggctttctcctcctgccctgtacactttgtctcactccttgagtcagactagaattcttaggggtgcagccacagacctgtgcctgtggactgagaattaaacaagtgaatagattgagaacttagtgacaggacatttttaatgattatgcccccaaagtgatactttttttcagtgttctatttgcaaaggcccctatcagatttccttgctgagaattaattactcacatgcccaaacttaatcaaatttttctcatcactttatgcagacagccattaagagtagctcgacactttactaaaggagttacccctccctttttagaatacctaaatcccactgaggcatgaaacaaacagattggtgtatactgcttaactgttcctttgaggaagaatgatagtttatgtttatgtattccatttatattaactttcgtcaaaagtgctttttgaagtttatttgcattaagtcacagtctaatcccttgatctaaaccatattaaatactttgatgccagcctgtgctttgaacaaatatttcaagtagataacattaacttaaataatcctgctgcctaacatattctcagataaaatattgatttaaatgctaatatagatgtgcagagttccattttctctttccttataagcaaaaaaggataaacatttagcctttcctaggcagtgggacttaggctaatataaaaaattagctcttgtgcagtgggactgcagcagggtttgaaagccatgtttgatcaggtgcggtggctcacacttgtaatcccagcactttgggaggatgaggcgggcggatcacgaggttaggagatcgagaccatcctggctaacatggtgaaaccctgtttctactaaaaatacaaaaaaaaatttagctgggcatggtggcgggcgcctgtagtctcagctacttgggaggctgagtcaggagaatggcgtgaacccgggagacggagcttgcagtgagccgagatcgcaccatgcactccaggctgggccacagagccagtctcaaaaaaaaaaaaaaaagaaatatttggggattaatgctattagatcaatgacttgcccaaaatcagctcaatacatggcaactgatttatcagtgtacacagtgtactgtgtttaaaatccatagtgactaatgtactaaataaatagttaaatgtaatcacaataataaaaaataaaatttgaaaggccttaaccgtttacaaaatactggcagatacatgatctcatttgatctcaaaaattctatcagaggtcgggtgccatggtacatggtttttgtttttttttttctgagacagagtctcgctttttcacccaggccagactgcagtggcgctatcttggctcactacaacctccacctcccgggttcacaccattctcctgcctcagcctccccagtagctgagactacaggcgcccaccaccaggcccggctaattttttgtatttttagtagagacggggtttcaccgtgttagccaggatggtcttgatctcctgacctcgtgatctgcctgcctcagcctcccaaagtgctaggattacaggtgtgagccaccgcacccggccagttcatgcttttaatctcagcactttgggaggctgaggtgggcagatcacttgagcccaggagttcaagacaagcctgcaacatggtaaaaacctgtttctacaaaaaattagcccagtgtggtggcaagcacctgtagtcctagctactcgggaggcttatcactgcattccaacctgcaaaaccgagtgagaccctgtctcaaaaaaaaaaaaattatgtgaactacaacagttattattattatctcttattatccaaggccactctatttataaaattgtagtagctagactcgaacccaagtcttcattttttttttgttttgtttttgagatggagtctcactattttgcccaggttggagtgcagtggtgtaatctcggctcactgcagcctccacctcccgggttcaagcaattctcctgccttggcctcccaagtagctgggactacatgtgcatgccaacatgcctggctaattttttgtatttttagtagagacagggtttcgcatgttggccaggctggtcttgaactgctaacctcaggtgatccacctgcctcggcctcccaaagtgctgggattacagttgtgaaccactgcgcccaacctccaagtcttcatttgccagaaatggtagtttccacaatgccattgctgcatccctatggcctgtttcagggtataatgaagaaatacattattcgtatatataaatattaactaccttataaggactctgatggtttcttagtaaaacacttcagtggtataattcccactagattgctcagttctcttggtcaaatattatgggtagttttggtaggttttttcttttctgaccagatctgccacattttgtcagcattctgggtttgcagatgttgctgtttaattagattgctctgtagaggatgagagaaccaggaggttcatttgcataactgataagtggctgggttttgaagcaagagataatgcttctttgggtcctatgaactggtgggaaggcaaggtgttagtctttttctgttggagattatctgtaaaccgggaacttctccacatctaggcactccctgtatctgaatattgtattctgaaccttactctgtactctagcaagatgataaatgtaatgcagatataaatcaacctttcatttacttaaaataataattctgcagtaaaggaaaaaacgacagctactctgatccttgaatactgggcaaaggcaagccatctatctgtaagtgcatagtccttcagtatgacgtaacctttctcatttaatgaacattttcccctagtaactctttgtgctggcaaaccatgaaagaaagcatgtggacttggcagcccaaccctgaagtttttgtctcaaaaattattgcaatttctgtactaagggtccaaaggacatttgtttggacacagacttttctgaaattaaaaagaatgaccttatttcacttagtgaaatgagttgtactcttaaatagagtccattttgaatagtttttcttagagcaacactgtcaaaaaagaagatatattttatattcttctcattattagaagaaaatgcactattaaaataccttcagggccaggcacggttgcccacacctataattccagcactttgggaggccaagacagaagagttacttgagaccaggagtttgagacccatctgggcaacataatgagaccccagctctgtaaaaaccaaaaggtaaaaatgtagccaggcatggtggtgcttgcctgtagtcctagctactcaagaagctgaggcaggaggatcacttgagcccaggaattcaaggctgcagtgagttatgatcacactgttatactccagcctaggcaacagagtgagaccctgtcttgaaaaaaaaaaaaaagtttcagtaaggcttgcttgggtctcatggtaccatttaaaaattcctagtcctaagtggtgatttggcacaaggttaggcatagtttttttcttttcttttggggtgaaaaacagggatcacatatgattgaagatagtactatggtttttactgatatttaataaaccatacccaccttaatttcctcttgtgctttcatccctaggaaacctatagttttaaaagttaactaagtttataattgacataacatgtaatcagcaacttacacatgcctgatgtgctcgtttagttaatgctcatatagctttcagggtatctcagatactgttaaattatttaatcctcctaacaactcttgaggtaggtattctttttttttcttttttcttttttttgagacgaagtctcgctcttgtcacccaggctggagtgcattggcgcaatcttggctcaaggcaacctccatctcctgggttcaagcgattctcctgcgtcagcctcctgagtagctgggattacaggcgcctgccaccacacccggctaatttttgtatttttagtagagatgggatttcaccatgttggccaggctggtctcgaactcctgacctcaggcaatcttcccgcctcggcctcccaaaatgttgggattacaggcgtgagctaccacacccagccgaggtagatattcttattatacccattttaatgggatatagagaggttaagtacctagtctgacatctcatagctaaaaagtagggggctgagacttgaacccagaaagtttggcccgagtccttacacttaacctctctactatactacttttgtttggatgaataccagccttagataagcttgcacagaaagactcctttcctcagactgcttttccccccatcacagctgcagtcttctgtgacctagaccccctctcatgccagtctctgtcctcaccttgttccagttaggctaatgttgaacaaatgatgacaggattggttcaaccagccctgatgagtgtctctcttgaaagtatctccagagatcgagatcagcctggctaacacacggtgaaaccccatctctactaaaaatacaaaaaattagccgggcgtggtggcaggcacctgtagtcccagctactcaggaggctgaggcaggagaatggtgtgaacccagggggtggagcttgcagtgagctgagatcgcagcactgcactccagcctgggcaacagagtgagactctgtctcaaaaaaaaaaaaaaaaagaaggtgtctccagatacttgcatcactcctcctcatcatcatctatttcctttcattcctctaactttccttatagggcctccccaatggaagtaagaaaatgtcgagggtaactgaaacttaatatgaaattaatgtcatagctgggaaagaagtcctcattcaaccaccaaaattagagaatgaaccataggagagattgttctttacaaccaagctggaattcagaacatatttttcaaaggaaacatttttatattaatagtttgtattactttcagaatagtataggcctacactttattcgttgactcattcaatcatttgttcagcaactttttagaacaccatgtgcaagatattataccaatctctagggataaaaatcaccaccatggttaagtccatgatttgacctaatcattattaatatcattgaatcagtgagaaaatgctcatgaatttctaagtacctaagttactgaagaactttggaaatatatcttttttgtaacttagggacttaacctcaaactcctgggctcaagtgagcctctcagcttagcctcccatgtagctgagatgacgggggcatgccaccacgcccagctaattttttcaaaatgtttttgtaaagataggatcttgctatgttgcccaagctggtcttaaactcctcgcctcaagcagtcatcctgcctcagcttctcaaagtactgggacaaaataattgactttcagaaatcaatgtgtgcttttcataatgagaatctactttttaagatacaataggcggggcgcaatggctcacacctgtaatcccagcactttgggaggccaaggagggcggatcacctgaggtcaggagttcgagaccagcctgaccaacatggtgaaaccccaccattactaaaaatacaaaattagctgggcatggtggcgcatgcctgtaatcccagctacttgggaggctgaggcaggagaatcccttgaaccggggaagcagaggttgcagtgagccgagattgtgccattgcactccagcctgggcaacaagagcgaaactccatctcaaaaaaaaaaaaaaaaaaaaaacccaataacttgccagtaaccaataatgttttaggtgaacccaaaagattatgttaaacccagattatacttatgtaccctgcaagtgtaccccctgttaattgagattggtgcataacattagtagtcatatcctgtaattttgtgccacccacaacacttctcaataccgtatctgttcagtgaagatgtttgggaagttagtgaccggttttgaaagaggcataccaaaatttgttatgtttttctttcatctatgaatagaacagttacccttatttaatttggtaggggaactttatcatttaatgccgtattctactatagacttgaaatggctaaatacacttaagttctaagaaagcttcttactaaatgtgattaggtatatggttttgcaaagcctagatgtgtcaaaagaatatctgcagagtgtttagaaaagtttagagtctctgtgatagtcaggaagactttggaagtgtcatttattcagtggtgcacttacagtcagccctctctatccgcagtccatttcacttgtctttgggatatctttgcttgagaaacaaaatgtgaacaagcagtcacccttttaggaatctaggatttcttagggagatttattaagtcaatatttgtcagtatctgctgaatccttaaaatgaaggtctttagaaatttgcacatagcagtgaaagtgaacagatggtgagttcaggaaggaaaaagaagagtcaagcagtaaagacagatggacaccaacaaatatgaattgaatagcccatttgttccctctttagctgttgcacttgaaacctctgatttctgatcccaccaaaagtctagtgaaaaatgctcctcgatgtctcgctggcatttttctcaagccccatcctttttgacctctgggtagcattttctgttgtgacctcctacaccctcttgagcctctttcttgctttgtgacagtctgctgattctcagattactgctctgatgattccttctttgatggcgtcatcagggtctttttcttatcctaaatgcaagtattccctaaggttctgccctttacccttctctttcctcctcctttgctatctcccttgatgatctcatccactttcatggcatcagctcatttgtatgcataatagtctcacatctatagcttcagcaatccagacctctcctcagggcttcagtcgcacatttccaacagcctgtcaggtggcttcactaacacttcattgtgtccagaaccacacatcatctgtccgaccttcttctatttctctcctgggcacctgttcttgaatgacatcagcattctccaagtcacctttgactcttccctcttagtgatccccacaacagttagttgcctggacctgttgatttatatcctaaacatctgttggctctgtctctcaattcccattgctacaaacttcactactaccgtattaatttctccagagagcagttcttatcgtcttcagttctctacttaaaacttttaaggatgtaaagtattaggaaggaagaaagggagggagagaggaagaaaagaaggaagggaaattaaaagaaaaagaaaagaagcctacttagctgggcatccaaggccctaaccttctttccttctttccttaatccaccaagcagaagcaacaagaccccactgccactagccaaatgttctgtctcttctaaattatctgtacctcttttccacctgcattccagttattagtgttcatattttatctctagtattagagatcatggactcttctcatcttgttcaccctagttctctcatcgtgcccagtgctatgctttacacatagtaggtacccactgaagcattttttttttaacgttgagtaatgaagtttgaacaacttctgcccacagttagggctcttttgcccagcataaaagctatatggaagagttccctgttgtattcatgtttgtttaacttcctttctgttttctgtgcttcaagtaatccattccattgtcaagaatatcatttgtaggtctggtttagagaagaggttcttgaggccaggcatggtagctcacgcctataatcccagcactttgggaggccaaggcagctggatcacttgaggtcaggagtttgataccagcctggccaacatggtgaaaccctgtctctactaaaaatacaaaaattagccagttattaattagccagctactcaggaggccgaagcaggaaaatggcttgaactcaggagatggaggttgcagtgagctgagatcgtgccactgcactccagcttgggtgatagagcaagactctgtctaaaaaaaaaaaaaaaagaaaaggaaaaaagattgagaagagattcttggaaggcttcatctctgaggttagtcatcactgtaatcctagagagcttctggtaactgattgtttctgggtaattcactgtattccataaccacttgggttttctgctgtgtgtaaagtggagacagaaggcaacttgctttcctcttgagtatttctggtaattcattgccaagccatccatggcagaaagttccctcagcagaatagatgcagccattccagagatggaatctgtcctcaacaatagcctgatcaatcttagtggataattcccttataaatagaaatgattctttatggccagcataatgcagaaattggataataaaaatgtttaaacccctttgaaggtcagggtatgatgttagggaagagtagcctctgtgctctgtctaatatactcaggttccaaaaagatgcagtagagatccacagtgtttactcctgggcagaattcttatttgaatttctgtctccattcttacttttataagctgagttggacagccaaacagggaactttaagggtaataaatattaccttttccccttaagcctgggacctggagcaagctcttagcagcctgttctctgggcctttcctcttagtacctagaagtacacagcaccccaaagcccccaggaaacctatgcctcaaaaaaactccataaaagtggatttttttttcaaacacagtctcactctgtcacttaggctagagtgcagtggcacaatcacggctcaccgcagcctcgacttcccaggctcaagcaattctcccacctcagccagctgagtagctgggactacaggtgtgtgccaccatgcctagctaattttttgtattttgtagaggcagagtctctccatgttgcccatgctggtctcacactcctgggatcaagcaatcatcctgcctcagcctcccaaagtgctgggattagaggcatgagccactgcacccagccacatgttactttaaaaatgtacagaaagacaaatgtcttttgcatctttaagatttctttttcactcctacaaaggttccccccagccatgtttagtgataactgcattgagcaagtcttattacctctctgactcattatcagtcatatgagctactgtgacccaacccttagaaagctgggcaaagaagagatagtgtgagctgaggcaataaattagtgatttgttcatccattctttattcatttccttatttttatttgttcaacatttattatttactacttggtaggaactaagataagatgatgggacagacatggttcctgtcgtcgggaagctaattttttgttattgttgttttttgtttttgagacggagtctcctctgtcacccaggctggagtgcagtggtgcaatctcggctcactgcaagctccgcctcccgggttcatgccattctcctgcctcagcctccccagtagctgggactacaggcgcctgccaccacacctggcatatttttcggatttttagtagagacagggtttcaccgtgttagccaggatggtgtcgatcttctgacctggtgatctgcctgcctcagcctcccaaagtgctgggattacaggtgtgagccactgcgcctggcctgggaagctaatttttaatggaggaactctacaagtttaatgctgtgattcttaacttattttaggtcagagaatcctttgaaaatctgatgcaagtattagcttccacaatgaaaatacatttacacaaaattttacatacaaaaatctttggtgcaccacatgttaaaaaagcctgtggccgggcgcggtggttcatgcctgtaatcccagcactttgagatgctgaggcaggcagatcacttgaggtcaggagttcaagaccagcctggccatcatgaggaaaccacatctctactaaaaatacaaaaaaaatagccaggtgtgatggctcacaactatagtcccagctacttgggaggctgaggcacaagaatctcttgaacccaggaggcagagattgcagtgagctgagatggtgccactatactccagcctgggcaacagagcaagactctgtctcaaaaaaataataaaataaagccttctacatgaaataaaggcttctagaaataaagccttacaggctcatgcctgtaatcccagcacttcagaaaaatgaggcaggagtgtcacctgagtccaggagtttgagaccagcctgggcaacatagggagacctcatctctacaaaaaaaaaaaaaaaaaaaaaaaattgccgattgtccccacctactcagtaggctgaagtgagagaatcactagagcccaggatgttaaggctgcagtgagccatgatcatcccactgcactctagccacaacaacagagcaagaccccatctctttaaaaaaaattagcagccaggcgcagtggctcacgcctgtgatcccagtactttgggaggccaaggcgggtggatcacctgaggtcgggaattccagaccagcctgaccaacatggagaaaccccgtctctactgaaaatacaaaattagccggggtggtggcacatgcctataatcccagctacttgggaggctgaggcaggagaatcacttgaacccgggagatggaggttgcggtgagccaagatcacgccattgcactccagcctgggcaacaagagcgaaactctgtctcaaaaaaaaaaaaaaaaaaaaaaaaattagttaattaattaaaaaaattagattttaaaaattcaaaaaattaaaagataaaaatatctggccttgtagatactaggaaaatgcaaagtatgttaggatgttaatgtccattttgatcagcagacagagaacttgagggattaaaaacattgttctcaaaacagtcaagtttgtcaaatgtgtacattaactccaaatgaaattctaggccctcacagtatcattaaaagcagaggtttatatatatgtaggcataccttggagatattgcagaatcagttccagaccaccgcaataaagtggatagtgcaataaagcaagtcacagattttttggtttcccagtgcatataaaagttatgtttcactatactgtagtctgtcaagtgtgtaatagcattatggctggaaaaaaacatttatatattttaatttaaaaatgctttgttgctaaaaaaaaaaatggtaacaattacctgagccttcagcaagttaaaatcttttggctggtggaaggtcctgccttgatgttgacagctgctgactggtcagggtggtggctgctgaaggtggctgtgacaatttcttataataagataagataaccatgaagtttggcacatcagtggactcttccttttatgaaagatttctctgtagcatgcaatgctgtttaactgcattttacccacagtagaacttctttcaaaattggagtcaatcttctccaatcctgccactgctttatcaactaagtttatgggatattctaaatcctttgttgtcatttcaacaatgttcacagcatcttcaccaggagtagtttccatctcaagaaaccactttctctgctcatccataagatcttgagattgcggcaattcagtcacatcttcaggttcaacttctaattctagttttcttgctatctctaccacatctgcagttacttcctccactgacagcttgaaatcaagggttggaatcaactttttccaaactcctgttaatgttgataatttgacttctccccatgagccacagatgttcttaatggcatctagaatgatggcattcagttcttcaatttactttgcctagatccatcagaggaatcactattcatgcagctatagtcttatgaaatgtatttcttaaaataacacttgaaagtgcaaattactccttgatccatgggctaccaactggatgttagcaagcatgaaaacaacattaatctcctgtacatctccatcagatctctttggtaatcaggtagagtgtcagtgagcagtaatattttgaaaggatttttttttctttttgagcagcaggtctcaacaatgaactgaaaatattctgtaaaccatgctgtaaacagatgtactgtcacccatgctttgttgtttcatttatagagcacaggcacaatatatttagcataattcttaaagatcctgggatttttagaatggtaaatgagcattgggcctcagtttaaagtcaccagctgcattatcctttaatctgagtcagcctgtcctttgaagctttgaagccagacgttgactttactccatctatgaaagtcctagatggcatcttcttccagtggaaggctgtttaatctacattgaaaatctgttgtagccaccttcataagtgatctcaggtagatcttctgggtaacttgctgcagcttctgtatcagcacttactacttcatcttgcacttttatgttatggagatggtgatatggtttgaatgtgtgtccctgcccagatctcatgttgaaagataatccccagtgctggaggtagggcctggtgggaagtgattggatctggtgggggtggcttctcatgaatggtttagcatcatccccctagtgctgttcttgggataagagttatcatgagatctggttgtttaaaagtgtgtagcaccttcccctcactcttttcctcgtgctccggccatgtgagatgccttgcttcccctttgccttccaccatgattgtaagtttcctgaggcctcccaagaaatagaagccgctgtatttcctttatagcctgcagaactgagtcaattaaacctcttttctttgtaaattacccactctcagatatttcttttttcttttttttttttttttttttttgagatggagtttcactctttttgcccaggctggagtgcaatggcgtgatctcggctcactgcagcctccacctaccgggttcaagtgattctcctgcctcagcatcccgagtagctgggattacaggcacatgccaccatgcccggctgattttgtagagacggggtttcaccatgttggccaggctggtctcgaactcctgacttcagatgatctgcctgccttggcctcgcaaagtgctggattacaggcatgagccaccacacccagcctcaggtatttctttatagcagtatgagagtggacttaatacagatggcttctttccttaaacctcatgaaccaacctctgccagcttcaaacttgtcttgtgcagctttcttatctctctcagccttcacagaattgagaggtaaggccttgctctggatttggctttgattaaagggaatgctgtgtcttgtgtgatcttctatccagaccactaaaactttctgcatatcagcctgaagactgttttactttcctgttattcatgtgatcactggagtagcactttaaatttccttcaagaactcttcctttgcatttacaaatttggctatttggctcaagaagcctagctttcagtctatctcagctttcaacctgcttttctcactaagcataatcatttttagcttttgatttaaagttaaagacatgtgacttttcctcttacttgaacacttacaggccattgaaaggttattaattggctaatttcaatattgttgtgtctcagggtatagggaggcccaaagagagggactgagttgggggaacagctggttgatggagctgtgaggacacataaaacatttgttaagtttgccatcttctatgggcatggcttatggtgccccaaagcaagtatagtagtaacattaaggatcacagatcactgtaagaaaaaataatattaatggaaaactttgaaatattgcaagatttaacaaagtgtgacacagagacatgaagtgtgcatgtgctattggaaaaatggtgctagtagacttgctggatgccaggttgccacaaaccttcaatttattaaaacaaaaacaaaaacaaaaacatagtatctgtgagtcacaataaagtgaagcacaataaaatgaggtatgcttgtactgatatgtacacacataggtatacatacatgttaaataaaaactatggcattttctctggaagtttgatttaacattcatttgaagtaccttggctcactggtgtgggtgtgttactaaatttcttgtaaggacacattcctcttggagagaatgctggtttgaaaaataaatatgagagctattggtccaaattgctattatagattaaaaatcaaattgttttacagaaaatttttagtcaaaccatgctgccaaaatagggggtgaaacaattcataatgctgggttcctaataatttattcatttaacatcagcaaatatttgttgagtgtctacagcttgctggacaccattctaggcccctttcttcttcagtgaacaaaagagacaaaaattcatgtcctcataaattctagcagtgatccaggggtggagaataagcaatgaataataaacataaaaaaattagtaaatgatatatggtatattagaaagtgataagtgctgtagaatacgaaaacatagagtagggtaaggaaaatggggactgctagagttggatgggtggttgtaatatcaagtatacgtatcaaatacggtagtcagtgtgggccttgttgaagtgagattgaacacttgaaggaagtaaaataatcatttctggcagaggaatcatagccaagggcataaataagattatagctgtagagtgtgacaaatagcaaggaggctattgtgtttggagtaaagtaggatgatgaagggagtaataggaggtgaggccagaaagttatagggacatttttaggactctgggttttactcttgagtgaaatagggaaccatcgcagggttttaacaacctacatctgagtgttttgtgatcattggaatgttaagaggagtgattgaaagtgacttacatttttaaaagcactaccctgactgctatgttgatgacagactgattaaggggcaagggtagaggcagggagactagctgggtgcaatctaggcccaagacgatggtggtggcttggaccagggtgattgatagtggtggaggtggtaagatgtggttagattctgaatacattttgaaggtagaactgataggattttctgacagattagatagatgtgtagtatgaaagagagagtaaagactccaggatgattccagggttttttatctgagcaactagaaggatggagttgccatcaactgaaatggggtaggctgtgggtggaccccatttggaacaaaagatcaagagttcagtcttctgctgtggtatgacttgggaattctttccttgtatcctgggactgagcacataagtaaagtgaggataataggaggtaggtctctcattgttagaaaagggagttacaagtatggaaaggggggagactagaattaagggaggagaccacccctcatattgtcttatgcccagtttctgcctccagagaaagaagaagtaaaaactaaaaggcagaaatgaaatccacaggcagacagccccgcgccgcaccctgggcctggtagttaaagatcgacccctgacctaataggttatgttatctatagattccagacattgtatggaaaagcactgtgaaaatccctgtcctgttctgttccattccaattaccagtgcatgcagcccccagtcacataccccctgcttgctcaattgatcatgagcctctcacgcggacccccttagagttgtaagcccttaaaagggacaagaattactcactcagggagattggtttttggagatgtgagtccgccgatgctcacagctgagtaaagccctttcctttcacaactcggtgtctgaggggttcttgtctgcagctcatcctgctacagaatgaaccctttgaaattggaatagaattagagatattagtgtaaacccatggtttttaacattgagatacagaaatggatataaatatacaccctcaaacatactttcttaacttcattactgagaaggcctgtgacgaatgagcctccaataacaatgatcacacaacacccagatgtaagtttttaaatgccactctccactaaaaaaatcaggtgcctttgagaactagctgattctgggccagggcagagaaagggtaagatgggcctgggacatcttattgtgctagaaagttgaaaagtgctcaagtaatgatgacatgtcaaaaggacaggaaacaacttgaaggggctcactgtggccaaaccgaggagtcttttggcatcaaaataaagaatgaactgggtgcggtggctcgcactttgggaggctgaggcaggtggatcacttgaggccaggagtttgagatcagcctagccaacatggtgaaaccccgtgtctactaaaattacaaaaattatccgggtgctaattagccagctactcaggaggctgaggcaggaggatcccttgagctcaggggttcaagacaacattttgaaaccccatttttacaaaaaatacaaaaaaattagctgggcgtggtggcatgtgcctgtagtcccagctacttggggggctgcggcaggaggatcacttgagtgtgggaagcggaggctgcagtgagctgtgttcatgccactggactccagcctgaatgacaaagtgatttttgtctcaaaaaaaaaaaaaacaataaaattggatctttatcttatgccatacacaaaaataaactcaaaatggattaaagatttaaacataagacctgaaaccataaaaatcctagaagaaaatatagggggaaagctccatgacattagtcttggcaatactttttttaatatgacactaaaaacacaggcaacaaaagcaaaaacaagtagggctacatcaaattaaaaagtttctgcacagcagagggaaccatcaacaaaatgaaaaagtgtcccacagaatgggagaaaatatttatagtccatatgtctatctgataagggattaaatccaaaatatatgagactcatacaactcaataacagaaaaacaaataacatgatttaaaaatgggcataggagctgaatagacatttctccaaggaagatataaaaatggtcaacaagtatatgaaaaggtgttcaacatcactgatcattagggaaatacaaatcaaaaccacaatgagctagcacttcaaacacgttagaatggctattataagaaagacaaaagataacaagtattggtgagaatacttgttatcggtgagaaaagggaacccttgtacactcttaatgggaatgtaaattagtatagccattttgaggctgggcatggtggctcgcacctatagttccagctactggggtggctgaggtgggaggattgcttgagcccaggaggttgaggctgcactgagctgtgttcacaccacttcactccagcctgggcaacagagtgagaccctatctccaaatactaaaaaagtatagccattttgaaaatcagtatggaggttcctcaaaaattttaaaatagaactaccacagggtacagtggatcacacctgtaatcccagcactttgggaggccaaggtgggtggatcacctgagatcaggagttcaagaacagcttggccaacatggcaaaaccccgtctctactaaaaatacaaaaattagctgggtgtggtggcacttgcctataatcccagctactctggaggctgaagcatgagaatcgcttgaacccgggaggcagaggttgcggtgagccgagattgtgacactgcactccagcctgggggatacagcgagactctgtctcaagaaaaaaaaaaaaaaatagaactaccatgtgatccagcaatcccacttctgggcatatatccaaaggaaatgagttgaagagatgtctgcactctcatgttcattgcagcgttattcacaatagccaagaaatggaaacaatcttttaagtgttcattcacaaaagaatggacaaagaaattgtggtagggtgaggtgcagtggctcacacctgtaatctcagcattttgggagactgagcaggaggatcacttgagctcaggaattcaagaccaccctgggcaatatagtaagaccctgtctctacaaaaaaataaaaaatagctgggcatggtgcatgcctatagtcctagctactagggaagctgaggcagaagcatggcttgagcccaaggagtttggggctgcaatgagcactccagccagggtggcagagcagagtgaaatgctgtctccaaaaaaacaaaaacaaagaaatcatggcacatatatatatatatatatatatatatatatatatatgcatggcatatatatatatatatatatatacatacacacacacaaatataaaatggtatatcatgtatgtgtgtatctgtatatcacacatatatctgtgatatagatattccattgtatatgtgtgtgtgtattcacatatatagatacacacacatgtgtatacaatgaaatactacccagcctgtaaaaaggaggaagtcttgccatttgtgacaacatgaatgcaactggagggcattattctgagtgaaataagtcagagacaaatactgcatgatctcacatatgtggaatctaagaaagtcaaacgcataaaaagagtaaaaaagtagttaccaggagtcaggtgtgggggtagggaaatgggaagatgttggtaagagggaacaaacttgcagtcataagtaaattgtggagaccgaatatacagcatggtgactataataataatgaattgcatactaggaaaaaagtttttaaatgggtgtagagttttgattttgctagatgaagagttctggagattggtcgcacaacagtgtgaatgtacttgacacaactgaactgcacacttataattaaaggctgagtgcggtggctcacacctgtaatcctagcactttgggaggccaaggcaggcagatcacctgaggtcaggagttcgagaccagcctggccaatatgtcaaagccttgtctctactaaaattataaaaattagccaggcgtggtggcacacacctgtaatcccagctactcaggaagctgaggcaggagaatcacttgaacctgggaggtggaggttgcagtgagccgagatcacaccaccacactccagcctgggcaatagatggagactccgtctgaaaaaaaaataaaaatgaaagcaacttgtgaagagagaaaaaacagtgttaacagctgaggaatgaaattatcgtctgtttgtttcctatccctagcatttgatgattacagcttattttctttttccagaagttttggtgcttgcttgccagcaggttgttcccagagattgtctgtgttctagaaagtgacgtcattttgcatggtagagagcagctggatagaaataggcctgcctatctcacggcagggcggagtcttggaatgcggagtctttcattcaaatcatactgaacttcctgatgtgaaatcagccatcatctcacaagcttatctcatcaatttcctggtagaagcagctgtgctgccagggatagaatcctctggccagccattattagatctgaaaaagcaccccttgttttccctttagtgctcaagccttagtgtctgccagtttgaatggcagtggagtttagggatttgtatgtacttaaactgaataaggtagagagcctaatggtcatgacagaattgacagacaccctctctgtggagtgttggatcacatatgcattgcctctgatcagtctgcttgcttgaaactaatgtcaaagacaatgtctagtgttgcctcttacctttaataggaaactagaaatagaacccttggtcacctgtgcagagatttgccatcagagaacttcatctgtcctttaatacttttgctgtgtcctggaaatgatttctttacttgtcttccaggatatgtcactcattcctaccaactaataataagcatatctaaatcttgtagaccactttgcaatttacaaagttatgtatctattatctcatttaatcttgatagcagaactaaaaggcgatagtcttatccccattttgtggagaaggaatcatagcttcagatcatataccacctgtaagcagctatgatcgttatatccctgatgacaataccttagttccacattgaaccagttgaagatgttaattatattatctaacaaagtctctttagtgtgatgtaggaaatacctcacacaaaggaccattttactatatataatataacatcatgttgtataccttaaatatatataataactttttttaagacaggaaaaagaggcctttaagaggcctactggaagtagaccggagatctcaatgtcatgaacattgaagaacatatatttttgttgtcattatggttttattgtggttgtttggaaacaacacaagtcatatggactgaaactgttaattgtttcttgtggcgtgcatgatcattctgatttttctataaagagtagagatagatagacgtgtttccttttcatcatttgcaagcattgtctagattatggggaggcaactgccactgttagatttcaataatataaaaagaatagaaatcaggcccaggggaaaaatccactcactttggtagtagaactacatcaagaaagctcaggggcaaggagacaacaggcaaggagacagtttctcctatggagacagactaggttctatcagcaattctggtatcctgtgtcattgccagcaggcaccctgaagggaatgagatgaaccacaagagaatgtgttggtaagaatatatcctttgcaaccttactgcagaatggggaatttcttttgagcttgatccgtttttgttccctagagtcaaaaatatgttttcttgaggaatctcaagagtagaatctttgggtgtggattggggagaggagtgcgcagagaacaggacaacaatgaaggctggttttagagaggtagagcaaagatgccgtaaacaagcatagtagttagagtattgtgagatgaaatttgggagttacccttcaggcctttatcatcataagagtcattttctttctggtgctagcagcattcttctgttaaggtaggtcccctgtgtctgtcttcttgaaagtgggagttcaaactttctctcttttctttcttctcatcatgactagagtatacctgagcagatatttgtgtttgtacattctagttcagtgatattcatgttttaatcattggaaagctttaaagaaatatcagtgcatgtatcatttttttaaaagccccccacatgattctaatatatagccaaggttgacactgttcaagagcagtgtttatcaaactttaatgtgaaaatgaatcatctggggatctcgttaaaagatggtttctgctttcagtagatccaggatagagcctaaaattctgcattttcaacatgcagaacactttgagcagcaaattccagaacaatggctctcaaactggtatacaaaaaaaaaaaaaaaaaaaaatcagctgaggagcttaaaaaaaaaaaaaaggcaatccccactcagatcaattcagtaagaatctataggagagaaactgagggtttgaacatcagctagatggtgaaattgaactttatagcactcatcacctcacagaaatatcaatgtaaacaactatccatgcatgaaaataccttcacaagaactagggaaatcagatgagggagtacagcaatgaggtatcatgtagaaataagaaaagatacattgaagagggcaggaaagacagttttacgttaccctcgtcacacttccccaaacctcagacagcacagcatggagaaagataccctctgtgtgagggaaggagagtgagtaccggacgttgcctcattcctcaacactgggcctgtcccagtaaaacccatcactgggtaggccccatggtccctgactccaggcctgtacctacagactaggcttccaagtccaccacagtgccaagctagatcctgcagccccaggctccaggcctgctcagtggaccctgcctccaggccagcccctgcagacctagtctgcaggcccaccccaggttccagaacagcccagaggcaggtcagcccacacaaccccaggctttaagcctgccccagtgccacggcagaagcctaggcctcaggcaccaagccatcaccttcagacacgggctccaggccaggctgatcctcgtgaccccaccctgtaggggagcctctgcagccctacactccagcagctctggggttcagccctgttctagcagatccagggtccaggctcatcccagtagaccccagcactgggctggaacccatggacacaggctctaggaacatccatgtggaccaaggttccaagctggctctcacggctccaggacctacattagccctcaaaaacctagcctccagacctaacctccaggcatatccccatggacccagtcttcaggccagtccccaggattccaggtaccatgccagtacccatgatcccaggctccagaccagcccctacagatccaagcttcattcctgccctaataccaggctggccccaggctccaggccagtccccatagacccaacctccagtggacccagaatccaaacctgcttcagcagacccatggtccagacccactcctgtagacaccagtgccaggacagtctccatgaaccatgtctccaggaccactcctggtgacccatgctccaggccagctcctgtggacctaggacccagcctgcccccacaaactcaggctccaggcacaccccagcaccaggccatcctctttgaaatcaggcttcagccctttgtagctgcagggtcttcatccatggatttaaccaatcatggatcacaaatgtagttaagcctacattggttacatctgtactaaacatgtacagactttttttcttgtcattattccctaaacaatacagcataacagctatttacatagcatttactttgtattaggtactactagtaatctagatatttaaaatgtgtgggaggatatgcatatgttgttatatgcaaatactatattgttttatataagggacttgagcatctgtggattttggtattctcaaagggtcctggaaccaattccccacagatgctgagggatgactatattcaaagtgctaaaggagaaaacaagaatacctggaagctgtccttcagaaatgaaggagagagaaaggctttctcagataagcaaaagctgagggagttcatcaccaccaaacttgtcttatgaaaacggctgaacggagttcttcaagctgaaagaagaggatgctaattagtaaacattaaaacatacaaactcactggtaaaagtaagtacacagtcaaattcagaataatattgtaatggcggtgtgtaagttacttatatctttagcatgaaggttaggcaaaactatttaaaaatgctaagcgcagggtgcagtggctcacgcctttaatcctagcactttggaaggctgaggttggtagatcacttgaggtcaggagttcgagaccagcctggccaacatggtaaaaccccatctctaccaaaaaataaaaaaattagctgggtgtggtggcatgtgcctgtagtaccagctacgcaggaggctgaggtaggagaatcagttgaacctgggaggccagtattgcaccattgaactccaggctgggcaacagaatgagaccttctctcagaaaagtaaaataaaaataataatagctataataattgattaatgaatacacaatataaaaagatgtaaatgttgatagtaaaagcataatatgaggggcaggtagagtaaaagtattgagtttttttacgcattcaaagttgttaccagtttaaaatggcctgttataactataagatgttctgtgtaagcctcatggtaaccacaaaacaaaagcctatagtagattcacaaaaaataaaaagtaaggaatcaaagcctaacactagagaaaataaatcacaaaggaagatagcaagagaagaaggaaaaaaggatccacaaaacaatcagaaaacaactaacaaaatggcaatagtaagtccctacctatcaataattactttgaatgtaaatggattaaattctctaatcagaaggcatggaatggttgaattaatttaaaaaacaagacccaactatatgcttcctacaagacactcatttcaccattaaggacacacatagattgaaagtaaaaggacggcaaaacatattccatgcaaatagaaatcaaaagaaagcaggggtaactattcttatgtcagataaaatagactttaagtcaaaagctgtaaaatgagacaaggtcattatataaagataaggaggtcagttcatcaagagactataacaattatacatatagatgcaccaacactggagcacctaagtatattaaacaaatattaaaggacttgaagggagagatagatcgcaacacaataatagtaggggactttgatacccaactttaagcaatggacatttcatccagacaaaaaaaatcaataaggaagcattggacttaaactgtactttacatcgaatggacctaacagacatatacagaacattgcatccagcagcaacatcatatacattcttctctagcacacatggaacattctccagggtaaataatatattagggccagatgcagtggctcacgcctgtaattccagcactttgggaggccaaggcgggcggatcacgaggtcaagagattgagaccaacctggccaacaaggtgaaaccttgtctctactaaaaatacaaaaaaattagccgggcatggtggcacgcacctgtagtcccagctactcgggaggctgaggcaggagaattgcttgaacctgggagttccaggttgcagtgagccgagatcgtgccactgcattccagcctggcaacagaatgagactccatcccaaaaacaaaacaaaacaaaaaaactattatgttagagcacaaaacaagtctaaataaatttaaatgagtttaagaagattgaaatcatatcaaatatcttttctgcccaccaaagtatgaaactagaagttaagaactggaggaattttagaaaatttccaaatatatggaaattaaacaacatgcttctaaacaacaaataggtcaagaagttaaaagggaacttttaaaatatcttgagacaaaaatagaatacaaaataccaaaacttatggaatgcaccaaaagcagtgctaaggggtgagtttgtagcaataaacatctacatcaaaaaaagaaaaagtgcccattgtctcatgcctgtaatcccagtgctttgggaggctgagacaggaggaccacttgagcctgagtttgaggttacaacgagcaatgaccatgccattgtactccagcctgggcagaggaataccccatctctaaaaataaaataagaattggagactgatttgagtaataataaaactccagtccagccgggtgcagcggctcacacctgtaatcccagcgttttgggcggccaaggcaggtgggtcacctgagatcaggagttcgagaccagtctggccaatgtggtgaaaccctgtctctactaaaaatacaaaaattagctgggcatagtagcatgcacctgtagtcccagctactcaggaggctgaggcaggagaattgtttgaacccagaggcagaggttgcagtgagctgatatcgcaccacggctctccagcctgggcaacagagcaagactccatctcaaaaaaataaaaataaatataaaactccagtcccttgcaaaaaaaaaaaaaaagaatttacaaccttctcatcagtaaatatttggacatattcaggaatgcccaaccaccaaccaatactttacatttttgctatagagacaattctcaagtctaaaactccacgtcagattaaaacaaaacaaaaacaaactcagaacaatctccaactggaagtttgattaaagaacaaatttcatttctgctgtgagactcattagtggagaatatttgtagtctctatttctaaagccaactttattattttcaaagccagaattatagtagaaagcaaatattcctagtagtatttttttaatagaagataccttatcgtcaaataacttatagtttaaagagtttctgtttctctcatacttcatcttgctgggagctatcagcattcagggtttggattttttctgacacatggttttcttctggaaacctactaattagtaaaaggatgcagggctaggacactgcgctgtgttagagattttattattgagccatctccaaagaatgttggaccaagattcgagtttagcagagctaatacgtaaatggagttgagaaaacaggagaatggagaacacatcagtgccctgtttgaaaatatcaatcccttacctggtaggcctgatgatttttaatagagacgagattgtggattttttgtggcaagaactgtctagtttaatgttcaagaattatcagcaccaaagacagatcaaaaggtcaatatttgtcctccctgtaaatgccttgtcctgggagggtgttaatatgcccaatttggcaatgaatttatggatttttataatgaatatccatatttcaaacccaggcaggtgctctggagcagtactgtctgagggcacagaatgcagcagcagcagtagcagcagcagcaaagacctgtcccaggcattcagggctcatgtgtatggatgcaccgatgctgtgggagctgcgtacatcaaagccactgcagtccccatcacagagcctcacagaaaaaaggattgttctgcagctttcctttcccatcagagttccactccataatctaatgccctttagctggagaggatctgggagaaagggagctgaatgtgcaaagcaaagaacaatttaagtacagtgctcaaaaataattggcagcttcgggtaaaatacagttctacaatgataaaaatcacagcatcttaactctggcagagacctgtacaggtcatacagtccatcttcccttgcctgttttcaaaacttaaaccattctaattggataagaactaatttttcattttaggacttgcagaaagaaaattacagagctctctttgaaatctgttctgatatatagtacctctttcactgtaagttcatttttaagttaacccaaatccatcatgttccagttaaaattggtttttgtttgttcagtcatctatagagatgtataatgactagtcggtatcccttatgtaaaagtcattgaagatcagccatagttaaattaccacttcaactgtcttttcagtggctaaaatctatcaagttccttaaacagtttttctatggccagtttttttagtctcttacctgttattattatcttctcttcattttccatggcaatctttggctgtaaagcttaaacaggacccagtgctgtagaaatatctgatgagtacttagtacagtgaaaaactcacctcgtgttcctaaatacttgtagtttttgctttgcacactaatgtgagaccaaaaattaccatgctagctgactctatatgatcttaataatcaatgagaaaatttgtgatacataaatgtgtgtcaaaacatttgaaactctatttctattggttataaatgtatagagaaatgaaaaaacatagtaaaactaatgttagtaagctgtaatttaaaacattataaataatgagaaaagaaattttatttataggcatacctcagagatattgcaggtttgattccagactattgcaaaaagcaaatatcacaaaaaagcaaagtcagacaaatattttggtttcccagtgcatataaaacttatgtttctgctgagaccgtgtccaccctgcgagcacagagccttgccctcgcctctctgccacccgtccacacccgccgccagctcaccatggatgatgatatcaccatgcttgtcgtcgacaatggctctggcatgtgcaaggccagctttgcaggtgacgatgcccaccccgggccatcttccccttcattgtggggcgccccagacaccagggcgtgacggtgggcatgggtcagaaggactcctatgtgggcaacgaggtccagagcaagagaggcatcctgaccctgaagtaccccatcaagcaggacattgtcaccacctgggacgacatggagaagatctggcaccacaccttctacaacgagctgtgtgtggctgccaaggagcaccccatgctgctgaccaaggtccccctgagccccaaggccaaccacaagaagatgacccagatcatgttggagatcttcgacaggccagccatgtacgtggccatccaggccgtgctgtccctgtacacctctggcctaccactgacatcgtgatggactacgatgacggggtcacccacactgtgcccatctatgaagagtatgccctcccccatgccatcctgcgtgtgtgcctggctggtcaggacctgactgactacctcatgaaggtcctcacctagcacagctacatcttcaccgccacagccaagcgggaaattgtgcatgacatcaaggagaagctgtgctatgtcaccctggacttcgagcaggagatggccatggtggcctccagctcctccctggagatagctacaagctgcccgacggccaggtcatcatcatcggcaaaagcagttctgctgccctgaggcgctcttccagccttccttcctgggcatggaatcccgcggcatccatgaaactaccttcaactccatcatgaagtgtgatgtggacatcctcaaagacccgtatgccaacacagtgctatctggcggcaccaccaggtaccctggcatcgccgataggatgcagaagatcaccaccctggcgcccagcacaatgaagatcaagatcactgctcctcccaagcgcaagtactccgtgtggatcggcagctccatcctggcctggctgtccaccgtccagcagatgtggatcagcaagcaggaatatgatgagtcaggcacctccatcatccaccgcagatgcttctaggcggactgtgacttagttgcgttacaccctttcttgacaaaacctaacttgcgcagaaaacaagatgagattggcatgactttgttttttttattttgttttgttttgtttggctcgactcaggatttaaaaactggaatggtgaaggtgacagcagttggttggagtgagcatcccccagagttctacagtgtggccagggactttcattgtacattgttctttttttaatagtcattccaaatatcgtgagatgtgttgttacaggaagtaccttgccctcctacaagctaccccacttctctctaaggagaatggcccagtcctctcccgtgtccacacaggggaggtgatagcattgctttcatgtaaattatgtaatacaactttttttaatctttgccttaatacttctttattttgttttattttgaatgatcagctttcatggccccacttttttgtcccccaacttgagatgtatgaaggctttttgtctccctgggagttgggagtgggtggaggtagccagggcatacctgtacactgacttgagaccagttgaataaaagtgcatgccttataaaaaaaacacttatgtttccactatactgtagtctattcattgtgcagtagcatatgtctaaaaaaacaatgcacataccttccttaaaaaacacttcgttgctaaaaaaaaaaaaaagtgctaatgaccatctgagccttcagtgagtagtaatctttttgctgcaaaagggtcttgcctcaattctggagaccttgctctgtattaggttttggcttaagggaatgttgtggctagtttgatcttctgtccaggggtcctcaacccccaggccacagaccaggccacacagcaggaggtgagtggtgggggggcaagagaagcttcatctgtatttacagccgctccccatcacttgtattaccacctgagttccacctcctgtcagatcagcagcagcattagattctcataggagcatgaaccccattgtgaactgtgcacatgagggatctggattgcatgctccttatgagaatctagttcttgatgatctgtcactgtctcccatgacccccagatgggactatataattgcaggaaaacaagcagctcagggctcccactgattctacattatggtgaatttataattatttcattatatattacaatgtaataataggttgggcatggtggttcacacctgtaatcccagcatgttgggaggccgaggcaggtgggatcacttaaggtcaggagtttgagactagccttgccagcatggtgaaaccccatctctactaaaaatacaaaaattagccaggcgtggtgatgcatgcctatagtcccagctacttgggaggctgaggcaggagaatcacttgaacccaggaggctgaggttacagtgagccaagatcacaccactctagcttgggtgacagagcaagactccgtctcaaaaaaacaaaaaaagtaataatagaaataaagtgcccaataactgtaatgtgctggaatcatcccgaaaccccctgcaacctggtccgtggaaaaattgtcttccacaaaactggtccctggtgccaaaaaggttgaggaccgctgttctatctagaccattaaaactttctccatatcagcaagaaggctctttcactttaccattcatgtgttcactggagtagcactttgaatatccatcaagatctttttctttgcattcacaacttggctaactggcacaagatgcctagtttttggcctttcaacatgtttttctcattaagcttaatcatttctaggttttgatttaaagttagagacatgtgactcttcctttcacttgaacacttagaggccgtagtagggttattaattggcttaatttcctcatattgtggtgtctgggggaataggaaagcctgaagagagggagggaaatggaggaataccctgtcagtggagcagttaggacacacacatttattggttatgttcactgtcttctatgtgtgtggttcatggcacctcaaaacaattgcaatagtaacatcaaagatcactgatcacagattaacataacatataataatgaaaaagtttgaaatattgcaagaattaacaaaatgcaacagagacacaaaatgagcacatgctgttggaaaaatggtgctgaaagacttgctcaatgcaggcttgctacaaatcttgaatttatttaaaaaaaaaacaaaaaccccacaatatctacaaagcacaatgaagtgaagcacaataaaaccaggtatgtccgtatttataaaaaaaaaaaatcccaagtactttaacagtacttgcctcctttttgtcatatagtttatgatactgagaaaacatcttttctgtgccttggtgaattgtcatcatactcccttctaagtttggatgagcttccaatattttacactttgtgctttcagtgtcatgaaatatctgcaagagtttctttaatgtgaagtttttgccagcatcacttcctctgggacatcttcatacgtttcgtcacaaccactttcctcatttacattgattagtttgccttcactaagttcctctggtgcatatctagagtcccttaaatagcagcaatgtcaataatctcacagttagctatttcttctataaccctatttacattcctgttaccactttttgttactttgctgcattttcatcttcgttagccagttccctctttcagttatcatttttgggtttcatcattggaagacaaggaggcaaccccaccgcacactttgttgtttgtgcattaactgaataacagatgcacagtgactagtcaccgacagactgtgaaagaagtgacgtgatttgtcactgatcgtgatacacatctgttatttatgttgtgaactgaagagctagcaatcaagtttgtacttcatgtaattactcacagttaataaaccatggcaactgaaatttcaaccctgttgtttggggactgacattctttcatctaagaaccatgcaaagtgaggacaacctcagtcaattcctgcattccttcaggcccactgctaattttctgattcctggtcagttatctactctgacattcagatctttttctggtatatatgccttactaacttcatcttagtgaagtttctctttctcctccaggggcaatacctttgatctttcctctctgacatttatgctcttggcttctgaccattccttcaatctctaagtttgtttgaaatactgatttgccccgctagcttgtgatcgtttgcaaattaaatagacatttctccattcattaatgtgaatacttatccgcacagaatgtcaattcctgaataccagcacaggttcacccagccagctcatccttatcctttggtcatatggtccagtcagttgtgtaagggactctgtaaaggtcctgggtggggcctcagaatctatatatttaaatgttctccatattatagccaagtttgatttataatataaaccatgctttcctggttcttagtaatcttactatagactactagaagtttagatctgacaaatatactagagattgtcttgtcaaacctactcattttataagtgagagaactaaggtccagagttgccagatgacttgcccatggcttcccagttacaagcagagtaggaactagaactgatggttccaaacgcccaatcttttttttttttttttttttttttgagacggagtctcgctctgttgcccaggctgaaatgcagtggtccgatctcggctcactgcaagctccgcctcccaggttcacgccattcttctgcctcagcctcccaagtagctgggactacaggcacctgccaccacaccaggctaatttttttgtatttttaatagagatggggtttcaccatgttagccgggatggtcttgatctcctgacctcgtgatctgcctgccttggcctcccaaagtgctgaaattacaggcgtgagccaccgtgcccggccttgtttttttttttttctagacagagttgttctgtcgcccagtttggggtgcagtggcgcgatctcggctcactgcaacctccacctcccaggttcaagcgattctcccacctcagcctcccgagtagctgggattacaggtgtatgccaccatgcctggctaatttttatatttttggtagagacaggatttcaccatgttggccaggctagtcttgaactcctgacctcaagtgatccacccacctcggcctcccaaggcgttgggattacaggcgtgagccactgcgcccaccccaaactcccagtctttcaacctaatttccatcctgtgggatacaatcaaagtcgttcatcatcatctttttcaaactctcctgtggtgattttctttttctgtgtgaatctgtgcaataatatctgaagagagatgctcaagtaagtttctctgtagtgaatgggaaagcagttgtgacaaggattgttgaggtagtaggagctatggaggcctggagcagctctggaggccttaatccagtcctgctccagtgcttaccctctgcctgctctgtgcctgcccactggtgcctaagctgctgtccactgggggcttaggtatctgtttgacttgtgcacacagtgcttgtttccggaggcagtgtatagaggagaagatggggatgcgggtttgggtaggggttgaatatactattctgtaaagctttttctatttgcataagatattctcacaactgaagactctggccttcaggtttgctgacagagtgaaatgagtctgcctgtaattctgagagacgcactaaggagtagagcatcatccctttgatatgttgtgtaagttcatgaaaaatgaatggggaatgttgaatagtatgtataatagcaacgttaatgcttacatacccattctggcttgaagaaaaacaaaaacagaattttgctacttcctaatctccctgagttcacctgtcacaggcaacagcagtgtttgaaatgctaatgtgtcttgtagccattttaaagactgaagagctgcatagttcagggaaactgagatcaagggacttctttataaattgtccttacattttctctagcacttgctgcctgggaccctggcctctcactaggcccctgaagatgaaagagcatttcacagtgacatgacattttagagccagaggtggagacggtggatggggggaggaccttagtactctcctgcttcaattctgattccaaaatttttgttttctctgctgagaccccaagtggtcaacgaacttagctacagttgcacagtttgtttagggctagatttagactagagctcaggtttcctgattcccaggtaaatgtggttttggctgtatcatattgtgcataaaagcattgtcagacttcttaaatgaaatacaaaatcctgggtgatttggcagttgtgaatcttgctggcgataacagacttttggaggagacaggactgtatttttatagctgaggaaaccagatcaaggaaactagtgtaaataatggtccaagggctgaaaaaaaatcctcacagcctccccattataacttttcaacttagggtgccagaaaagtctccattaatgatttaagttaaggtttacactgaaggctgggacaaaaatgtatataaagcacctagtttgcttatgtatagatacattagatctcagagtaaagagaagggaaagagtatctttaaaaattagaagattggggccaggcatggtggctgacacctgtaatcccaacactttgggaggctgaggctggtggatcacttgaggtcaggagtttgagaccagtctgaccaacacagtgaaaccctatctctactaaaaatacaaaaattagccagatgtgatggcacatgcctgtaatcccagctacttaggaggctgaggcaggagaatcacttgaccccgggaagtggaggttgcagtgagccaagatcacaccactgtactccagcctgggtgacagagtgagattccatctcaaaaaaagattggaaaaaagatacctggggaaatttagtttgcaagtgactacctagttttttctttccaactgaaggttcacattagcatcaataaatattttacagcaagtctcataccctgatttaaaaaagataccttctgttctttggaaaccatatcagaggtctattttaggtaattattttcattttctatctttagaaaaaaaactttaaaaatacagtttataaagacccaatgtgttctttaaaaacttcttggtaggactgctaaagttccatttctcccctaatgaagtataaaaattgaattcttaatgcagatgaaagtgccctattctgggggaaaaatgccacaaaggacacttcttagtaaggaagtgagcaccaagatttaaggcaggaaaggataagctaactctactgttttgtacaaatgcagttgagtttatgatcaggactgcctttatctgtatagctgctaaccctcaagcgttaaagtgaaaaaaaacaccagctgccaggctttgggttttacaaaaagaagacctggacaacaagaatccttttactggattgattccattgatgttttgtccttgatgtcaagaagcaccttgctagtaaaggactgccttttaaagttcttctgatatcagacaatgcccctggcaacccagaaccccatgagttcaacaccaaagacatcgaagtggtctacttgccccgaaacacaacatctctaattcagcctctaggtcagggaatcataaggacctttaaggctcatttcacacagaactgtatggaaggatgtcaaccctatggacgagaaccccaatagagagaacatcatgaaagtctggaaggattacagcattggagatgccatcattatagaaaaagtcatgagagccatcaagctccaagtaataaattcctgctggagaaaactgtatccaggtgttgtacgtgacttcacaggatttatgacagagctaatcaaataaatcatgaaagagattgtagatatggcagaaaagtgggggagagggtagaggtttaaaggtttaaaacatggatcttggagaactgcaagagttaacagacaccacacctgagaatttcacagaagacaactcgatggagatgagtgcttctgaatcagtgctaaacaatgaggaagaagatgtagaagaagcagtgccagaaagcaaattgacatgagaccatctagcagaaggtttctaattattcaagaatgcttttgacttcttttatgatgtggatccttctatgatatgggcactgaaactaaagcaaaaggtggaagaagaattggtaccatatagaaacatttttagagaaatgaaaaagcaaaaaaatcaaaaattacaatgtatttccataaagttacaccaagtgtgttggcttctcctgcctctccttccacctcctctacctcttccatctctgctactcccaagacagtaagaccaaccccttttcctcctcctcttcagcctactcaacatgaagacaaggataaagacctttatgataatccatttacactaaatgaatagtaaatatatttcctcttccttgtggttttcttaataatttttttttctctaatttattgtaagaatacaggatgtcacacatacaacatacaaaatatgtgttaaggtgaggtggttcacgcctgtaatcccagcactttgggaagccaatgtggatggatcacttgaggccaggaggttgagaccagcctggccaacatggtgaaaccccagctacttgggaggctgaggcatgaagatcacttgaacccgggagacagaggctgcagtgagtgacgatcacatcactgcactccagcctgggcaacagagtgaaattctgtctcaaaatgtgtatgtgtgtgtgtttgtgtgtctgtgttaaattgactatgttatcagtaagccttctggtccacagtaagctgttagtagttaagttttagaggagtcacaattttataggtagattttttactgtacctggtgggagggggtcagtaccctaactcctgcattgttcaagggtcaattgtataatgaatacacaaaaatgagcagcacccacaacccactgtgtctggccaaaataagcccagctttaactttactgaaatattctccttcattaaataacatgtattttcggtctcctaggctacctccaactgggaccagctttaagataaaaaaaatcagatttcagatgtgtggtttgggtatttaaattttcagtgatactcagtttcatatctttcaattgagggaaaattgtcaagagacaagaatggtgtcaagagtagaaagatctagcaccacaagccagggagtattgaaagagaaccaagggccagcttctcattaaaatcagaggcaagaaagcatctaaagatcaaatgacttaaatggtagcagaaaagactttaggaggtaaataaggaaatgtttgtttgaaggcttaatggaggatattgtgttagaaatgctgagttattttccctagtactaactttctaatagcaatgatgttaaggatatctccccacaccccaccagcattctcagttactgaaggacttctgcaggagtgggacagtcccctattagaaaagctggcatagttgaggttctacctatatttaagcagaggtagattttattagagaagcactcaagtgtagcttttgatttttttggaagcatactttatagggcctgaataccttattaaaagcaacataatactacattaaacgagtaaacaagcatctagggaaatcacacttacaatcaattagatttatagactagtatttcgaagcaaaaacaggaggaattcaaatggaacatctaggattctgagcagcacattggtcttggaattcaactacaatctaatatgtcttggttcctttaccttaaatactctgttctccaattagagttggttttgttcttcaagtctttattttcacagcatcgcccgacttctatgttgcttcttctttaattttttttaagtaagaaacattctgctttatctcattatttaaccattcagggacacttcccaggcttttctatcatttgtgaagaacagtgggtaaaagtaaagcacaatcattctggaaattctttatgaaacagaaaatatataaaaatattcagagtatctccactaatgcctgatgacaattcatttggacttttgaactggagagaaagaaatcatccaatagttttgtgtattgctatctatgtttctttttggtcagtaatgtatgtgttatttccaaatggccttcctccatgaccctcatccaattcatgaggaataacatattttgaatctcagaaaagactgccacttttaagccttataagaccgagttcaagtcccagtcccttgcctcaacaatggactctagtggcctttccttgcatctgaataaccatggatcaatatctgcctataagagtgtggaggtataggaggtggacgaacatgctgtgggaagcaaattgaaccctttttttttttttttgagacagagtttcactcttatagcccaggctggagtgcaatggcgtgatctccgctcactgtaatctccacctcccaggttcaagcagttctgcctcagcctcctgagtagctgggatacaggcacctgccatgacgcttggctaattttgtatttttttggtagagatggggttttgccatgttggccaggctggtcttgaactgctggcctcaggtgatcagcccgcctcggcctcccaaagtgctgagattaaagacatgagccactgtgcccagccacaaattgaaccctttctataagcattttctacattgccaaaaatagtgttgtcctcaaaagtacaagcttacttactggagatttaggagacagtattttgccagtagaattccatcttcctttaagcaaacttaacatgcaaaaatctatatttatccaacagagtaaaggctaaagaactttttgttttaaaagaaaacttggccgggtgtggtggttcatgtctgtcatcccagcactttgggaagccgaggtgggtggatcacctgaggtcaggagttcgagaccagcctggccaaaatggtgaaaccctgtctctactaaaaatacaaaaactagctggatgtggtggtgggtacctgtaatcccagctacttgggaggctgaggcaggagaatcacttgaacccgggaggtgaaggttgcagtgagccaatattgcgccactgcactccagcctgggtgaatctttttgattacaaaaacacatggagactcagaaaatcatgttaaccaaatgtacgtcttaatcattataaagtgaacatcacctcgatcatgaaatagaacattgccacctactctagaagccctgcccaggtaccccaactcaatcgcagtcccttctttccctgattagtaaccattattatgatgtttacattctcaccagcaatgtatgagagttctagtacctgcacaaatgcttgccaacacttggtagggtcagtctttttcactttagccattccagtagctgtatctcttttgtgtttgtaatggtatgtatttgtggtggtatctcatttgtattttgctaatgactaatgatattgagctgcttctcatctgcttatttgccagctgttaggaagatttttaaaaggaaggaagtgagagagaaggcaactcaacggccaaacaggtttatttacaagaataagcctgcaagcggtcccggtcaggaatctggctgagaccctgatttatttttttataataaagtttctatagggaggtttttataataaagtttttataataaagtttctatggggaggggttggggatatgctggcaggttgaaactgtagggggcaggggaaggatgtggtaaaggccagtcagtctttgttgtagtcagggttgttactgtctgttaaaggtatgggcgaggttgacctttgctgaccagataaactccctagcaacagttagtactccaaaatcgcaggggactagatatcctcactgtagaagagggaggcctatttctcttcctgcaagaaaatgctgtttctttacaaataaatctagattggtaaaagaaggaatatccaaacagaaaaattgcagaacgcctgcccaaacaacctgctgactttttcagttatttcctccattgggcactccctttaattggtcctttcattgtcatctgcttaatattaatgtttttaccctgcttgatgaaatttttttcaaaagtttattttagaaagagtaacctcagttgctcagaccaccataacggaacacatcaaggaggcattcctgctatagcaacaatgaatgacctcatcaccagaggaaggccacctcccccatgcaccacccccagtgagcaggaagtagtcaaagagaacctacatccctattcctaaatgataataatacaaagaggtgggaatgtgagaattaacaatagtgatgccatttttccaccttggtgactgtgtttcctaccttagtgacagtgtttccaaaaacaaagcaaaggtcaacctcacccataccttaacagagagtaacaaccctgaccacaacaaagcctggcccttaccacatccttccccagccccctgcagttccaacctgctagcacttccccaacccctcccctatagaaactttagtatgaggctgggcacagtggctcacacctgtaatcccagcgctttgggaggctgaggcagctgtatagcctgaggtcaggagttcaagaccagactggctaacatggtgaaaccctgtttctactaaaaatgcaaaaaaaattagctgggtgtggtggcatgcacctgtaatcccagctactcaagaggctgaggcaggagaatcacttgaacccaggaggcggagattgcagtgagctgaaatcacgctactgcactccagcctggcaacagagcaagattctgtctcaaaagaaaaaaaaaaaaaagttggtcatggtagtacatgcctgtaatcccagctacttgggagactgaggcaggagaatcacttgaacctggaaggcagaggttgcagtgagccgagatcgcaccattgcactccagcttgggcgacaagagcaaaactccgtctcaaaaataaaaaaaagaaactttagtataaaaacgtcagcttgtaagcaatcagggtctcagccagattcctgactgggatgcctcacaggcttattcttgtaaataaacctgtttggccattgagttgccttctctctcactttcttccttttaaaactcttcctaacaccatccatatatatctttgttaaagtgtctgttcaaatcttttgcctttttaaaaaaattgcgttgcttgtttttttatggaatgttgagggttctttttattctacatgcaagtccttcatcagataaatgctttgcaaagattttctcctagttcttggcatgtcatgtcgttctctcaacagtttcttttgaaaagcagttttaaattttgataaagactaatatatccatttattttatgagtagacatttatttgttttttatgggttgtgtttttggtgttatatttaagaagtatttgcctaatccaaggttacaaatgttttcttctataaattttattgttttatgttgtacattttggtctatgatccactttaagtttttttttttttaatatatggaacaaggtatgaattgaagtctccctctccctttttttttttttagcacatagatatcccgctgttccagcaccacttctttaaaaggctttcctttctctgctgaattcccttttacaccttgttgaaaatgaacatgtgtgggtctatttataggctctttattctgttctgttgatctatttgtctttctttgtgtcagtaccacactgtcttggttattgtagctttataatatcttgaatctagatcatattagtcctccaaatttgttcttcttttgcaaacttgttttgcatattctagatccttttattgccacatgaattttagaattcatttgctagtttctacaaaaaaagcctcctgggattttaattgagattgcattgactctatagaccaatttggggagaatggacatgttaacaattttgaatcttgaaacctataaacatgatatatccctctgtttaggttttctttcatttctctcagcaacgtcttattgttttccttgagttgttagagttttaaatatttgctaatcacttgtgtgtaaagtggtgtctcattgtggtttcactgctgacgaccagtgaaatccagcatctttcaagtgtttattggcccttcaggtttcctcttctctattgcttttatattggcccggcattttatttgccaagaatatctctgctgggtgatcttatggtctcttatgtttcgtctattttgtgtttgtttgttttattgatagtggagatgtttctcttttttggctcttgaattctgaaatagtaatttagatattgaggcaaatacctctttacatctttcattccttgttagttttatctctcctactttctgccaataggaagctctggtattccctggcatattctagcttagatgacttttgagaactctgatttgagagcaaagcatgaggtcacctcacttgtcaatgtcccttgggcgatgcctagtttatctttttgctaagctaatctgctctcattcctcatggttcactgctctggacattctgcgattctgttccagctgagcacattagaagagagagacaattccgcatcactgggcagagcttaggtagcctggggttctcacctttgagccaacaggcaacttggcaaattgctcaacaactctgggagatgattgtcagaagccacaagagccccagtcagtgttctgtgaacctgctttgaacaattaaaaggatctgcatgtaacaaattcttgaaaaatttttgtttcatttttattaaaaaggaagcctttgatttctgttggctacaaagtaggcttcctgtgatgtctaagtcagagagctacatgaatctggttgtatctttcagaatattgtttatgcatattagaatttgtgaatagttattttgcttttcaacactttaaacatttgtcaaatacctatggtgtgccaagcactgtgtcaggaaccagaatcaccaaaatggataaggcaccgccctctcttagaaaagcttacagaagccagagtataggtaggagttaactaactccaatgctttctcaaagaaagaaaagggaaggtagatgcgggaatgggaccatcctaaggcataaaaagcaagcagccttaacctatagaaacttgtccaggaagagtataagtagagaattaaatgagcacctgcagcacataatttctggacaactggataggagtccaaaaagggaaagacactaaaagatattggcattcagaaatttctgtaatcccaaatccttgctcaagctgttcacctcctagattgctttccatgacccttttcatttggcaaactctcattcacccttaaggagtcacctgagatttttattctcatgggaaagttttcttccttgcctctcactttcactagaggaccatcttgtgtgctttcatagcaccctactgctgattccaactgttccacttagcactctgcattgaaagtgcctctttgtctccacccagtagagtaacttcaagatcaagctgatcccttttggagtaacctcaaaaaaaaaaaaaagttaatttgatatgttcaatgggatcctaacatactgaaacagtgggctaaaatcaacaagaagaaatttactaggcctaaatcctgcatctagttccagcagttaaactgtacaagtagaagattgaggaggcctgacttagtaggagaatgtttgaaatggcattctagatatccgcaaattggatataagccaatggtatataagtttctctaaaaccaaatagaggtttgggttgtattaaggaaaatatagcatttagattaagatttaatagctgtattataatgctgcagtatatttggagtatcatgctcaatatgatcttctgacttaaagaacattagtgaccaggagcagtggttcacacctgtaatcccaacactttgggaggccaaggcaggtggatcatctggggtcaggagttcgagaccagcctgaccaacatggtgaaaccccgtctctgctaaaaatacaaaaactagctgggtgtggtggtgggcacctgtaatcccagctactcaggaggctgaaccaggagaatcgcttgaacctgggaggcggaggttccagtgagcggagatatcgtgccattgcactccagcctgtgagatagagcaagactctgtctcaaaaaaaaaaaaaaacattagcattagcaaacaagaaagtaactaggatattaaccaaaatcggccaggtgcggtggctcacgcctgtaatcccagcactttgggaggccgaggcaggcggatcatgaggtcaggagatcgagaccatcctggctaacatggtgaaaccccgtctctactaaaaatacaaaaaattagccaggcgtggtggcgggcgtctgtagtcccagctactcgggaggctgaggcaggagaatggcgtgaacccgggaggcagtgcttgcagtgagccgagatcgcgccactgcactccagcctggaggacagagcgagactccgtctcaaaaaaaaaacaagaaaaacaagaaaaggatattaactaaaatctagaaagaagtcatatgatgatccagtcataagaattagatattcggcctggggaagggaagacttggaagacatgggataggatagtatcaaatatctgaaaagcaatcatgtagaagcctgggtggagttgatctcttatccttcggaaagcagagctagggtcagtgggtagaagttgcacactagaagttacctaggagaccttacttattattaagaacttgccacaaaactcttcaaaggtgaatgggactacctgtatgaggtggtgagctctctgtcatgcacgtggaggctagaaaaccatagccctgagattaggactgtacagttgtataggttagttattgtacaagggcacccggccaagggggcaactggggctgaaatccagccagtgctgcagtaactacatcatgtatcctggcattggttacccagaggaagaggtacctttttatagttcacccaaagatgccccagatctactagatatagaaaggttttcttatcaggtgagagatcagattagtaaccgctaaccccctgccacatcttattgtccattagtctatggtcacagctatatttaattaaaactcaataaagtaaggtgaagaaaatccaagcaaacaaattccatttaacccaaaggagaataacttatatatgctttttaatatattgatgcatttaaaggcctccctaaccccatcccacatgatgttgtgtgatgtgctgcaggaggggataagagagagatggagttggttggtcttccatgctctatgaactctcttaataacaaggtgtgagctctgctacatctgaggcatattcagtgcctgttgtatctttctttggaggttaagcaccattaaaatattttctactgaaaatctttatatatatatatatttatatataagtatataaatatataaaaatatatatttttttaatagagatgaggtcttgctatgttggccaggatggtctcaaactcctgacctcaggcaaagagctgggattataggcatgagccaccatgcctggactgaaaaatccttatatttaaatgtgaagttttaaaccctgtctctactaaaaatacaaaaaattagccaggcgtggtggcgggcgcctgtaatcccagctactcgggaggctgaggcaggagaatcgcttgaacccgggagatggaggttgcagtgagctgaggttgcaccattgcactccagcctgggcaacaagagtgaaactcaaaaaaagaagaaaaaacgaagttttaaaaacagtatataaaattatgcatataatgtcatttcaaccctattgcatagaaactcttttttttttttttttagatgcaacctccacctcctgggttcaagtgattctcctgcatcagcctcctgagtagctgggattacagatgcgtgccaccatgcctggctaacttttgtatttttagtagagatggggtttcgccatcttgatcaggctggtcttgaactcctgacctcgtgatccgccctcttggcctcccaaagtgctggtgagccaccgcaccaggcagaaatttttttgaacaaaagaaaaaatagtagcagatgtactctctgagggacaggtttatggatagtattatttttataacagaaaacaaatattttaaaatgatcttctcttcaccttgaaaattttttattttttgtttttttggtttttgttttttgttttttgtttttttgtgaggtggagtcatactctgtcaccaggctggagtgcagtggcatgctctcagctcactgcaacctccacctcccgggttcaagtgattctcctgcctcagcctgatgagtagctgggtttacagtcctgccaccatgcccagcaatgttttgttttgttttgttttgttttgttttagtagagacaaggtttcaccatgttggccaggtgattcgccttcctcgccctcccaaagcattgggattacaggtgtgaaccaccacacctggcaagaattcaaatttctaaagggcctgaattttttcctcccaccttgtcatcagcttactcaccaatgaaattttcatcttttacattctcatttcttttatcatattactataatatgctacccaaacagagtgcaattaaattctgctggagaaaaagacgtctcatttacctaagaaatgctcttggaaatgaacttcagaaatagatggggtatggcaggtacggtggctcacgcctgtaatcccagcactttgggaggccaaggcatatcactcgagggcaggactttgagatcagcctggccaacatggcgaaaccctgcctctactaaaagtacaaaagaattagccaagtgtggtgtctgtcacacacctgtaatcccagctcctcaggaggctgaggcaggaggtggaggttgcagtgagccaagatcataccactgcactccagcctgggtgacagagcgagactgtctcaacaacgacaacagcaacaaagaaataatggggtaaaatgctacatccaagaagagtatgttaccctagataccatatatgttgaagcgagagagggcataaactaaaaaacatttgatgcagtgctttcaacttctaagccttttctgcctccaatccaaagaatgctgggagaggaacatttcaaagacaaagaatagaagtgcagagcagttaacaagagtaaattgtcaagaaatgctggcagtagctaggccatgagtgtcaggccagcagcctgggttgtcttctgatgtttctgagaatagagatttatcttaaaagaaacttccacctggttctagttttaattttagaactccatctagttcatcaatcacattacaatatagtagttgaagaaaattaagcacaaaatccagttcccactttttcttctatcctcccttttgtgatttgcattttgtcaaatgcagtttgtgtctcagccagaacactctcatggctgactttctgtgtggccagttggcaggtttcataatgagaggcagggtgctgagagaagaggatgcttataccagaacacagaagaaataaaattccgtaactccaataaaagtacatttataaccagtatagttcttacctccagaaaatcttaggatagaggaatagtatcattcatctcttcttaacaaggaaactatccagttaactagtataggccctcaaaggcgtatgttctgtctggcaagtcttatggatttggttataggaaatgtacagtcctctcagggctgttatttattggctaagatgtttaaaaggagtcctttataagaacttccagtctttttgagtgtatgtgacaatttttgggaatcaaaagattgcaatatttatatatagaaattccaccaatttatatgaagaagttccacccatgggagagggaccatatctctcttattcattattatatgctcagaagcacacatagaactgggcatggtaggtgttgagtaaatatctgttaaataaatgaccgaatgaatgaatgaatgtgcatggctgtaaaattctcaatgattgaagaataaagatggctggaccatagtggctcatgcctgtaatcccagcaaaactttgggaggctgaggtgggaggatcgcttgagcccaggagtgtgagacaaggctgggccacatagtaagaccccatccctacaaaaaatttaaaaattacatggatgtggtggtgtacgcctgtagtcccagctactcaggagattgaggcaggagttgagcccaggagttggaggctgcagtgagccatgattgtgccactgcattccagcctggatgacagagcaagatcctgtctccaaaaaaaaaaaaaaagaatgaaggcaatttaaacctcattttgggatgccagtaacaaactattttcttacctctaaatcagtattaaggcctctagatataatcagtctacattcacccatagtcctgtccaactctaggaaacatagtctatgaattaggcagaaattcagaataaaataacaacataggatttttgtgaaaataaagatttttttcagtgtctttccgttactaactttaaaattctaggtatttttttccctaagcaatgtgagaataaatgattgtgaaatgatagtgtccttagcaaaagcagtcattttgcaatgaaggaaaagcttgttaaacataggaatgtgtttttccctcaaattacagaaagaaaaacaatttcctttagactagccaataaaacacccggcatatattccatacacgttcatacatagtagaataaagtagatagatacaaggcattctatttaaaccacctttaggaaagctgcaagcaccttatgtacaattaatgactgtcatctttccagcttggaaaaaagaaacacacagaataggagtcaggagaacaaaagaaatatatttcacttttcatttcagaggtagcttgaaaaaaatgaaattcccaggaaattcttctgagaaaaagggtcaattattttgctcttcaacttctcacatcttggtacgaataggaatgctctgcaggacagcatacatctacctcagcttttcaattgaagctaaagataggaaatactccattggcaaggaatacaaccaattttgaattcttcttaaaaatatcacctaggccttctatttaaaaggattatgacatgatgtgggggatttgcgtcaagtaattgggggcggttggggtacagatgagataaagataagattagttgtgagtttatcattgttgaagctggatgataagtatgtgggagttcatacacttttgtgtatgtttaaaatattccatgaaaaaactaaaaatgatgatttcctaaaatggaaaaaaatcttcctttttttttttttcagatcagtgtggtaaataggaaatgcattgttctcactcataagtgggagttgaacaatgaaaacacatggacacagggaggggaacatcacacaccagggcctgtcgaggggttgggggcaaggggagggagagcattaggacaaatacctaatacatgtggggcttaaaatctagatgatgggttgataggtgcagcaaaccatcatgacacatgtatacctatataacctgcacattctgcacatgtattccagaacttaaagtaaaatttaaaaaaaaatttaaagatattactcagaccaaaaaaaaataggaaatgcatgaaatatagaatcagaagcccattatatacaggtctcaatcttaaaatgtactaacagtgcagcctcgtgttagttaccacaggtctttaaacctcagtttcaacatttgaaaaatggaaataatgccaaactttaccttataggatgttatgcagataaatgaattaatatttctgaaagtggtctgggtgcggtggctcatgcctataagcctagcactttgggaggtcgaggtgggcagatcatgagatcaggagtttgagaccagcctggccagtatggtgaaaccctgtctctactaaaaatacaaaaattagccaggcgtggtggcacatgcctatagtcccagctactccggaggctgaggcagaagtattgcttgaacccgggaggtggaggttgtagtgaggtgagatcgtgccactgtactccagcctgggcgacagagcgaggctccatcccaaacatatatatatatatatgtttatatatttatgtgtatatatatatgattatatatgtttatatatttctgaaagtgctgtataatctgtaaaatgacacaaaactgtaaatccaaataatttttaattgaactatgcatctatccaaagttatttgtgctttattttccaaatttacatttaattaaaccagctccagccagaagcaagtccatgtctttctaaatctatagcatcagaatgaaactgaaatatcttccttttctttctctctgcttctgtttctctgtttctgggatgctcctataggcaactcctaactgttcttcctgcccctctgtaaactttctgcaacctactgctggaaaaatcatcctagaacaccacttggatcatgtgactcccttgctcagaaacatttctgaatcaccattgcccaaggaattaaatctaatttacttaacctacccttcaaagtctccagtgcttggtctctaacctgcctttccagctacctcacaaccattcatgttctaaacctttggctctgagcaaaaggctttctttctggtgtttttgttccccatttctcctcttggaatccagtactacttttctccctgtctagattctatcaatccctaaaaatcagcctcatccctccttctcttctatggagtcttcctaaacccttccagaccatgtaatctctcccttttcttagtcttaaatatgattggtttggcaattaatcatgtattcctttgtaatattatgtttattcttgttttaagcagttaattatccctattgttacttttttcctatcctgcccagttagatggtaaactttgtttgtttgttttgtttttttagagacagggtctcactctgtctcccaggctggactgcaacggcatgagatctcctctcactgcaaccttcgcctcctgggttcaagtgattctcccacctcagcctcccaagtagctgggactacaggcatgcaccaccacgccccggctaacttttgtatttttattagagatgcggtttcaccacgttggtcaggctggtctcgaactcctgacaagtgatctgcccacctcagcctcccaaagtgctggggtgacaggcgtaagtcaccgcacccagcccagatgataaactcttaaaaggcaagaattgtgacttttatatcttcctgcctcaaggtccagtgctttgcatgcagcaggcactttcattaacatttgtggaaaaatattacctaaactgagctgggattatatagttcctgatagccatacttagcatattaatactaccctcatatgtgcttctttggatcttaaaaaatgactttttaggccgggtgcggtggctcacgcctgtaatcccagcactttgggaggccaaggtgggcggatcacctgaggtcaggagttcgagaccagcctgacaacatggagaaacctcgtctctactaaaagtacaaaattagctgggtgtggtggtgcatgcctgtaatcccagctacttgggaggctgaggcaggagaatcgcttgaacctgggaggcagaggttgtggtgagcggagattgtgccattgcacaccagcctgggcaacaagagtgaaactctgtctcaaaaaaaaaaaaaaaaaaaaaagactttttaaaagattaattttgcatggcatcttttagagggtggcatggtgggaaattaggtgcagtcttacttgttacacatacctggattcaaatcccaacctagacacattagctatgtgaaatcctggtaatttacttgacctctttatttcttagcttcttcaatcataaactagaaatacagtaataagacttgctttgcaaagttaggcgcagtgtatgtacagtccctgacacgtcatcagtaaaaggcagatatcatcctagtgcacatcagatggttttgacaggtcatcaaagtgaatgatcatagttgtttttaactctcaggagatagaatgcagtaaatatagagaagaatcaggaaaagtctctgcccgttccttcaagccctgcctctgtactctgtatttgcttttgtgcatctttcattaataagggttataagctaaatatcgctggaatccctgtcaatttaaaaagtactgagtccccaggccatgctctatccttttccatactaggtgagttccctcagtatacttttttggagacttcccttcaatccaaaccatagctcagtcatatcctctttctttgcttgccctttatttcacagcaaccctaattatacttagttctcctgcagtcttttgcctacagtcatggtaagtttgccaactccgagtcttctgaactgtgggctataagtcattgtgttttcatttatttagtaatccaaggttgcctcttctagacaagacccaaagcaatggtatggaaggacttcagtcataaatcacaatgttgtcaatacttgagaatataagactaggcagaatgcaaggtcacaagaaaattgtcatcatctggaattggcttttaggtaatatcttttctccattgagggcaggattctgaatatgtgcatgcttacacataagaaaaagcattaacatgtgaaagaggccaaaatctaatatgccaaaattaaaaaaaagccttgttacatcaggattctgtcattatgagcactcatttttctttttcttttcttttgtttttttttttgtttgtttgtttgtttgtttgaaacagggtctcactctgttgcccaggctggagtgcagtggcacaatcatggctcaaagggctgggattacaggcatgacccactgtgcctggcctcacttatttcaatatttaatgctatgttgttttcatgcttgaaaaaagaaaaaaagttcaggaaaatagccacaaaaggattagttatcacagaaatgaacacggaaaaaggcatcactgaattattatatttataaggacttttgattgagtctgacccactagtgtgccatttcttaaatcccttgtgattggtctttttaaagttgatctatacccagtgaatcatcaccttaatctatgattataacaaaagttgcattcacaaatgcttttattttattttattttattttattttctagtgatattctttttattattattattatactttaagttttagggtacatgtgcacaatgtgcaggtttgttatatatgtatacatgtgccatgttggtgtgctgcacccattaactcgtcatttagcattaggtatatcacctaatgctatccctccgccctcccctaaccccacaacagtccctggtgtgtgatgttccccttcctgtgtccatgtgttctcattgttcaattcccacctgtgagtgagaacgtctggtgtttggttttttgtccttgcaatagtttgctgagaatgatggtttccagcttcatccatgtccctacaaagtgcatgaactcatcatttttatggctgcatagtatttcatggtgtatatgtgccaaatgttcttaatccagtctatcattgttggacatttgggttggttccaagtctttgctattgtgaataatgccgcaataaacatacgtgtgcatgtgtctttatagcagcatgatttataatcctttgggaatatacccagtaatgggatggctgggtcaaatggtatttctagttctagatccctgaggaattgccacactgtcttccacaatggttgaactagtttacagtcccaccaacagtgtaaaagtgttcctatttctccacatcctctccagcacctgttgtttcctgactttttaatgatagccattctaactggcatgagatggtatctcattgtggttttgatttgcatttctctgatggccagtgatgatgagcattttttcatgtgttttttagctgcataaatgtcttcttttgagaagtgtctgttcatatcctttgcccactttttgatggggttgtttgttttattcttgtaaatttgtttgagttcattgtagattctggatattagccctttgtcagatgagtaggttgcaaaacttttctcccattctgtaggttgcctgttcactctgatggtggtttcttttgctgtgcagaagctctttagtttaattagatcccatttgtcaattttggcttttgttgccattgcttttggtgttttagacatgaagtccttgcccatgcctatatcctgaatggtattgcctacgttttcttctagggtttttatggttttaggtctaacatgtaagtctttaatccatcttgaattaatttttctataaggtgtaaggaagcgatccagtttcagctttctgcatatggctagccagttttcccaccaccatctattaaatagggaatcctttccccattgcttgtttttctcaggtttgtcaaagatcagacagttgtagatatgcggcattatttctgagggctctgttctgttccattggtctatatctctgttttgataccagtaccatgctgattttgttactgtagccttgtagtatagtttgaagtcaggtagtgtgatgcctccagctttgttcttttggcttaggattgacttggcaatgcgggctctgttttggttccatatgaactttaaagtagttttttccaattctgtgaagaaagtcattggtagcttgatggggatggcattgaatccataaattaccttgggcagtatggccattttcacgatactgattcttcctacccatgagcatggaatgttcttccatttgtttgtgtcctcttttatttcattgaacagtggtttgtagttctccttgaagaggtccttcacgtcccttgtaagttggattcctaggtattttattctctttgaagcaattgtgaatgggagttcactcatgatttggctctctgtttgtctgttattggtgtttaagaatgcttgtgatttttgcacattgattttgtatcctgagactttgctgaagttgcttatcagcttaaggagattttgggctgagatggtggggttttgtagatatacaatcatgtcatctgcaaacagggacaatttgacttcctcttttcctaattgaatgccctttatttccttctcctgcctgattgccctggccagaacttccaacactatgttgaataggagtggtaagagagggcatccctgtcttatgccagttttcaaagggaatgcttccagtttttgtccattcagtatgatattggctgtgggtttgtcatagatagctcttattattttgagatacatcccatcaatacctaatttattgagagtttttagcatgaagggttgttgaattttgtcaaaggccttttctgcatctattgagataatcatgtggtttttgtctttggttctgtttatatgctggattacgtttattgattttcatatgttgaaccagccttgcatcccagggatgaagcccacttgatcatggtggataagctttttgatgtgatgctggattcggtttgccagtattttactgaggatttttgcatcaatattcatcaagattattggtctaaaattctctttttttgttgtgtctccgccaggctttggtatcaggatgatgctgacctcataaaatgagttagggaggattccctctttttctattgattggaattgtttcagaaggaatggtaccagttcctccttgtacctctggtagaattcggctgcaaatccatctggtcctggactttttttggttggtaagctattaattattgcctcaatttcagctcctgttattggtctattcagagattcaacttcttcctggtttagtcttgggagagtgtatgtgtcgaggaatttctccatttcttctagattttctagtttatttgcgtagaggtgtttatagtattctgtgatggtagtttgtatttctgtgagatcggtggtgatatcccctttgtcattttttattgcatctatttgattcttctctcttttcttctttattagtcttgctagcagtctatcaattttgttgatcttttcaaaaaaccagctcctggattcattgattttttgaaggatttttttgtgtctctatttccttcagttctgctctgatcttagttatttcttgccttctgctagcttttgaatatgtttgctcttgcttttctagttcttttaattgtgatgttagggtgtcaattttagatctttcctgctttctcttcacaaatgcttttaaagccacagttctatgtagtttaggtttttttcaaatacaagattagacttcaatttgtctacttttgctactcagctttaagccataaaatgggactcagattttaaattacatttgtttttctactgctcattattgctgagctatttcttatttatcttttactgattgcgaaacagacctaaggagaactgttggttttcattatatggatctcatttttaaaaaataatcattttagaccaggcacggtggctcacgcctgtaatcccagcactttgggaggctgaggcaggcggatcacctgaggtcgggagcttgagacgaacctgaccaacatggagaaaccctgtctctactgaaaacacaaaattaggccaggcactgtggctcacgcctgtaatcccagcactttgggaggccgaggcgggcagatcatgaggtcgggagatcgagaccatcctgacggatacagtgaaaccccgtctctactaaatatacaaaaaattagccaggtgtggtggcaggcacctgtagtcccagctactcgggaggctgaggcaggagaacggcatgaacccgggaggcagagcttgcagtgagccaagatcgcgccactgcactgcagcctgggtgacagagtgagacttaaataaacaaaaaataaattagccgggtgtggtggtgggcgcctgtagtcccagctacttgggaggctgaggcaggagaatggcatgaaccctagaggcggagtttgcagtgagccgagattgtgccactgcactccagcctgggcgacagagcgagactccgtctcaaaaaaacaaaacaaaacaaaattagctgggcatggtggcgcatgtctgtaatcccagctacttgggaggctgaggcaggagaattgcttgaacccaggaggtggaggttgcgttgagccgagatcgcaccattgcactccatcctgggcaacaagagcgaaactccgtctcaaaaaattatcatcatcatcatcattttactgagaaaatttagcgtgtggatgcaaataacttgccctttcagtagtatcaatgagcaataggcccgttaaaagggaaaagaaatattgaccaaattcactcattgaatttgctagtcttttaacaagcaaaaatgtctaggaaaaaaaaatctcagatgtcagtaatcttaacacaaaaaatattgtcagtggagtcctctttgaatccaaaaggtaggcatgtttctaaatcatatattcacagagtgatggagtattagccctggaagggactttggtaatcatctggtctagggatgtaaagtagttggtgtcccagctagagtcagagttcttgtgtctcatctcccagtcagttcattgtgctcacctgacttctatagttgcagctattaaaatctaaatcagctattaaaatattcatatcgactattaaaatctaaattatgattattttcaggcgcataatgtcagctttgctaacactacctcagatccatttgatttcttgggaactaccaggactgtatttggtttatttttaaagccaagcagctttataaaccttaaaatatttcgtcttcgaaacctaaaaggctctttatttagtccatgatgaatatttgagtagtgttaaatttatcattctggcagtactcacattgtacttgtcattaattgtgactcatcaaagaatgttttgatgttgagtccttggctaacagatggctctgtttagaggaattgaggcagtgagctatgaggtccaaggagagagacttcttaaataattattcactagaggttgtttgaatttgtaagaaagcacagtaatctgtgggggagggaagtttagtctttgtgttaaggcttgagaaggctttttttcagctcccttcagaggatgcataagagagttgatgtcagtgttgtttgtatgccaggtgtgggctggaatgacacaaatggccagcagagatgcacacagttgaatacttgtttgtttctgtttctaaggagtctgtcaccacctttgtgacatagccatagagaccaccacacgggaaagaacaggagctcaagcaataggagtactaataagaacttgagtatagaatgtaaagcaatgaatcttccttttaaaaagcatttaccagctgggcagggtggctcacgcctgtaaccccagaactttgagaggccaaggtctcccagcggaggtgagcagattgcttgagtccaggaattcgagaccaacttggacaacatggcaaaaccctgtctcgaaaaaaattacaaaaaaatagccagacatggtgacacacacctgtagtcccagttactcaggaggctgaggtgggcagatcacctgagccccagaggtagaggctgcaatgagccacgatcgtgattgtgatgttgccactgcgctcctgggcgacagagtgagaccttgtttcaaaaacaaaaaaacaaaaaaacaaaaatttacttcagaggctacagaaccatctcccccttctttctcttctgtcttttgcctttttcatttttttttctttctagattgttttttcttatattttcagtccatcaatggtactctaaggcatggtcctcaaaggcatgagcagctctcagtacattattcagcacctgtgtgctgaccactgtgttagccatgaaactacatgggcagcttatcttatattctgggtcctagtgtatgcacaaatgagtcattatttggaatgacatttagtgcttctttaattaagaaaaggggagtatacactgtatcataaataagaccaagaaaaacctgaaagacaaaattcagattctcttagatatattcaaaaaaataataggttacacacacttgacctttctgagcctcaggttgttcatttgcaaaataggttaatgatatataccttgtggagttatgtgaaaatgacataagcatagtgtctcgcccacagtaaagactcagtaagtggtctgtgtgttaaggaggaagagtaaattaagtaagtatgcaaggatactgacttgcttgctagcaacaaggaaacacaggaaaaatgattaagaataaaagcagactggtagttgaattaataatcaatgaaagaggctcttttaaaagactgtcaagagcacaacattcaaaataaaagtgataatgctttcactgcacattactggagtgttactttagtttggggctgcatggcttaaaagcactgagaaaaactaaatcaggtaatacaaatgtctgaataccttctgagaggctaatacagaacagtggagagaaccaaagattagaaattgaaagcctgggcttgagcccctggctcaacattttctagccacctaactaactagaaattatcagaggctgggcttaatggctcacacccataatcccagcactttgggagaccaaaagcaggtggatcacttgaggtcaggagtttgataccagcctggccaacatggtgaaatcctgtctctactaaaaatacaaaaaattagtcaggcatggtggtgggcacctgtaatcccagttacttgggaggctaaggcaggagaattgtttgaacttgggaggtagaggttgcagggagccaagatctcaccactgtactccagcctgggtgacagagccagactccaactcaaaaagaaaaaaaaagaaagaaagaaattatcacaaatattttaataggtgacacatgacctcactcagttctcacatctgtaaacaaggttaagaataatttttaaatttctgaggatttttgtgaatatgtactttgcaaattataaaacgttatataaatcagttttttaaagggatgataggggaagatactccctttaaaaaggctgacttaactacctgtggatattatctataaaagaataaataaaaggtagatgatggtaaatcttcattttcatagatgatagaattggaagaaatgggattgcagtacagtcaactttgtagagacaaaagagaaaaggcccaatcattaagttgtctaaccaatggccagctatcaatgaacatcagtaatcccctccttgctttacttcttctgaaattcatgaactcatcatttccagcctttctggatggacacacgtacatatgagcagctttaacaagtaaaatgatttaaaattcattttgtttaatgccttggagtgttgcaaagttgattaagaaacactaatataggcaattacattttagagatgctttagttaacccgtgacccaagagcagggtcatagactgaatgactttttgagatttctccattcaatctatttttcttaattgagcaggtgtttctaattaagatgttgaacactagagcaaaaaaaaagtcgtctcacatcatgtgtattttaatcaatttgattttatttatttatttttatatcttccctcaaagtagttgaatttaaaagaactaaatgaggaagaaaattccaattatttcccttctgaagagctgtttgtatgagagctgatttagtaccttcaatacttgaggagacttagggaaaaaaagctgtgtctggattaaaacattaaaaatagaaacataattccaagattaagttccttgacttacttgacatttgaagtaatttccgcaaagtaatttcttttgtaaaggtttataaatttatgagagaaaataccttatcctgcctaaagattattgtgtcaattaagaataaacaagattagagaaaaccaagcattaggctggaaatggatctactctaagtgtgatagaatcatattcaaattattagtcgaaatagtgagtatgagccttccctttttatccagggcttgaataagtacagctatgagtgattttataagtggtccttgtttgcatgtactagttacttagccttatgtttttgtcttacctgtggtaaacttccaccaaaaaaccagaaccccaaatggatcctcagttatcatctgaaactctgaaaacattttggttctcttgtatagccaaggaccatgccctaaaaaaaaaaaaatctctgaagtgggtgccttttacttgattataaccagaatagagacagttcattggaaaacatggaacatatagaagaataatttgttcttttattggaggctaatgttcttcactcagaggttgattgcttatgaaatgtattaagaaattgtgtgcttaacaaaaacaaacttattcaggtttgatggtttgctgatctacacacacacacacaaaatggcccttttcacaaagcagttggctttcatcaacttctccataatgccatacatgcatacaaatcacactttcagttattcactgtagaaatctcatcaataagaaatcccttgtgataactgggccttcattggctttcttttattggccaaatgctgagtatttttggcttgagatgataactttattttaagcctgagagagcaggtgacttgcccttggtctaatgatactaagcagctgccacagcctgtttcacatccactggagaagactgttccctggagagggagcacataactgtgcatgtctctttcaagatgtctctttgggtaccatgttgggaagtgactttccaagggtgaggagtgccctgtgtttagctttttggttacatccctgtgcacaaaggagagaccgtgttaaagagttgagactttgagaaaattcttgttacttcatatgcatttacagtgtacctaaggctgaggacaaattttattttagcaagatacatcaaaggcaaataaatttactcacataaacagtaaaatgacatttttttctcctgtgttccacaatcaaaaggagcttgatttgcaatgggagcatgtaggaacaggaggcatactccctttagataataattattataatagcttccattttctgattatttactatgtaaaatgctcagcatatcatctagcacatacaagaaatagctgttaaacgaagagtgctaggtgctgtactaagcactgtagcactttatatcacttatctcatgtaaggtagatttcatctgaggctttgcaggatgatagggacagtcttattaaagggcatggattgctccctctgatcccctgttaaacaagggtatttcatcaggccaagagaaggtggatgtggcaagcgccaagctctgtagaaagagatgctatggaaatgctaagtaaaatgtcatacttgttgttcagatatggcaaaccaggatgagtcaacccctttcccctcgcacacattatcacctacacattttgggatggtgttgggtgagagtcatctttatgcctgcccttcactattactcatcttactttggccacccagctctcactttgtcctgtcactcatcccctacatttgaagtagggaagcatatacaggcactgaataatttggggtctgtaaatataacctttgagtcactatcacatggtgcctttgtgggccaggacagtacccagtgcagtgatgagcttgcccatctgctttgggtctcagccctccagcaggccttcgtctcctgggtaagcaaacaggcagaagcatctctggcccagaagaacgtcctgaatcacagtctgtgcagttctgtgccagcccccagggaaagcgtgagagcagaagagatgagaaatgcacaaactgaatagccctttcctgatgatatttaattgaatctgggcatcgacagggcttggccaggtagcttgctttccctcacgtgcagctcagctctggcagatttctcttgtaatgatcattctacccaggtagcacagaactttttcatagaatgaggacttgggtaaggatcaagaaacctgggaaccagtttaaactgtgccataaacttcaggcagtcatttaacatctgtgagttattttttcttcatttataaagtaggaagaatacccatcctactggtctccatgaattttgtgtctaaggctgtaaagtcacatcatagctgagaataccttttgaaggttatttttattactagagtcttaactattaacacaattaagtgcaaataataccacccatggaggtaacagatgacaagtaccttgtggaaacctgttatcactctctgttggcacaggagtgtaaattatagctaaggtgtgaggtttttattgttgtgagggaagtggttgtgagggatagctgtggtaaagatcaaagaaggatctaccatagttctcctagttctgcaacaaggcttagtgagcgatatggtctgactgtaaagaacaatgtctacaatgtaggccataacagtagtgattcttcatttatgttttcctgttgctatctgaccaagccttcttctcattgctgattttcttttggttgtggagtaggagtgatgcttgcttcctaattctgctccctctcccacccatctccaccaccaaggattgagccatgcttgagggatggggatgctaccagagaaaatcccagaaagcagccagcaaggactttgtgatgcaatggtcctgtccttcctccatgttttaccttgcagaatctgtgcagttttgctcccctgggaaagccctgagaactctttagcagataccaagactatgctgctaagtccttctgactgaattccttcactggacattggggtagaggggaagtccctgtgctgtgctcttggatttcatagcccctggggcagctcaaggctcctatcacatctaaagcggaattaccagtagagaaaaagtcattcttaggaccacaggacaaagccttagtggaactgctcgaggtctagcccctggcttctggggttcttcagcagtggatggcagaggctatcttcctaatttagataatttctcaggaccagattagcctctttctcagctgcactttttttctcaattctgctttctgctgacttacagttttcctcaaggagccaaacaaataatttttcatctgcatctgcctcttctcccattcacttcccttcctgggtggattattccagagttccagcaaagctgccttcagcagcctctgacaaaagctgcgtgctgaccgcatggctgcatactggccacacatgcccctttgaacatcccaattgaagaggacacagctcagaagctgcaggctcgctttcttttcatatgttttcttgggaaatctcaagaaagtgcagtgttcattcctggaagcgagtctgcagtgctgaagccttggtcacccaagcgttccctctgcatgatggccgtgctcccagactatccaaaatgcagcagcgcatggaaagagactggctgctgaggtgttattggtttgcaataccctgataaggagatttcattcccttcttgctggcagagttatatagagtaattacataagtactgctgtgacactgggcggaatctcattaaaaactgtataaagaacaattgggttgtgctagagaatattcattttatttcagttgagtataatccctgtaatagaacattagcctgagcataaatactggtgttgctccagctccctgatagaatgtatttgggatgtatatttagtgcagcatttgcttatgtggggcatgacagaaaatcattatgaggcaggtccagattttcccacctggtgaggaagttgctcgctgtgctgagcagatcgttgtttgttttttacccctcctaggagagctacttgttcagcttggatgggacagtctatggcagtttgaccacatggcaactctgaaacacacacacacacacacacacacacacacacacacacacagacacacacacacacacacaacacacacacacacacacatgcacatacagactcgggcccaaaaaaatgtgtccccttagcaggtttagccttccacccaagatgtaagagaggcctggtcaggggagaatttgtcttgtgttgttgttcgttcattttcagaaaagtagcaggcaagtccttgtttaatgtaaggttgtttttggttgatggcatgtgaattgtcccttcagccttgctgagcatcactcatcacaacaaacaagagctatcctaagtagtttgctaatacagcagtttaaggctcaaaagcattaaaggacaataacatctaatacagttataccactgtactgtgcatgacttactttcacacatattatctggtgtgtggggaattcagtaatccattcttaattatccagagcataatctgtttggtatttgaagtctaagagcactatgaattattttctttataaaatatttttcattatagttctagtgttctatagcattatagggcaactacaatcaacagcaatttattatatattttcttttcttttttttttttttgagatggagtctcaccctgtggcccaggctggagtgcagtggcgcgatcttggctcactgcaagtgccgcctcctgggttcacaccattctcctgcctcagcctcccgagtagctgggactacaggtgcccgccaccatgcccgggtaattttttttgtattttcagtacagacagggtttcaccgtattagccaggatggtctcgatctcctgaccttctgatctgcccaccttggcctcccaaagtgctgggattataggtgtgagccaccacgcctggcactatttattgtatattttctaatggtagaagaacagatttttatgttctcaaaacagagaaatgataaatgtttcaggtgatgcatatgctaattacctgatttgatcatttcctctgtagatcttctgactggcccacctgaattttgttatctggtctcacaccgcatttcgagggaagaaaccaagattaatcatcctccattgatataaggggcattatattgaagactatatatccctgttgttaaaagtcagtgtcactttgcctgtaatcaaagtaccaaaatgatggcaggggaagcattcaactgttaaacagccagcctctccggttattaaaatagcactgagcaaggcagctggagtaaaccattttagaatctggggtttgctgtcgctggtaaggatgtcccagctgtgccttattgtcaaaattctcttcatcatctcaggatgccaggtcccaagctgagctcactctggggactcagatccattgaatgggaacgcttggcctctgcccacattatttaggagctgcaggtgaaactgaggttaagagaggctcagtcggtgtctctcttaatgcatccctgcccacaggaatgggtgtgaatgcaaatgtatttccaagtatgcctgaggtagctgaagagagactatagaatcatcatccccaaggacttgtcatcagctttcagtctatcgtagtttaagcatggctgtttgtctatgtgaatgcgtgttttaaagcatgaaaccaattttcctccccagacaatggcctgctccctttttattgaggaaaataggattgaatttaggatctcattaaaggaggcatatgtccctccttggtcacaccctactccttcgttcacctatccaccttcccggttgtacagaagcacatctaatacacatggcctctagggcagagatctgaatgggtttcttcagaggctgcaccattccaccagtacctcagctaggagggctgagaccactgagcagtgggcctgaatttgtaaccagagcctgcccagatgcagtgtaggacaacctctagccttcctgcataccaagaaggaagaaggaagcagttcaagaaactgaggcataattgtgatgaccaatgcaagttccagagctcctggctgcctgacacgtgtgcccttcccaagccttggaatctccatgcagcatgcaaatgtcttcttctttcatccttttttttttaagttagcagaactccctgaagtgcacttactctccaaatatgtatgcagcacgacttgagagatcacttctgtctgtaatggatgccttgtgtccagggtattttcctggatattgtgttattcaatttaggactcctaatgcatgattaatgtgtgtttaaacaatcattgcctaattggactgcttcacctgtaagacactggggagtacacaaagccaacttacaaaaaacaccattggctatgtggaatgatgcaacaactctagtgtcgtacaaggaatgaacattttgaggctgatatggtgcccatctcatcctgtagttgctaccaagcaggactttcagagactggcttctaggaccatttgtttaattcagtgtttttttgagcatctatcagcaagactccatgagttccagaaaggggaattggatgtaggttctacctgaagggagctcacagtttagtaggaagtagaatatgtttgtgaataattatatcactgggtggaaagttatgagggccctaagacagatttttaaaagggatggaaagcccatcccattgtgaaggggaacccatgtggacagtgagcatagatggtagtggatgggactgaggggaagggaaggagtaagaagctcacagttactgctagggatgtcagggaaccttgcaggggctttgcagggcctttcccagtcatccacacaggccaccaaagtggtaagtttgggtgcctgaggtgtccccattggtgacccttgctgagctctttccctgcaggctttgcctactaaccatggagccctgaagcctgcttagtgcttcttttggcctgtatgtctgtgaagcagaagtgtcccatgaagaggtccccaaattctagattcttactcacaaaaatatgatttgaacttaatgagctgtggacagatggcaaataggaaagagaaactaaggtggttgactctgaacattttggtcattttcattttcatctcatttgcaacccatcaaggttcttagaagatttgcatgtgactcatcacagaatctgaaccctcaaagtgggtcatgcctgaaaaatggatgaggagttttcttctgacagatgttagttaggggacagtacaggcctgtccttttcggagaattcttagaactggttgcatataaatagaacctgaaaaatgggaacttggctttaaggtatcttatatagagtgagggagtattggtatgtgtgtgtatttatacatactttggaaaaaaatatgccctccttatggaaactgttttataagttaggcttgtaattgctacatgattcaaccaccaaattaccgaaatgttccccacaaggaggatttgacatttaatagaaattttaatataatggaatgaacatgtcaaaaatccaaacagatttttaattctttaacttattcaaatttgaatttagaagaaaggatggtttcaggtaggtttttttcttcccccatgcttacaagtaatggtgggtggcagaaatgtacactgaagaggactccagacttctaccactatatcctaacagtttcccaggcagcagccatatattagagtacaatacactttcaatcccttttatcctgtcaacttggttattttttgttattttggaaaatgccatatggcacaatgattatatattcaggttctataattaaactgcttgggttcaattcccagctcagtcacttactaagcaagtttgcctgctttctctgtactttgattttcccttttttaagtgggcgggattgtggtacctacctcataaggttgttgtgatgattaaagaatacatgcacagtgcttaacacagtacctgacacagagttagcactcagccaacatcagctttctttatccttctctccctacccctcttattcaggatctacacctgtgggagaataagcccaaggatagttattaaaaattgccagcttggctactcgttagcttttactaacatctgggataaaaggtttaagtactggaggggtttgaaatgtagtagggtttgagttatcagttaatcttcctgtatcccagctgcctctgcttcagcaataagggagattgaatttatgaaaactaaagctttcccaggcctctacacactctgtctgatataaagtgcacctgtgctgtctccctgggtgtggcattcctccctgcctttctgattgtcctcacctcggtccatgatgcaaccattcatccccttgccctctccgtctttctttctttcttcattcttctttttgtttctcatgtctttccattccttgcaacctccttaaaaccagggattataaaaaccatcattttgaaattaaatttaaaatttcaaatggattttcttttgtaaattgctttttataaagccatacccaaacactataggaagatagttttaactgtcaacttttgccaaactcaaagttatcagcatgaaattgagaggtgatagcttttaaatatatggagtttggaaaacagaataaatggaaattgtatagccatgcacagctttttgtaatctaccaagaagtctatttcctagctaatattcttcacatatactctcacactcaaggtaaatatctagcagccaccgctgtgtaatgctggctaaaagtgaagcatccaaaacatttatgccaggaaatttagattttaaaggatattatacaatgaaacagaagttgcttaagcactagtattcattaaattctattcaagtgataactttaaaagtagacatttctgtaggttcctttttcttttgaaccagttcacctcaaattgacaaggtgtacgggaatttaaaagcttgtacttttccagcttatgagtaaactgagagaagtagtttaatgctagaaatggtgttacctggtgttctaaagactgaagttgcctaccagacttccaaagtatctactttaactaacactagtaaataaattaaccaggtcatcattcagaatgtgtctgtcttttagaatgagcttgaagtgtttgaggagcacagaggaggccatgtgaccaccatgtagggagcagggggacagaagagagcaaagtgaaagtggagacccccttccatcctgggaacccactgccccatctagcagaactctttcattaaacttcttccctcaacgacccagatcccaaaccttctctcctgaacacaagacaacccaatcctctacttcctttccctcccctaagactcccagacatatccttcatgttttctaatgcattttacattattatgttagagataccccagaggctgtgtgttgtagtggaaagagaatgaacagtagctctaaggctgaattttctcatctgaaaaataaaattagaaataatgtgtgtaaataaagtacatggcacatagttagtgctcagactctgccagcctgaacgatatccctttccagcctatgttatttcctcgtgtacatgcgtatataaacaggagaaaactattaacttataagtatttacagtcatgctatacacgcacacacatacacactgaggaagaagaatcctgtagttgcatggctaaccatgctgcctttgctgtgataagcagagaaatagatacagctgcagatttagaacagtcaagagctttgcctttaaaagaagagagagataagagagcaaaggacctggataggactggaagagggaagccaagaggaggagagatttgggtgctgtcagaggaagtgagactttggggaatttttttttttttttgagacagagtctcgctctgttgcccaggctggagtgcagtggtgcaatctcggctcactacagcctccgcctcccgggtttaagcagttctgtgtctcagcctcccaagtagctgggattacaggcacatgccaccatgcccagctaattcttgtatttttagtagagacagggtttcaccgtcttggccaggctggtcttgaactcctgacctcgtgatccacctgccttggcctcccaaagtgctgggattacaggtgagccaccacctggggaagacatttttaaaagatctggggggcagggggcagagttttgctttctatggtgcaatgtgccctcccgtccatatgcctaagaaatcttcacaaaggttatattacacttcagtacatttacagtgggatgcatgcagttgtgtgtccaagaagttccatgtggtgtttttgtatgagtgtcctatgttggcataggatgagggcttggcaatcatataacaggctcaggtacccaggacctacttcattcataatgatattccactgtaacaagtaaaagtaatttcatattttaaaaaagattgaaatgtcctcagtagtaatttaaatcagttctcctctgcctacaactgaccgtgactttggcttttgtttagtattctttctagttctttgggttcaggaaaattttttatttaaaaaaaatgacatttttaatgaagggagtctttacttcctataatgaccaagcacttcctattgaaccaactctcccacagataagtgtaaatgttgaataaaatataaaaagcaaccacctaatgccactggagcataataaaaagtaggcagggtagtgtagggtctacccttggaagaaggaaatggcagtgggtaagtttcccattttttaatggcttttagattaaggagatgtcctatctggtgtcatataaactcatagaaacctgccgggcgctatggcacatgcctgtaatcccagcactttggaaggctaaggtgggcagatcacgtgaactcaggaggagaccagcctgggcagcatggtgaaaccccccctctatcaaaaaaaaaaaaaataaataaataaacttatagaaacccacagtttctatcaaacccacagaggccacagcttgggatagccacagcagctggaaaatgaggaggaaaattccagaaaggagagaggcaaatgggaagccccaaattctgtgcataaatcctgcccaaatatctgactgaccctttaactatgtatgcgtgggacagactccaaggaacccagccggtagcgggtgcctgtagtcccagctacttgggaggctgaggcaggagaatcgcttgaacccaggaggtgaaagttgcagtgagccaagatcatgctactgcactccagcctgggcaacacagtgagactccatctcgaaaaaaaaaattagctggtcgtggcggctcacacctgtaatctcagctactcaggaagctgaggcaagagaatcacttgaacccgggagttcgggaggtggaggttgcagtgagcagagattgcgccactgcactccagcctgggcaacaagagtgaaaactccgtctcaaaaacaaaagaagtgggtccttttaagtggtgatgggatttgtaagggctctgccctcctgaatggcttaatgcgttaatagattaaagggttaatggattaatgggttatcatgggaatggaactggtggctttcttagaagaggaagacagatctgagccgagcacattagcccactctgccccatgatcatgtgatgccctgtggcacttcaggactctatagagttcccaccagcaagaaggctcttgccagatgcagtgccttaaccttggacttctcagcctccataattgtaagaaataaatttcctttctttataaattacccagtttcagatattctgttataagcaacagaaaaggactaaggcagtggccgatgggatatggtactgaaaagataagtaaatgaccaatcatggagagccccaagtgcaaaataacaaagtctgctttgctctaagtagaaagaggggtcacaatggccagatttggtaaggaaagacttcatggacagtgtggaacttttgccctgaaggagaggttgtattcattttctagggctgccatagcaatcacaaactggcttgaaacaacaaatttattctgtcatagttctggaaactagaagtttgaaatcaaggtgtcagcagagacattctccctctggagactctagggaagaattcttccttgcttcttcccagctgctagtggttgctggcaatccttgccattccttgcttgttactacatcattctgacctctgcctctgtcttccctctgtgtgtgtctatgtctcttcatggtcttcttataaggaaccaataactggatttaggtctaccctaatccagtatggcctcatcttaactaattacatctgcaaagactttatttccaaataaggtcacattctaaggttctgtgtgaacatgaattttgggggacactattctacccagtacagaggtgagttaaaagtatcatgaaatatccaaggtcttacagttctgggcctacttaatccttaatattaaagtactctcttacggccaggagcaatggctctcgcctgtaatcccaacactttaggagaccaaggcaggaggatcacttgagtctaggagtttgagaccagtctgggcaacatggcaaaaccctgtctcttttttcttttctttttttttgagatacagtttcactgttgttgcccaggctggagtgcaatggcacaatctcggctaactgcaacctccacttcctgggttcaagcaattctgtcttcctcagcctcccgagtagctgggattacaggtgtgcgccaccacacccagctaattttgtatttttggtagagacagggtttcttcatgttggtcaggctggtcttgaactcccgacctcaggtgatttgcccacctcggcctcccaaagtgctgggattacaggagtgagccaccgtgcccagccggcaaaaccccatctctacaaaaaatacaataattagctgggcctggtggcacacgcctaaagtcccagttacttggggggctgagataggaggctctcttgagcccgggaggtggagattgcagtgagccaaggtggtaccactgcactgcagcctgggtgacagagcaagactctgtctcaaaaaagaaatattctcttttatggaacattagtattcatgacagtatattatgtgttatgattaatacctaattattcatgactcatttatattttgactcttatgtgttgtcattgatagtaacaagaatttcatttcactgtaaacatttaaaattaagatatcactaaatactaatcccagccttctccctgtcttttgctgtcttccattgttccagatgagtaaggttaaatgcattttttgggagaagagggttataaaaccctccacaaaatctgttttctaaagcaaagccattccattaagcagacctaagtttggattgtcaaagtcccatagactctgaaaagcaagctgttaaaactataatgagtttcggtgttgctgcatttggaaatgcttgcagctcagcagcagtccttgtactagactgctctaggagagggagggggcagatgtctgagggactcttgtctttgaggccatcatttcagacattagttgaaattccatattcttgaccttcatacattctttaattatgaattcctagcagtcataatttgtaaaaagcatatggacaactcccctaatgacagatcagagatgattaacttaaaatatttaattcaactcagaagaaccaaagatgaaatatcttcttccttcctctccctctacccctataccagcaagcctggctttttctaacaatatccttaagttagagaaaatgcaaatgaagctttggggattcaacttaaaatgaaaacattttgcagctgtcatggctaatttgacaataaatatgagcatcagtaattctcttaatatatttcttgaataagaatcttagaggtaagaaaatattgcctccaaaggctcctgctgatggactacgtcttcagatgtatttcatgtctggaattgacccactttcttatgaaaatgatcaccagtatacaactcaaagttagtgtttaggtgcagctgagctcacaggagcaacgcccccccgcccttagttttctgtgcagaattagtttcagttctgctggccagtctgaaaaaagcacttagaatggtatttgctagacataatttactacttttatttttgcagcttttatgctgtcaagatttattttttaagtgcccaccatatttcaagaagtgggcataccagaaggagtaagacaaagtccctattccacccacccagctctccatgataacttacagataattacaacatattgagaagcagatacaacatattgacagggttatgtccagaatgctatggaagctcagaaaagagcatctaaaacttgctttaaagaaatgtacaagtagccaggcatggtggcacacacccacctgtagtgctagctactcaagaggctgggtggcaggatcacataagcccaggagtttgtggctgcagtaagctatgatcagtcactacaccccaacgtgggcaacacagcgatcctcccacctcagcctcctgggtagctgggactacaggcacacgttaccacacctggctaattttttgtattttttgtagagatggggtttcaccatgttgctcaggctggtctccaactgctgggctcaagcaatccgcttcttggcctcccaaagtgctgagattacaggtgtaagccactctgcctggcccaaacatgatttctatgctttgataattgacttcaaccttggtacctacaagaagataatgtattctaacaaacatttttttaaaacatagggtttgccaaaacagtgtgctctaaaaagaaatcaatgcaatggctgatctaagaaatcttaattatttccttaattaattcagtagtcagagccctgaaaatattaatgacccattcaccaaagtcattgtgataatactcgatttaaagatagcttttcaacctgttctcccagcctccttgctaattatcctccattcctaattctcattcacgcccctcttcaaattggtcacttaaatactatttattctgccacctaaatattgatttaatttttatcctcactgcccttatcttattgcctattatagctcacctgtattgttacagtgatttcccgactagttcttagcatggtatacacagcccttcaccatgtggcatttgtttacctctccatattgatctgcaaccgacgtccttgtaccaaggcagttatttgaaattcctagaacatgctctagacatgatggtctcactcccaccaaactacccctgtaccttgtacatacctctcttataacagctatcatcccattgtaatttgggagataatctccccttcccaaaaataaggttcactttctaattaatggatagtcaagggaatcattctatcatttctcatctctagagtctccctgggcgggaagaatgggcacaagaaatagggccccattactttcttggagtgcagggatgacttgaatgcactgaggaggctgccccagaaactgttcattgactgcatcttgcacagtctgatgccacgcactttttaaagcatcttttgtcgttgttgttgtttgttttgagacagagttttgccctgtcgcccaggctccggagtgcagtggctccatctgggttcaccgcaacctctgcctcccaggttcaagtgattgtctctccgcagccccacaggtggctgggattacaggcacccgctaccaagcctggctaatttttgtatttttagtagacacagggtttcaccctgttggccaggctggtcccaaactcctgacctaaggtgatccgcctgccttgcctcccaaagcgctgggagcacatgagccaccgcgcctggtgcttttctaagcatctctgacaaatgaaaaagagcaccccagcctggcacagtggctcacacctgtaatcccagcactttgggaggctgaggtaagtggatcacttgcgcccaggagtttgagaccagcctaggcaacatgctgaaaacccgtctctacaaaaaaacaaaccaacattagctgggcctgttggcacatacctgtagtcacagctacccagggggctgaggtaggaggatcaattgagctcaggagttcaaggctacagggagccatgattgtgccacgacactccagcctgggtgacagagtgagaacctatctcaaaaagataaaaataaatatatacattaattaataaaaaagagcaccccagagaacaactataagacactctacctggggagaaaaacccacagagccaaatgaacttgtcaatggtgcatctttttactgaggcagcagcttttcttgtcttgaactgatgacttcttttggcacatgcatgtcatgctgaagattagggagatctggagtgtggaaaggaagaacaagattaataacagcctttggggaatatagagaggttgtatataacctttcatgttatccctggcacctgcctcatcagctcccccatctgggggatttgggattggttatccactgatatttaatctccaggatatagaaattcagaaatgttctgatcaaaaaataaatctattggctgggcacagtggctcacacacctgtaatcctagcactttgggaggccgaggcaggcggatcacctgaggtcaggggttcgagacctgccaggccaacatggggaaactccatctctactaaaaatacaaaaaaaaaaaaaattagccggatgtggtggtgcatgcttgtaatcccagctactcgggaggctgaggttggagaattccttcaacctaggaggcggaggttgcactgagtcaagatcgtgccactgcactccagcctgggtgacagggtgagactctgtctccaaaaataaattaattaatctattaaggatgagcatggtgtcattaagaaaaaaaaatctaaaaagaaatctggctttaaatgctgctcattttttgcttcataatcttcaaatattgttggctaagttactggtttctgttaaattttgaggctttccctctttgtgtaccttcttggagaagcccagcctctatactgttttcaacaggagtggtgttctggttgaagcaggccaatagtgcccaggtctaaggaatccaaagagttcagaaaagaattcaagcaatgggctgtatatatgtgcatagctaccaatttataaatatagtcagaggactataaaggcaacccaaagctgcatagaaggatggagctgtaggttgcttctgcagcagctatatgagaaaatcaaaaaataagagtctagcgtttggaaagaatgtgagctttggagcaaggcagcgtggatttgagtcccatatactagttgtgttgtcttaggcatgtcatttaacctcactgagcctttgtttctctttataaaatggggttaatagaaactttccttgtgagattgttgttagcattagagataatgtttgtagaatgctttgcacatggtaggcttttttttttttttttttttgagacggagtctcgctctttcgcccaggccagattgccagtggcgcgatctcggctcactgcaagctctgccttctgggttgacaccattctcctgcctcagcctcccgagtagctgggactacaagcgcccgccaccgcacccggctaattttttgtgtttttagtagagacagagtttcaccgtgttagccaggatggcctcccaaagtgctgggattacaggtatgagccaccgctcccagcctgcacatggtaggctcttaagaaatggtagttatgatttggggtttctgtcaagagtggtgtgatggaggctaatactccacccaggtccccactaggggtcctgttggcagtggtcaacattcagttaccgcttgagacaagcttataaaagacttggctatcttggctaaacttgaaacaactctaaagggcccctctggctccagatctccccatggtccaaccaagtcaacactaggcccacgtggcagctcagcttctccctctgctcactccagctttctccccctcttttccatggatgttgttcccaggagcactttttttttttttttttttgagacagtgtctcactctgtcacccaggctggagtgcagagtgcagtggcgcgatcttggctcactgcaacctcagcctcccaagttcaagcgattctcctgcctcagcctccctagtagctggaattacaggcacgtaccatcacgcccagctaatttctttatttttagtagagacagggttttgccatgttagccaggctggtcttgaactcccggcttcaagtgatccacctcccaaagtgctgggattacaggcatgagcctccacgcctggccgaagagcacttcttaataaacatccttcatgctaaactctgtcccggagtttattttctaaggaatctgacctgtgacaaatgataaggctggcagccaattctatgttatcatttatcacccattgatctgaagcccaatgatcctatgccattttgtctaggtgtcaggatgtattttagaaagacaggcaaagcatcagaaaaactgtaaagagaaaaatcttagaaatgtaacactttcctatagaaaggcatttgataatttccaaaagttaaaaacatcctaaatcctgctccacatgaccccaagagcatggcagtattttttagcatcaatttcctaaaaataacttggctatgaggttcacatcaatataattaagcaaatgtaattattagttttttccagcattgagcttttaattccctttccaatggcaaggacccagttagcgatcttcctggaagcaaagccattttacttgcctttactgtgttggttgtataagaagttactttagaaccgggctgtactgtcggcatctttctggagttgaggctgggacccccttgtctcagtcagcttcttccccttccctcccttcccaagtacagcctatgtagttagaatcagcaaactagataaaaggcagaacccagcagaccgattctgaagtgaatgtctagagttaagctagactctgatttggacagggataccatctccaggaatacccttaccccagtttgatcctctgttctttcctacactgatctcactgggtattaggagttgaagactcaggaaggaggagctcatcaggtaattagcctggtcatagtcatttagtaattaatcaacaaatacttcttggccgggcgtggtggctcatggctgtaatcccagcacattgggaggccaaggcagaaggaccccttgagcccaggagttcaagaccagcctgggcaacatagggagacccccctcttcagaaactttaaaaattaactgggtgtggtggcgcatgcctgtgattccagctattctgaggctgaggtaggaggatcgcttgagcccaggaggtcaaggctacagtgagcggtgattgtgccactgtactccagcctgagcctcagcaacagagcaagaccctgtctcaaaacagaaacaaaaacccacaaatacttcttgaggatcatgtacagggcactgggctgtgaaccatgaatgcaaacactggacaccatgcttctgtctctcccagtaatggagaggagagtggaattaaacatgggaaggttagcattaggacagctaagcagtacaggcagtgcatatcatgagatcagagaaaagatggcttttcccaagtcactttttcaggtatgtctaaaccgcgtgtctctgcagccttgagatagctcaggtagtgccttgctcagattagaccctcagtagatacacactgaattgagtgtttttcccaatggttttccatccactttttggccttcaaataacacaatattcagttggcagcagatgttaagatttttttcagcagtaatatcccaaccaatgtgcagaggcacagaagatgacagggatgcgccagaggcctcagggagccgctgggctcaaggttcctgcctcccctccactcacccctactcttcttgaccaaaaactgaagaaggagcagtcacacacttccagaaaacttgcctcctctgtttgctctctctatcacactgcaaagcctggaccatggttcttcctgatgctctggggacctggtcattcccaccctacccccagtgcacattaagacatacatttccaagcccaagaattatttatttgtttattacttatttgagacagagtttcactcttgccgcccgggctggagttgcaatggcacgatctcggctcactgcaacctctgcctctcgggttcaagcagctctcctgcctcagcctcccaagtagctgggattacaagcacccgccaccacacccggctaatttgtttttgtatttttagtagagatggggtttcaccattttggccaggctagtctcaaactcctgacctcagataatctgctctccttgtcccccgaaagggctgggattacaggcgggagccaccacgcctggccccaagaattatttatagaccaaaagacatctgttgctgctcagccactgaaataccacatgtgggagaaccttcaggaaactaacaagttgagggacccaatggtacttgtctgaaagcacatccgcagcttctgcctcagccacgtttcagaggctctgcctctggttaagtgagatgaggttgcaagggacactttatcagcccctttccatctctgtcagttcctatcccttctttatctggacagttgaagagttctcaatcttatacacaagatcatacaaataaatctttattccccaccctcaccccagccagactgtcacgcctaaagccctcgcatatagaaatccagcagtcccgctgctgcctgggttatagtttaggaaatagtgggcctgggaaggacagaggctggtattagcctgaggatccactctgagaagatcttgcaacgatcctcattttatgaggctggaggcgggcattagatgatctaatgggacttttccatcgctcacagtggaatgtaaaatgaccagactctagcaggataatagtttcacataatggtgttcactgtgtcaggcctgctagaggcagtttctaaaattgaatggattctgtttagttactctttccatttactttgagcaatggccctgagttttttagattaattacactagcaataaacatctacctgttaaagctacccgattatcctttttaaagaaaaaaaaactgttttaaatccttgtttagaagatggacctgggatgttattactttgattgactaataacagaatcagaggattttgagcacataagaggacatgagattatttgcagatagagaaactgaggcacagaaagggaaaatgacctgcccaagagatcacagtcagaatgtgccttttcttactcccatcgcttccctcctgccccaaactccctgccaaagttgaacatggaggacttgcctccttggcatggaactacatgctcagagcatatttcctatacccaccccaaccctccatggaggggcagctggatcctctctcaggaaaaggagagaaaggagaaggctggtcttgacagccaagacagaattctgactaaggagcctcaaggagcgtagatgtagggaggagacagcaggatgaggtactggggcaccttccagccccgcctcctagacaagagagcccaaaggccaggataggacatgttctggaacagactccctgtcactgacagcagatctggggtgagaaggggagttctttccccggattgagtttgatgataactgctggctttattttctgatgatctagttcatagcaaaagtgcagtgagttttgagctagttagccattgaaaataaatggtaattggggactcgaacttgcaagccagagttgggtagctgcccactgtcatgaaaggcagaatttaaaaacctggtaggaagaagcagtgtttctctgtaatatttaactcacagtctaatgctctgaagttggtactcttgttatatgaaaacgtggaaggttaatgaaagtggggtttgtgctaacagagttggattgtgacagaggtcaaatatctgcttctctttcccttatccctgtaatcttggcttcaagagctacaagaccatcagatgccagtaatccccagaccagcaacagcagcatcacctgggaacttgttagaaatgccaattcccaggccccacagcagacctatgaactagaaactttaggggcggggcccagcaatctgtattttaacaagccctccaggtgattctgaggtggactcaggtgtgagaaccaatggtccggagtatggtatgcttcctaatttgctgtttattaaggaaagtcagccttctgagtgagctagctgtctgcctcctatcttgcctccttctcctcttctcctccaccagtgggacaaccactattggaagattcggggtttgtcctgctgctttcctaggcctcggtatttgtacaggaaactgtctctccacccatctgtctggctctgggccccagctgtctcactcctctcctgggactctcactattgttgttccagtgaggttgtttctactcagtgctgggaagggaggcataaacgtggcttttgttcctctagtgggaccacagatcaaggcagaccatggaactcttcttcagagttctgtttgctgtgacaaggggctttcaagggaggccctggctgtccttctcaggagaagcagtgaaaatgacttgtctggtcctgggataggatgccagcagctgtgtgtgactgggcatgctctggggaagttggggcttcagtcagagagctgtgggccctacttgcccatccctctctcatttatctgtcaatatcctgttgtgcagtgccctggggaatcccagggggaagagtctaatgctacaggtagctcccataggtttaactacagagggaacctgttctgttttttgagagagatcaggacgctgagttaatttcttgaaatatattttgccaaatgctttttttctttttattctaattaaagccaaggcattaaaaggtatagtgtctattggaattgtgtcatatcttattccccttattcagctcctcctttctagggagcatgtcaggagcctgtcacagaagctctgcctttgtctctgtggcactgattagaggctgccaggcttctgaggggatttggtttgattacatatatttgaaattttctactcttctgatcaggaaaaaaatagccttgggtaagaagaagacgcagatttgtactttaagagccactttgggcatatttccaaaatggtagccactcccagatcttggggacactacaaggtggacatgtagccaagatccattcatgcattcttgtccagggaggacaggcttctgttccttgagtgcattgactcattgctgaggccttgtgcattcaagtccatccatcctggaggaagaagaggtctcaagaggctgaggaagttggcacgaaaactcacagggtttttatgtatattttgtgtcttgattttagccccacagtcatccttagatgtaagattaactctgttttagagataaggaagctgaagcttgagtacattaagggatgggtctgagatcacaagctgagaagtggcagaccagggccttgactctaagtctacttagtgctcgttctcaaagcctttgccttcccagagctcctcccctttctgctccctgtgcctcaacttctaaggaacataagtaacctgataggagagttgaaaaggaaactgcacccagactgcactcaggactcaaagatcctgacctgtttgctaatgaaatgtgtctacctcaggatccatcacatatgttggcactggccagtaaacaatttttttgtgaagaggagggaaataatcaaagagttatgaggaccagtgagtttatcatatttctcctgaccctggccatccaggatactccctaaaaccccagaaattcccagattttgccaaacatgcatttgtcttttgcaaaaaaaaaaagaaaaaagcagcaataaaatgagttgtcaaactgtccttagggttggagcaaggggaagtcgatctttccccaaattctagattttctttacaagttatttgaagcagcgttgtatgagaagtgcagctgtattagagaatgtgtgtgtgtgttgggagtggggatcggggggtataagtgtgagagagaaagagaagagagagagagagacagagaatagagaaagagaatatgagcttcacaaatacaaagcaatgagttttttcctaacaagcctggctgagtttccagtagttctgcagctgtgacatgactagtccactgagatattcagcactggttggaaaaatacaactaaaatttattcaatcaatagcaagatgcagtgatgcttttaagagtcaccttacttgtaaaagtggcttctccaaagataagaaagatgaacgagttgtctgcttttcttcagacctggctctgtttttctttttctttccagacacttcacagggtacaaagatttcatatagaaatgagacaccttgtctcttgaagcatcaccactgatatctcaataagactggccctcttgttagccttgctcttacaagctgtacaacagcaggtttgaagttctgctcagagggtcttaattgcccttgttgagtctgctttgggccatctgtgctgacagaacacttagtcctccctcccatgacatttccttgcgcacggtgacctccatgttccagactgaatgtgatttccccaccccacgtgcacatcctgcgtgtcacaccatgtggcgatgagcaaagccagttctctgacccaagtgaggactgccaacagggctccctgcagcactgcacctggcatctgaacctagagatatctgtgtggcttcatgaaaatcaccccagctctcaatttgcatgtagaagggagttgttggggcaaagaagttgctgtatttaaggatttggtgagaacagtggctaagaagcactgatcctttctccttctgagctctgatttccctccactttggggcctcaccactcctccaggagccacatggttacgtggccccacagcagcctcctggcattgtagtctagataccagagcctgcttgggccctgttcttcccagcctgatggctgagttctgagagtaggaaacagaagggagtacctgggtaggggtgagctatggccctgccacatttgtggtgacctgctactcaagagagtattgcttgcagatggacgtctctgcatttccccctggaatgagctttcttaatcttctcccagagtgagctggctgctcttctagctgcagcctcagcagttcctggacagatttcattggtttacgactaagcaggaaaagtgagctcctgggccaagagctcagcaggggttccctcccttcaaagaaagtgtaaagaaggtgctgaagttagggaatctgaggttctgctgttagcacttgtgccccacaccctccctctgcctcagaaagctgggctgggtgtagcatgtgaccatagaggcagggactgcaccccagaaattaattcacacttttctgctcagctcactaatgccatggccctgagaagatgacctactgtggctgttcctctgtaacattaaagtgcttttacacagcatctgctctggaacctggcagacatcggcatgccactcatgccctcacaccactaaaaggcatggaaggaaagcaaggaagtctttggcctacaagaaatttaaatatatatagttaagctagaatgcaggctaagatgccatcccatccctggtgcctgtttcttccccggcaggcctccaaggacaactcgttcaactgttgcccttcctccagggtgcctagtatcagtgtggctttcttccacctctggactcttgtactttgggctacgggtgcccactttctgtaatccctccattttacctctgccttctctaagggcccgtgaaaccaaggccagctaccctttaacagattgtgaaccaaggtcatagcatgtagccaggaggaagttggaatcactcttaccctctgctagactctacttcgtttgcacttgcttgtgaggtgcttgtgtgcctcacaagtaagcaggattgaataaagtggagcctaatgagtggagctttctgcatcttggcttctctcatcaggatgctgcatgccagagagcctgggattaacctcatccatgatgggttaaaataaagctcctctcctgcccatggatatcgatgatgagacagaaaatgcaattaaccttaaatagtttaggtcactggcccaagcttgcttactgcttgctacctcagtcccttccctaaagaataggcaaaccatagagaaccagaaccaggcgttccagggaggagcaaaaataggaattatcccaccctcagagctgcacagtgattccaagaggctcatgaatcattctgtgcaccatatagagagaataaatgggttgtacctatatgcactagtattttcaaatatgtataggcactgttgtggttcataaaatataaatttattttttaaacgagtgcttaataagttattttgatccaataatgtctttgggaagagaataacctcagaagtagctgcagggtgaggatttgggtgctctgcctcagctcacttgtcctgaagataaatgtcctcaggcttggagctctgactttgtgactaaacagtaatcacctgtcagcgcaagtgcctgtttctccggtataatcaatggcacaacattcaacgcacagtttagccacagtgccagggcacctgcaggcaaagggaagggaagacggctttgccatctcatcaaaagaaaagactgactgtcacagaatattccagaaacccctggacttaggactgggagaccatggagagggtatcccaggacgcagctggcatcaggaagtgcaaggggatccacaagcccaggaagttgtaaaattcctaaaatcttgcccctgccgttggcttgtagggagcccatcatgatggttcagctgcatgtgatttcacccagtgctgcctcaggccactccaccagccacaggtgtgagtgcctcaaaggaagggctttgtcgcaaccctctgtgaaaggtgcctctgcgcagagctctaagttgattctacctttgcatacctactggggatttaaatttcatggaattctatgtctacctctttcctcattcccctcacccccaccccagccttggagaaagagcaaaggaagatgcttctcttcattagtctatgcaagagccctgcagctcaaaacaatgcatctaacactggtaactggtaaatgggaacttgagggaactatgtcttcacggcgggggagcagggggattcaccaggtgctgaaaagtaaccagaaaaaggtcttttttatgtagctgtagggaatgggtagtgggatatatccttatttcctaactactccaagagaaaagccatgcttcctttttcttcctgtgaagtggaagaaatctgaagttggatctaccaagttcagggttcttaccagctaagagccttacaagtgcatctgaactcgcagcccatgagaatgagttgttttatgaaaggcaggattcttattaaaagtctgtatgatttccatcacagaagcatgttttccctatagctatctctgtcccattgctaatctggttgttgtatgtatggaagcaaacttcttcagcccgtaaaactcacatcatactgtagtagtgtttgtgaaaaacattttttcattaaaaaaaaaaaagcaccagctgatcacaatgtaaaagccagcttggtgcaaagtaaaatttgtagagaaaagcaatgaaaatatgctactgtctctcactgttccatttcagttgctctgagagagataatagtataggatatgctgcatgggatagagtggaacatgtttcctctgctcccagagaacctgaaatacctctttaagctcttctcactctcttggcatcagtgaagaagtagttaataggccctgcacaaagaaagttctgacggagtcctttgaaagacctggtttgtggcccaccacccagaagtcccagtgtgattcataacgagtctctgtcctgagagtcactctttcctgtaggggaccaaagacaggaggaatagggcctgcgagttcaggcttatgttgtgagagggagtatgaggctagcagaagtgataccagtgggctgggggaggtccccaaacgccagtgagacctccaccccacctggtgtccaggctcttgacaccattgagaagataagaattctttcaagaaattcaaggaagagtcagaaaatagtaaaagaacagagatttattgagatttattgcaaagggcaaagtacacattcaagaaaagggagcgtaggcatacttgagagagtcattcagtggggtttggggtttctgtctttatgggtttctttaaccaaggggtggaatattcaagaaaattcttgggaaaaggtagagatttctcataactgcagtggcacctatttttacagcaaatatgggtggtcttggaacagtcctggcgctggtaggtgtgtgatctagtatgttaacgagtttatagtgaggtcctaggagaaacctaggtcaaatccagccacacattgggttcagtgggtcttagctagcttggtctatgccctgtttttcagggtcttatcagcccatagcctctagtcatgtgaaactgctgtctggaatttttattctcctgtgaccaccctgtattattcctgtctcagaagaggaggggtgttgcccacatgttgcctccttctgtagttgagctgtctactcacctattcttccagctcctgcaaggacaaacttcttaacataactgccgcgagatcagcatcctgccctagttctccttggatagtatgtggtgagttagcagaaggggaagaggtgaggtgtaaaccttttgtgaaggtctttaaaatatgctcattcttggggcagggccaggcccttctgtaattacccatggccttgggccttggcacaggagagatctttggatcttatcttacaacctcaatttctgagacaaacgtgataaccactacactacagaaattcctcatacaacctcaatttgtatgcaaaattagacatagacccgccagagatgatcatctgaactgagctgcagagaccactggggacaggccagcgatggatgctgtgcaggctccagatgttttgacaggttcctgcaagtcattctcctcccacttcacccttggcatccaggcaggtctctgaagtagaaggttatgggttataaacggcctagcttttcaccattttgtgaaatcttttagcaaaccttttcccttctattcattcagtaatttattcaacaaataattattgaggacctgcctgccatgcatcaggccctgtgctaagttctgggggaaggattctgacctcatgaaaattacagtctagaaaggaagcagatagtaaatagataactaaacaaatcaacaagataattacagattggtataagtgctatgaaggacataaatggcaaaatgagatggaaagtaactgggaagggctgtactatagggaaaggcctctctgaagaggggacatttgagctgagtcctcaaaaaataggagtggctgcagagagctgcaggaagaacattcccggcagagggaatgcaaagacagtggcagaaaagccttggggagttcagaacggaaaggccatggctgaagtgtagtgaggaaaatgattttgggtgagtgcagagagaagccaggctgtatagggcctgggacgccatgatcagagttttcattttattctgagagcaacaagaattaagagaagtgagtaacataaagatcattgtatgttcactgccacattgtttgtaatagcaaattagaaacaaatgtcatcaatatggaactgggtaaataattttagattcattgcagtgacatgcagcagttaaaaactgtgaggcatatctatatatattgccatagaaggatttgcaggataccctaagtgggagaaaagagcttaaaaatatgttacaaaatgtatttttaaaagaggagatgtatatgtatgtaggtttgcctgtgtataaaacatcacataaaggatatacaagagggctgggcatggtggctcacacctttaatcctagcactttgggaggccgaggcaggcagatcacctaaggtcagaagttagagaccagcctgaccaacatggtgaaaccccgtgtctactaaaaatacaaaaattagctggacgtggtggcacatgcctgtaatcccagctacttgggaggctgagacaggagaatcgtgtgaacccaggtggtggaggttgcagtgagccaagactgcgctattgcactccagcctgggagacagaacgagactccatctcaaaaaaaaaaaaaaaaaaaggatatacaagaagctgataacagttgcttctagggagaggaactggggcacagggtggccagggtggaagggagacttactgttcatagtatatccttttgtttgtttaaatatcctacaatgtgcctgatcacttattcagcaagaaagagatgatgtctaaattgtggacaccctcattgctgtgcggagaatggactgaaagggcaagagcaaaggcagaagatcagttagaaggctctggcagtggtcctgttgagggatggtggtggcttgacctatggtgttggtaacagagaggaagagaagtgaatggattcaagatttactttagaggctcagtcagctgggcctggtgtaattattgctgtattccacactgacattccctacacccacagtttaagaaagctctctgtgcatttgagatgggaactgggcttacctgactctaccctgacttctctgacatctttgtggtgggaagggttcttgggctccttccaggtgctaaaagcctctggattccagacagtgagtgatgtatcacaatgtggaggacatagttatggacattcacccctttcatagacacatgcaacagttacaaacaacttttaatggctataaaaaaaaaaaaagttacactgaagaaacccactcatttctcaatggagttttctttctttgcagagagatgccaaaggccagtacctgtttgaccttctttgccaccatctgaacctacttgagaaagactattttggtatccgctttgtagacccagataagcagcgggtaagtcaatattcaaagcacaaaaggaggacagggctagtcaataagactgaggtcttgaactgtcattcatattcaaagtcaagcttcaggaatcagggaccaaccagaccctgcagttggatgtcgtctcttcagatcatagcattagacctggaaggcaccttggctagagctcacctggagaagcttgtcattttacagttgctgaaatggcaggctagggagcttaaatgatttgcacaaagttggaggcagagcagctgggctggagttgtggtctcggagcccaagtcacagggtgagcctctcctgcccactttctagtaagcaggctgaagcacattgtactggttaggaaaggcctcaccaaaggtgccataccaacccaatctaggcagtacagacagagccaaaccagcgcgggcctttcagcaccttgcagatcttgcagttcttgctctgctctacacagcataggcagctctgcagacacagggcattctgatagccaagggtgctgatattccagacagattcaggaacaagtccatcatctcaggcccctgcctatttctccagcttcatctccccaacctgctgtggtcccgccagacagtaatacttttgccctccagatacatcataccttctttctttacagagccttcacctatagagttcccctgcctagaatcttctccttttccttaccgctccacactccacacccttcttccagctaactccttttcacacttaaggtctcagcttagacttttacttcctctgggaaatctcccctaaccccactctgtattagggatcctcctatgggcccccatgtgccctctgctaccctgttatagcacttattacatcattctgtgattacctgtgttccctgcaaaaatgtaagttccatgagggcctggactttgtctcattcatcactatctcccatttaactagcacaggcctacaatgtagttggtgttcaataaatattttctgaagaaatgaatgcatgagtgagttaatggcttatagtgttgtatttcttacgtccatttgcccagcctcccagcttgcagacacctgcagtttctataacttcccttcatctaccctttgctctttgtggagatgtactctctggcatccccaccaaagtagagaggtaatgatggtgtttctttgtttggtccaaacttttatccttaaaaaggaaggctggctgtgtgcactggctcatgcctgtaatcccagcactttgggaggctaaggcaggcggattgtttcagcccaggagttcatgaccagcctgggcaacatggcaaaaccccgtctccactaaaaatacaaaaattcgcggaaatggtggcatgtgcctgtagtcccagctacttgggaggctgagacatgagaatcactcgaacccgggaggtggaggttgcagtgagccaagatcacaccactgcactccagcctgggagacagagcaagactcttgtctttaaaaaaaaaaaaaaaaaaggagggccagttactccaagatctcttcatcccctagagtggtggtatatgaagaaaaaaaggcgaattgtatcctgttcattggttttttagttaggtcagaatgtgcttgaggagagtaagagaatatgtggatgtggtgaaggttaaaatgagaaggaactagagagagataagaacatgggaaagaggagaagtaaacatttatggagttcctactgcttgccaggctctgcgctgcacacaaacctaattcttccagctgatgtatactgctcactgagtcgtgccaggcactaagctaagagcttcacgtatgttattccatctcatccttaacaaaatgagatgagtatccctaatgataatatctgttatccagatgagtaaataaagtctcagacaagttaagtaacttgccccaggtcagtggcaaagccagcctcgagctcagacctgtttgactccagggccagtgtggtttctgagattccatgctgaatgtataactgatagcctctgaaagttgtgtaattctgtgccttgcgggaggggttaaggagagcagagaggcttgagacagtaactgagggttgtagggaaatggggacctgtagagagttgtccttagtccactgattcatggtagggatggaggagctgagctcccctgctccctcagggtgtaagggcctaaaataaacctctttccctgggtctcaagacagtctgaacccagcacttacatccatccgatgtcagtccttgctctgcaggagcctccatgcatctgcaagctctcctggtctctcctggaggagctgcccttactttccttccccaggatgcctgactcgggcccagggcctccaccttctcttggcctctgctttgtaccctttcaagcccctagagtctgaagattgtgccacattggcccattcactcagataggggaggaaaccctcctctctgaatcttcttttcctcttcttttaatccctcctccctaagcccatgttgtctgtttgctagtgaatctgggaccgatttggtcaggcatttgcaaaaagccactctggccatcaccatattcttgggttcctctcaagatttctctgccagactccaaatcccatggatcagctgtgacagctcttcagtcccttctcaccccttgctactatcctccagcctcagtcctttcttgagctctcactacaataaaactaaaatcttctttctagctattgtcaaggggaataggcttttgtcattcagctttatctgccctctgctgataatgcatctcacagtcattaatttctaccttcctttgtttatttcttttaatctatcagtctaatgtctgggggtgttgctgttctgtgtactgaatccctggcactggctatgttctcctcactgtccacaattccagtgtgctctgaacagataggcctcctccgtcttcacaggcataccctggaaccccagttgtttctgagcaatttcatctcttgcctttgcctccctgtgaagctgagccgcggtgggccgtgtaatgtgagaagggcctcttaaccacattgagtggctataatgagttgccagcctcgtgggaactcagatcagcagaagcaggagagcagaatgtcagtccagattatccatgtggagctgacagaagaactggctcttagtgggtccattaactgcatgacccatggcccagcccagaaggtgatcactgggaatcaagggaggccaggatgctgactgcagcgccctggctgctctcctgccagagggaggactctgccaagacattacactaaattgaagtagccagaaaagaaggaagtatgggcccagtccctttgccattcagcagctacctattgaacactgtgctaggcactggtgatacagtggtaaacgagactgacagttctgggccttcatggagcttacatctggcaatgttaagctacctctggataatcaaactccaattaatagcagtcctacctaatcttgattagcaaaaagcaacaaacatcaataataaaatttataaaggacccatgtagaattaaggaacacatatagaatggtttcattgcttcccccagacgttaagtaccatgggaaaatgtattctgcctctatgtcctgcctccttgaaaaatccaaggggaagaaggtactatcctacacgttggttgtggttagttatcatttgagatttagattttaaaacatcactggatgccaaggaatcctgagtatgtgttttctaacacaagggttggcaatttatgttactcaaagaaagatggaatatataccagccatccctgacttaggaaatttccacttctcactactttctagagttgctaccaaaatcttctattcccactcccctgccaaaaaaagaagaaaaaaaaagctggtgcataacagaaacacacaccacccattaaagtcagtatttcccgactcaacccaggtggggctctgtccccgccacacatacatgcagtcgcttgtgccttaatcgcatgccaaaaacatggctcagaattttggcaccctgctttagaagacagcatttccagggaagcccataaatggcatctgaagctggaactattccccccttcacagctggctccatgggagctcatttcagaaaatcatatcactctttactcaccaaacttatctttcataagcttttgggctgctttcaccctaggctacaatctgtctagttttttaagttggagaaaacaagttatattttacagcccttctcattagggttttcatgttctgtgttctctgtttcagcattggctggaatttacaaagtctgtggtgaaacaattgagatgtaagtattctccatgaaaagactcaagccacacccctggggagggtgggacgaaacctcccacttatctcaagttttgatctacatatataatttcccactgttctgagtataagttggccctaaatatatgagggttctcttctgctgcttcatgctagtgggcagaagagccctgtcctcttctgggtgagagtcttccctgatgagcacctctttttctctgcagcccagcctccattcaccatgtgcttccgtgtgaagttttatcctgcagaccctgctgctctgaaagaagaaataaccaggtgaggtgaacatgcttcccgcagccattaggacctgttggagagcataggaaagggggatggtgacctcttagagcctctcatttggaagcgcctaactcttagaggcaaggaactcttcctaaatataatgacttctgtatttcatttccacatgctttcttcgcgtacccctcagtgcagtcgcaacagagtggacttctttccttcaagaagtgtgaatactacctcttgaactggtcactctcaaagggctctggagtaactaatcagaagcgtcttttcttttacctatgatgttgccactgtggacatttttggagagagctatgttgctgcttatttcggaggttgcaaatagattcaagtggtctaatggatatacttggaaaatgccaaaggcataacactgaaagataagctgggagatactgaagatttaaaatcaaaatggataaactctgtggtgctgttggatcaggttcgtgataaactattgtggggatcatgttctgtggcaggccgacagctgcgtggaatgcatcctgtctcatccagcgccacttgaggatgaaaagaacctctgtgcccacagccatcctaaaagagggtcagtgagtgagagcttcaaagcttccccaggattttgtgtatctgagcgaaatttactgtgaaagtctcacctcagagattcaagaactctacaacatggatccctaatttttatattagaaagacctaattttgacataagcaaaaccttgatgttactttgtagaaggcaggaccataggtaaggatgtgatgccagggaatcctagagctgaggaagagataggactgtcagctctaaccccttccctaagaccgtggagacagcaaaggtgggaatgaggatattgccagccatatagacgggttatcctgtaaggctttgagatccactcctagatccttaactgcttgggaaaattccaaagacagaaaaggaggagggaagaaggaggaaagaatatggaattcttttcttttttgagacagagtttcgctcttgttgcccaggctggagtgcagtggcgcgatctcagctcactgcaacctccaccttctggtttcaagcgattctcctgcctcagcctcctgactaactgggattacgggcgcctgccaccacggctggctaatttttgtatttttagtagagacggggtttcaccatgttaaccaggctggtctcgaactcctgagctcgtgacccgcctgcctcagcctcccaaagtgctgggattacaggcatgagccaccgtgcccggccagaattattttcatttcctgatctaaagagcatgccaggtgaaaggagcaaaaatttctctaagagaggaaatcaggaaatggggagaggagggggccaagaagcaggcattatcagtacaaaggcaacaaggaagtgggacaggggagaaaagtggcttcttcggcatgggcccttcacatgggagttgagggagatcctcttcaggaaggcttgtttcctgcagatgcatagggcagcgtgtacccacctactttgaagcactgaagacagtgaagagtgtagctagaaccaaatctcatgtctcttactaggcatagaagccccaggctctgctcatctatgtggaagtggaggtggctcttgctttgcttcagaaaaccaaatccatccaaatcatagacaccctaaggctttaggtaggtgagtaagggtagaaccactatgtttaaaatttcaggccaggtgtggtggctcacgcctgtaatcccagaactttgggaggctgaggcgggcggatcacctgaagtcaggagttcgagaccagtctcgccaacttggtgaagccccatctctactaaaaatacaaaaattagccgggccatcacgcctgtaatcccagctactcgggaggctgaggcaggagaatcacttgaacccgtgaggtggaggttgcagtaagccaagattgcggcattacactccagcctgagtgacacagtgagactctgtctcaaaaaaaaatttttttcaagagttttgttaaaataccactagcctgccccactcatgatctccagagtgtttgccttagctctgaacttctgtctgtctctgctaaaagaggtactggtgccagggcagaccccaaagttggtactcctgtctacatatcggagcaaacctaacacgtctttgttgtccacctcactggaccaacagtggggatgagagggagcagccagtgagagcaccacagacacatggctttccaatttgattaaaggactggaaatgtatggttatcttggcccttaggaagagctcttaataatacaattttccgccaggcgtggtggctcacgcctgtcatcccagcactttgggagggtgaggtgggtggatcatctgaggtcaggagtttgagaccagcctgaccaacatggtgaaaccccgtctctactaaaaagacaaaatattagccgggtgtggtggtgcacacctttaatccctgcttctcgggaggctgagacaggagaatcgcttgaacccaggaggcagaggttgcagtgagccaagatcacgccattgcactccagcctgggcaacaagggtgaaactctgtctcaaaaaaaaaaaaaaaatacaattttgtaaatccagtgtcactatcttacatgaatggacagaccttcctacccaagaagcagcatagacctgggagctcagatcttacttatgttacttgttggctgtatacagccaaataagatacttaacttggaaataagatacttaacctctctaaccttagattactcatttataaaatggggatagtgatatctacctcatagaattgtcgggaagattaaccactatcccggcctcttacacttcttaatacacccacagtgagccttgcactgagcaaagtctcaatatttcgttgccagattcattacacagtccgtaggccccaggggctctgcatcatgcacaagtacagttagtactggcttttcttccttgtttatgtgaaaggtacttcttttctaataatctccactcctcctctgtcccctttccccaccagctagaatcctaaaacttaagcagctaacttctgtttcctgagagagaaagctatcccaggtagtcatccaagtcctggtaagcacagcattaggaccatggccaggcctctcaccaagtcagcagacttcaaggacactggcaagagaaggagctcctctcggtctgcatgcatttgtgctaaccatcttgggcaattttcccctctctctcaacctcaccagcgttctttacctagtatgcagttttccagcattgtcaggagtgtgaaccaccggtgcctgggcctgctttgcagtctttgtgcctccccctccctggggcattctgtgagcctgtggaattagctgcatttttctcctcattcacatccctactgatcttaagagaggagataccgggcccagcctcactcaacatccgtaattcatccctggcttagagccctccatcccaccttgctgccaaactaatttagctgtcagtgtgttttttccaggcaatattggtcctaaatttcactgctgtctcagccattcccataaagccaggctgagagaagggggtgaagtagggagtacagaacttgcttcagtttatctcttggcttcttcccagatgataaatttagttgccaaatcctgattaatttcttttgtcatttttaaagtaataaacagattttcttgtctaggctagagacaaggcaaagaaaatgggaaattcaggtaccagatttggcttttaacagggattgcaggtgtatgaactctttggaaagatcaagtaggagaaggaaactgactgcaaatggggccccgccgtccaaggaagcaaaatgtctgacacacaacaggtgctccaaaaaacgttaacaggatgaatcaagacatacatgaacgaacggagtcaccaggccactgtgccttcagtgaacatcgcttgagcctagcttaggctaagatggattggcaaactttttctgtaaagggccaaatagtaagtatttttggcttgtcgggccatatggtctctgtcgcaactactcaattctgtcattgtagtgtgaaagcagccatagacgatacataaatgaatgagcaaggctgtgttccagtaaaattttattccattggaaactatggcagtgggctgtagtttgccaacccctgggctaagaaatcagagagctggcttcaaatcccaggttgttctttaactagctctgtgacaaggcaagaacagtatctctaagcactcagtctcttcatccattaaacaaggattaaaatggtagtcacaggctgggcgcagtggctcacgcctgtaatcccagcactttgggaggctgaggtgggcggatcacctgagatcaggagtttgagaccagcctggccaaaatggtgaaaccctgtctctactaaaactacaaaaaattggccaggcgtggtggcacgtgcctgtaatccctgctactcaggaagctgaggcaggagaatcacttgaacccgggaggtggaggttgtggtgagccgagattgcactactgcattccagcctggcaacagagcaagactccatctcaaaaaaaaaaaaaaaaaaaaaggtagtcacctcatagagttgctgggaggactgaatgaaacagggcacacagcatgcactcagtaaatgtgagtctttattgttattttgttttgttattattttgccatctcccccattggaatgtaagctccattaacaggactccaggttgttccctactgcattcccagcacctgtgacagtgcctggcacatatagtaagtgtcagaactggatggatggatgatggatggatgatggatagatggataagctaggcacaggatgtttaggctctgtagaagaatattaaaagtaaataaaacatagtctctgacttcaaggagcttacagtctaatattggggaggaagacgtactaaacataattatagtcaggaaaaaggaaatagtaaataggggaagccagtggcaaagaatctatttgaagggaaggtaaggccaaaggatcttctggaaaaaactctccaggagcctccagtgctttccagagttcacagccttaaactctggaaatgcctgtggactcatttctaccctctgatatcagaaagcattatgccaaagccaataccctggagagatgttcgtgttacacaaaagctcaggttttccctggcatcttgcaggctcttgctaattctgtcctgattcacactccaatcaatttaggacaacactagcattcaaacaaaaatggaggtgaggtaaagcccctctgaggccagaaagagatcagcagagtttaaaaaacaaaaaaccagtttcctcagaagcaagcgtgttctcctaaatccggtctagagctcatttctcctttagtctcagtgagaatatctctctgataacaaagggtcctcctgacttggattaggactaacctgataactaagtgaattaccatgggccgagtcagaaggcctggattctgattgctgtgttacctcagataagtcactctccatctctggacttctatttccttggctatgaaatgttctgaggttcagagattcaggagggctgcactaggcagccccagcaggctgatcccttgcctggcaacacacagtggccctggagatagtgcctcaggcaacaagatagtcttccttaggcccttgtgtggcaggggagaacatgccagggtctcttgtgaataggtctaaggatgctatgagtcatgtggaatatatttccaccaacaacattgagtcactggttatcttcttaaatgaaccaaacacaaagctcgatggaagccactgtggcagaaagggagggggagccctggtgcagctcattctctctcttgaagctgtcagttgattctttcatgagctcatctcctcttgccctcaactatggtttgtttctttaggatactggtgtatccttttccctcttcccatctagttttatgacattgcctgagaatgccctgtggccttgcctttaacctccctgcagctgttttatcaccagaaatcaaaaggaaccctgcccagcagtggaaagccttgtttctattccagttcacctgaggccattacctgccatcaataatgatgccttggaaagacagtggttctcagtgtgagcaggatcatgttcccttgggtgggaggagaaggggagcaaatcagaaactttaaaggggccttttcttttcttttttttttttttttgagatggagttttgctctcgtcagccaggctgaagtgcagtggcacgatcttggcgcactgccacctctgcctcctgggttcaagcaattctcctgcctcagcctctcccaagtaattgggattacacgccgacaccaccatgcctggctaattttttttttttttttttgtatttttagtagagatggggtttcaccatgttggccatggtggtctcgaactcttgacctcaggtgatccacccacctcgacctcccaaagtgctgggattacaggcgtgagccaccgcgcccggcccaaaggggccatttcaaaccacaggagcacccccaacacatacagattctgacgggctccccctggaagatgttcccctctctgccacattgagaatcactgcccagagccatgttatccctttgtaatatctcctttagtccaatatgtacagtccctgaattttggacacagacaagcagagaaacatggaagacgtgatgcgtgaatccaggcccagggagtgatcagtgagtaaggggcaaaaggtttgcatccacatcctgctgaagcctgtggaaggtgggagttggaacagtgagaggcagagaagtgctcactcactctctcccacacaccgtgtggcatttcgctgtgggaagcagagtgaagacgagcttgatttggtagatccatcttaattattcactctacatgatgtcttttttcctttcgtttttcttggcaaacatttgggcagagtagggttggtgggagtgaggggatgggttcttattaacttccaggctaagactcaccttccctttggtctgaggaaggcagtccatcctgctgtggttagaagatggcttttgaattttcttaggacagcttcttaaattttaatctatacacaaatcacctggggatcttgttaaaaggtgtaggtggaagtgtaggatgggcctatattctttatctccaataagctctcaagtgatgctgatacccctgatatgtgggctacactttgagtagcaagcgctgaggagagaagatggcttggttgctccctcatttctgtttgttaattgcttgaatcttcaagcccaagcctctcagagttacctgctaggaccccttcctaccacctcctagaagttgcactgtcaacagccctcttcctgttgagcatttttacatgatcaagtggacaaggaatcctctgtttcattcttcagcccgaaaacagaaacaatggaaacctccaactgtccagggaggggtcaatttctttttggttcagactgttcgaatttaaaggaattttactacattttcattactcccctagggatgctggaccataaaagttaaaataacaagcgtttaattgtctcagagtgtctatgggtcaggaattcaagagcagcttagctgggtggttctggctcagggtcaatcacgaggttgcagtcaggaggttggctggggctgcagtgatccacaggcttgactggaggtggggacttcatttccatgatgggtcattcaaatggctgttggccgaaagcctcagttccttgctggctgttggcaaaggccccagttcctcaccacatggacctttctataggactgctgaagcaacctcaagaagaatgagtgatccaagggcaagagaacaaggaggaagctgcaatgactttatgatctcagaagtcagacactcactcatgctttattctattgatagaagtgagtcaccaagtctaagccatactcagagaaggaattaagctctacctcatgaaattaggattatcaaagaatctgtggaaatatttttaaatcaccagagatgctccctggccaaggagccaccatggtaggtgacccactcaagggactgatgctcctcataatcttacaggtcttctaagaagagcaataaagaccacactccttgtgaagacatttcaaaatggaaagtcatcaattccattccactgtgacagggtccatccaactagtgaaactgcaaagcatttatagtgcaaggagggcagaatatcatagtgatgaagagccaagtttaggggtctcacagtgctgaagttgaatcctggctctttcacttagttgtacgtccatgagaaaatcactaaagcctcagcttctctatctgtaataatggggataataacagtacctatctcaaagtgtcatgtgagaattaaataagttattgcatgtaaagtgtgtaacacctggactggcagatcgtaagtgctcaatacatgtcagctactatttgctcttgtttttgatatcctgcttccacctgaggcaacagctttctgtatttaaagaggtgctggccccaggtttctgcttcatttgtgtgcttctttcaccagtgcctcttgttgcaattttttttttttttttttttttttttttgagacaaggtctctccgattgcccaggctagagtgcagtagcacaatctcggctcactcttcttacactttattccatttcaaaggtctggttgacctcggtaactgcaggctgtttccacatatggacagattctcttggtaagttgaggctgaactcttcctgggctagttccttcacccaccattctacttaagaaggaacatcagctggcatccaaggcggagagaggcccagtttgccagtctctgatggcatagttttctttttcggcaccagatcgactggggctggctccttccaaagctcagcactgtggggtgatgcttttaccaggaaacagccatttctgacttgagctacaggaggaaactggcatatttttaactgaacctcaagtcagttcagggcaaagtacctgaaagagtttccagggaaatggagaatgtatttgttctacattatgttttaggatttttttttaatgtagtaaaagtatcctgacaaagattttgataggcttacaatacatatttctatctttaaagcaatcaaagaaatcctttatagtttattctctgttttctctccaggtatttagtcttcctgcagatcaaaagggatctctaccatggccgactcctctgtaaaacatcggatgctgccttgttagcagcttacatccttcaaggtaatgacttttgacaggataagtttgcttttcatgccaagtactgattacattattttcagttagcactgatgactccttcttgaatctaaacattatctaggccaggtgctgtggctcacgcttgtagtcctagcactttgggaggccgaggtgggcagatcacctgaggttaggagttcgagaccagactggccaacatggtgaaaccccgtctctactaaaaatacgaaagttagccagtgtggtggcacacacctgtagtcccagctactcgggaggccaaggtgcaagaattgcttgaacccaggaggtggcggttgcagtgagccgagattgcaccactgcactccagcctgggcaacagaccaagactccatctccaaataaataaatacataaacaaacaaacaaacagtatctaacttgaagcagagttcaagttagagagttttttttgtttgttttgttttgttttttttgagatggagtcttgctttgtggcctagtctggagtgcagtggtgcaatctcggctcactgcaacctctgccccccaggttcaagctattcttctgtctcagcctcctgagtagctgggactgcgggcgcccaccaccatgcccagctaattttttttttgtatttttagtagagatggagtttcaccgtgttggccaggctggtctcgaacccctgacctcaggtgatccacctgcctcagcctcccgaagtgctggtattacaggtgtgagccaccacacccagccaagttagaggattttgcttggatttcctagagccagaaaacactgaacactcaaccctaaactgcgcctgagatcttactaccagccccttaaagtcattctgactctgttttagggatttgtcctgggcccctggttgataaagtccctgagactctggagtgtaatcagacttgattttttccccatcctctcaggcaaatctccaagatatgaagcatcttagaattctagtatctatttcagagaccttttagttcagtgtgctcaaagttgaaagtgtttccaagtaacaagcacatttcctaacaggctaataagtaagagttgaggcttacccagctgaggcccagactgggtttttttgcaaaacagtgggagagatatgcactcttcacacacgtccccttctcctgagatgcagagacacttaagtgccgcttcctagattcctcttagtccctaggcctgaaactgccattactactggatcattttggacgacagcactaaaatcatgaagtttccccaaaagaatttgaactcttagttggaaatcctggaagcaactttgtgaagagaacctggaaactgcttgccaataagaaactaaagtccttctggcaatagaaataccacggctggctgcctgtgttaagaatgtaaaattcagcccattgccactttgacttctgagactcctgtttttaaaatcacctacatggagagtccatggggagatacccaaagatgcccctttgaattttttttttttttttttttttgagacaggatctggctctgtcccctaggccagagtgcagtggtgtgatctcggctcactgcaacctccacctcctgggttcaagtgatcctcccacctcagcctcccaagtagctggaaccacaagtgtgcaccatcacacccaactaaatttttaatttttttgtagagatggggtttcaccacattgcccaggctgatcttgaactcctgagtgccccttttatttttaaagagaaagcctggcctgacctaagtcgagtcttaaactctagtcttttctacagttttacccaatcattcattttccttcaaaaaagtacttgacgtccaacattgatgttttccatttggaactttctaaataaaatcaatataaatgactctgggccaggcacagtggctcacaactgttatcccagcactttggaaggccgaggtggaagatcacttgagcccaggagttcgagaccagcctgggcaacagagtgaaaccccatctctacaaaaaatttaaaaattaggcctggcacggtggctcacgcctgtaaccccagaactttgggaggccgagacaggcagatcatgaggtcaagagatcgaagccatcctggccaacatggtgaaaccccgtctctcctaaaaatacaaaaattagctgggcgtggtggcacatgcctgtagtcccagctacttgggaagcttcaacctgggaggcggagtctgcagtgagctgagatcgcgctactgcactccagcctggtgacagagccagactctgtctcaaaaaaaaaaaaaaaagctaggcctggggtgtgcacctgtagtctcagctataggctgaggtgggcggatcacttcagtccaggaggtcgaggctacagtgagctatgatcatgccactgcactccagcgtgcatgacagtgagaccctgtctcaaaagaaaaaagactgcaaggctcaaggtcaccccagacttcagacttgggtctcttgctaacagtagaagttcccaagtaatttggaagatacagtgagtaggtttgtagtgaaaaagtacaagtcccaagtacaatattcagccatgggaggagggcaccttttcctcttaatatttctcctccctcaagacttcacatctgaagtggttgtggctctcacctgggaaggaaaaagggcacccacagagtagctggcccctcctctttcttttgtcctacccaccatcctccctgtggagagcttcacgtggaaaaagctggattctgacctgggtgtggaaagtaccgtgggtcttctgccctcctaaagtttactgccctgagatcttaccaggtttagagataaactctctctgaatagctggaggagaaaggctcacacctggcagggacttgagaaatgagccttagaacttgatgcttctcggccgggtgcggtggctcacgcctgtaatcccagcactttgggaggccaaggcgggcggatcacgaggtcaggagatcgagaccatcctggctaacacggtgaaaccccgtctctactaaaaatacaaaaaatcagccgggcgaggtggcaggcgcctgtagtcccagctacgcgggaggctgaggcaggagaatggcgtgaacccaggagtcggagcttgcagtgagccaagatcgcaccactgcactccagcctgggctacagagtgagactccgtctaaaaacaaacaaacaaaaaaaaagaacttgatgcttctgaactcaacgatactttctagttacagccaggcttcccactctgtaggcctctcgaaggaacctggcacctggtcagcccttaatgaatatttattcaaatttattaatttgatttgatttgaactgagggttgagttctgaatttggatcgcagctcattcatcaatttactgtgtccctgctaacatcctcaaactaggatttagacttatgatctggctgaggcccaagaggatctccctttctgatcaagctcaccacttcctgtgctgccacaaagaccattgctcccagaccatcttctcatggcggaatggatgaggaccatagtgcaggcctctgctctttcattgtaaatttacttgtggtgacctcagaacacaaggtcagctctctgtctctctgcatagacttgaatgccaacccagtgtgtgcacctggaaaaacaaaggtggacatgctcctgaagggcctgccctctgcccagcccacagccgtgctcagaatccactgtttcttataaatctgatgtgtattttggcttttgctctgtgtgctaatctcttgttgctttgtcaatgatgatttacctgtctccacaattgttttcttccaccttccttttgaaagcggagattggggattatgactcagggaaacaccctgaaggctacagctccaagttccagtttttccctaaacattcagagaagctggaaaggaaaattgctgagattcacaagacggaactgaggtacgtggcacttaatcaggcccagaacattgtggcttctccacagcctgagcacgcaggctccacgccgtgtcctctgttctcgcagactgtttactgacacagagtgatgctccccagccttcctgaccgcggatgtaccattgtcagtgatacactgacagcacaagtcacagccacaagccctgtaggctccctctccaagaaaagcgatttagcctgaagcttaaagacaagggagaagttgtgttataggggaaacagagagggattggcctttgaaaggcatctgcctcactatgatatttaatgaagatacagaggaaagcatgaactggggaaaaggaaaagataaaggaaattgcataagataaaaaagatgaaagaaaaaggccaggcgcggtggcttacggctgtaatcccagcactttgggaggtcgaggcaggtggatcacgtgaggccaggagttcaagaccagcctggccaacatggtgaaaacccatctctactaaaaatacaaaaattagccaggcatgatggcaggtgcctgtaatcccaactactccggaggctgaggcgggagaatcgcttgaacccaggaggcagaggttgcagtgagctgaggttgcgccattgcactctagcctgggtgacagagcgagactccatctcaaaaaaaaaaaaaaaaaaaggagaggttgagtgaggatgtgaaaaagggcaggcttctgctcttagtctgtgacagtgtgacaggtggcttctcagtggaggatggagtgcgcagggctgattcataaatgctgagggtgccttgggagcactctggttcagaagtatgtcctcagccccgcctgactcaggccccccccataccctacctggagtccccgactttgcacagagagaagtggaggagacgtggcttcaagtttggagcctcatctttctcagcttctcttactttgcccagaatatgctgaataccataaaacagcattaatgcagcttttcacccacatgaagtaggattttctacaaagcctgattttaaaaagcaacaatagggtgtttgggctccatttggttacggcacagattccccaaactgacaaactatgaggaaaaaggatatagaatgcagtgttggccaagcgcagtggctcacacctgtaatcccagcactttgggaggcggaggagggcagatcacctgaggtcagaagttcgagaccagcctgggcaacatggcgaaaaccctgtctctactaaaaatgaaagtaaataaataaaaaagccagatgtggtggcacacgcttgtatcccagctactcaggagtctgaggcatgagaattacttgaacctgggaggtggaggttgcagtgagctggaattgcaccactccatgccagcctgggccacagagcgagaccctgtctcaaaaaattaaaaataaaaaaaagttatgttgtcattataatacattacagctttaaaaaaatattttaaaaggtttgtgtatctactgttccgaggaaagactatgcctggcaacagggagcagagctggatatttctaatgctaatactaagcttcaacttgttccttccccgaccacaggccccccagaaacccttcactcaatgattttaccaacaaatataacccaaagcctccttagcctttgtaaacagacccctctgcccatgccttgtggcaggaggggttcctgaccctcccagcggaatggcgacaccgaacaaatggaatcttagatgcttcccgcccctctccctcggtgtgccttcccaggtgcaggaccccatggctcctcaagtcactctgttagggaatagcgaccccttgtggtaaaaatcagaataaacacgggcctgtggtgttgggggcaggggcctcatggttccttcaaagagatcagggatgtgctggaactgcctggagggctttaggagacatcagaatagtagggacagccctccagaaacctagttcaaagcaggggatcccccaggaaatgatgcccgctttgaggaccctggaggtttgggccaactccaagggtaaatggagcccacagggcccactccccctgcagacagaggacactccctggaaagggaagctgtgctctagccagccctttgcttgccacacagatattttcctaacttaccttccctgtgcctcaggtacactagtggatgcagaagtctttattcacagcaatacccccttccacaggtactttttccataggtcctgcctcgtcttcataatgtaaaaatacatccatgcttcctttatgcaactgtgatatgggcttttgagagcacagactgtatactgtgtttcttcatatattttccagcaagtagcacagaggctggcacataaaggtgctgcctgactaatgcctctccagagggacactagggggaatctggcctggggtcagcttatcttcctgcctggccatatcacctgaggcaaatgataagcttagaaacgagcaacgtgcagtcctgtccaccagccatcagagatgttgacttcacaagctgcccacccctcctcactgaagccaaacctgtatctgtagaagtatatctgctttgcagggctctggacccaggcaagagcctgatggttattctgccactgggtctgcaatgagcccatcaacacacctgctaaagaggcagtgggaaggggtgatgccaaaggccccttcagatggcctggagccggagctgatctctgcctttttcagcatctttcattttcctggtcatcaccctatggacagacagctgttgtggagcatgggagctcagcactgtctcctgcctctcctcaccctaatttcctgtgtttccttttggcaaaggaagagggctgggtggcaccagcaagctatatgagccccttctttatatttcagtctagaacagatcacatatgagaagcctatgacctgcttccagcctacagatgtattttgttttaccccatagtattttaaattgtgaaataccacataaaaatcagtatctctgacttttcttttaaaatcacaatatctagctaagccttgcattcttttttttttttttttgagacagggtctcattctgtcactcagggtggagtgtagggctgtgaccatagctcactgaaacctcgcactcctgggctcaagcaatcctcccacctcccacctcagcctcccaagtagtgggccctgcattctcagtgatgggaatctcagagttaagatggtgctgccacagtccccaccactccccattgtttacactcagcccaagtaattcattatgtagcctgcctcactctgaaaacgtttgaagacagtcagagactctagcaggagtctcgaagttggtcctagaaccaagcagggagcacaccctagacaaactgagatgtgtggctcatcctaagcacatcttcatagagagtttacctcaggggaacctgtgggaacaagacaccttgaaatcatctcatcttctttattccagtggtcaaacaccagcaacatcagagctgaacttcttaagaaaagcacagacattggaaacatatggagtggatcctcacccatgtaaggtaagaccccctggttggagactgcatgacctttcctcctctagaaggcatcaggagcaagagcccccatgcctgcgctcagaggcccccttcaacgtttacatggctggcactttcagtgagatatcagagaaaatgcctgctttgaaaactcctctggatcacatgctacataattttgtggtgccacatcaatgtcagaggaaccgaggcaaagtcaatctaaataacaaatccaaagctagggccccgcaatgggtaatttggtagaaatgaagagaggagggatatggaaggccccccacagagaacgatcagaggcggctcagtgcctgcccaccctttcctgacctgtaatctagtttctttccgagagtgggttttattgactgcagtggcataagtcactgcacggaactgcagtggagtcacatttaatgccattatgcgcctgtgagggatagacgagaaccagccggggaggctgcccagagaaaacctctgtaattactcatgcacatctggcattttggagatgagcgggggcagccagtcactgccgaggcctgtgcagacccatggccccttccagtctctctctgtggctgtggcccttcacgttacctcctgtccctgttgctttgacactcctggtctctacctcagtttctccacatttctgcctctctctttccattactggagagggtccagtatcaccagtaaaaccaactggcaagctgatctgaaggaagcagtatcagccaggaacaggaagacatcaaccttttcttcctaactggagaggggatactaagcttcaagcaaaaattaaaagaatagtatattagttcctagggtttctgtaacaagtatcacagactgggtggcttaaagaacagaagtctattgtctcacagttctggaggctggagatctgagataaggtgtcagcagggttggttcttcctgtgggctttgagagaaggatcctttccaggcccctctccttggcctgtggatggctgtcatctgcctgtgtcttcacgctttcttccctctgtacatgtctctgtccagatttctccaaagacaccagtcatattggattagggcccatcctaatgacctcagtttaacttaattacctctgtaaagatcctgtcttcaaagaaggtcacattctgaggtactgagggttacaatgtcaacatatgaatttttgaagacacagtgtatagcgcataacaaataggaatgccgggcgcagtggctcacacctgttatcccagcactttgggaggccaaggtgggcggatcacaaggtcaggagttcaagaccatcctggacaacatgatgaaaccctgtctctactaaaaatataaaaagctagccagacatggtgacacatgactgtaatcccagctactcaagaggctgaggcaggagaatcgcatgaactcgggaagtggaggttgcagtgagctgagatcatgccattgcactccagcctgggtgacagagcgagactctgtctcaaaaaaaaaaaaaaaaccaggaatgaatgagcacagtgacatagggacaaagcagtgtcctttggtcccttggtgagaagatggtgatttattcttgcctaggagttatgaaccttgagaacatcctgatattcagaaaccctggtcatcttccctaccccacagttccctatccactagcacagcctgctgcaaagtaacccctgtgttcttggggccacactgtcagaaaacacattcatgcctgttataccagagaattgacatttggatatttacacattagcaaaacttccaaacaatgccctctgtgtaacagatgcagtttaaacccctccataaattgctccaatactgttagcagggcacccacacaggagtgaagagagctttggataagctggccctgggctccggttcccatcccctgtttactggggcctttgggagcttctctgagcctcacttgaaagtacacagtctgtgttcaataactgctccctgaactgctgagtcactctaggaccttaaagacggctgcctgaagatatgttcatcagaaagggccaggttacctctgcgtttgaccccaaacctgcccagtccccttgaggccacacatagcacccacctcttcagagacgggtccctgagcagagttgaaaagacacagagatgggcagacagtgagcccgagcactacactgactagagcggggaaagggattctccaccgttgcccacgggattctggaagctgtagtggcagccagcctggtttccaacccaaatacacatgcaccccaggactgtgaggctcctgtctcagcctcgtcttgggtgagtttgtccatcattggacgcagagaggctgaagaggctgcagggaggaaccagcattcataccaggcactgttgccacccagtcacttatgtcatgccatctcaatcccatagcatcaactcctggaaggaaagagggagggagggaagaagagatgtttgtggtatgcctcccatggcggcctcagtggagtcttttcacattatgttctcatttaatcctcacaccagccctgggaggtagatgttattctccctgttttatagataagaagactggcattccaggaggccaaaattcacaagccctcagcggtagagcaagaatttgaactcaagtcactacccgttgttatgtaccctatggaagaacagaaaccccccaggagacttcttttgggggagtgctcaggtcccttgttcctgagccctgtgcctcttcctcacccagggccatgtcagggccctattgcagaccccacacatagcccctcagctcctctcattaggctctggccatgattcctcagctctcccagcaaagagaacagtttaggggcctttactcttgttattaagtggagtcactttagtgatatgctatcaagtgctcgccttaatgctgctacaagaagagctgaaataagctggcacacttggtgtaataaatactgatgatttctattaacagagaggcaattactgggcccagggaatctggggcatgcagccctagggaggacagaagaggaatcattttgataattaaatgagagcagaacaacgctctagcttaggctctgtcccctggactgattaagaagctgctgttcttcctgtgcacactgatggtttctttctgcccagaatgtccttgtctggccctgggaccaggaagaggagattctacaaatgctggatgggacagccagagagctctattagctaatacccaaattccaaaagtgcaggacaaggctgtcctgcattttctgccttgaccctcagccctcaactcctggcgggagccccagcagcccaagcctacagctgctggaggaggagaatgaagcaaaccactggcagtccattgctatatctgttccctggccctgacagcactccaacttcaggagccaccatcttgctccatccaggtagccctgagactggtggtttggcctgggtctcctgcagcactgtactttggcctcctgggcccaacttacggagatgtcctgttacggttcatggagtagtgaggcctgttacagatgcccagccttgttgttaagagtcttgaagataccatttattgagagtctgtctgtgccagctttgtacattatctcattgaatctttacaacatcactgctaagaagatattcttgtccttattttaagataagaatactgagcctctgaagatgcagacaagaagggatatgagggagataagtcccctctaaggaaccaactaacatgcccaaaggtactgggtaacacagtaatgcccaaaggtactgggtaacacaatactgaggctcgaacccagggttatctgagtctcagtgctgtgctttttcaattattattcatggtcttccctctggagagatggaatttaggaactaagcacaactcattgccaattctgacacagaaaggacactgacctacaagattattgatatcatctgtcttagtccattttcacactgctataaagaactacctgagactgagtaatttataaagaaaagaggtttaattgactcatagttccaaatggctagggaggcctcaggaaacttacaatcatagcggaaggggaagcaggcatgtcttacatggcagcaggaaagagagaatgaggggggagatgccatacttttaaaccatcagatcttgtgagaactccctcactatcatgagaacagcatggggaaactgccccatggtccaatcacctcccaccaggtccctcccctgtcacatgggggttaaaattccacatcagatttgggtggggacacagagccaaaccatatcatcatcctataaaaatttaatgtaagttcaccagtgtctttatgtctgctttgtatagaccaggataaaattgatttcaacaggatctaggttagatcaaccacaaaaataaaattacactgtccctctgcccttaaaatggaatcattactttcataatccagccacctagccagctctctaaagaagaaccccatcccccatcttgacgagttgcccctcacttttttttttttttttttttttttttttgagatggagtgtcactcttgttgcccagactggagtgcaatggtgtaatctcagctcactgcaacctctgcctcccgggttcaagtgattcttctgcctcagcctcccaagtagctgagattacaggtgcacactaccacgcccagctaattttgtatttttagtagagatggaatttcaccatgttggccaggcttgtctcaaactcctgacctcaggtgatctgcccgcctcggcctcccaaagtgctgggattacaggtgtgagccaccatgcccagcacccctcacttctgagaaacagaacaagaaggatcaatgatggctgtcccacccttgggtgggcccatcttggctgtgtggcaggtagggtgttagatttactgctgaaatgaagaacttcaccaaagccacctggtgcagtttccaccaggaattcctttctgagctgtcatggagtaacaccaaatctcttacagggtgcctcctcctcctcctccttctcctcttcatttccattctagtttattgtggccaagtttaagtgtagtatattcaaactgggtgattttcatgactgacttcagcttcccaactgtgagctctttcagaaatgggcgtatctggtacagcatgtggaatcatcttccagagggttttataagaaatagtggcttcattcatcaaaattgaattagtttgagtcatggcccagagagggcacagtatgaccctagaggcctaacaaccaagaatgctgtgttgcctactcagtcacacccagtgtgtcctctagggtggcaggagacagaaggctactttgaatctggaaatggaactggtggggactagaaatggtggccagatgttcctgcttctgaaccagtcaatgctttgatttgcaagaatcctttcctgggcagagtgatcatcctagggtgaactttgctggtgttgactgacacaggtgaagtttgatggcaggggccatgtaaacacatgaatgacaaggaatgcatgttcatcccctctccaaggagaataccgttggccacatcctagcagtaagatatttggtctatctccctaaaatcagatggaagtagtatttctccaggtatatattattgtccttatttagcaaatgaggaaaccgaggtttggagaagtgaagtcacagaggaaagaaggaggagagctggggtcctaaactgagacagaagctcttttcacaaggatgagaaattgaaaacaattctttttaacctcacaactgaagaagtgaactagattatttcgactgttacctgctgcagagtgtagctggcgatatccacggcatagctatcaggaccctagtttgttttccacctcccgactccattaatggctcagtcctgtgggcactgatttcatagggatgggaaggggacagagaagaaagagaatccagcttgataaaatgggagatctgaagaacaggtgactgttgactcttcacttctcaccttgtcctcattccctcctctttttgtcatgcaacttgttattttgcacacaaactccaacggcaggctcacaacaagaatgacaagtcagatagaagaatctggagaagttccagggaaggtgtcagtgtggctgcctgcttgtattttcatgccagtacagatgtgagatttcccactgtaattcgagtcccttccacactgattgctgagcctcatgtgccagaggcaagttgcaaacatcccagctgtcatctgcccctgcggataccgggtgtcagggtcttgcggtggccttcatctgcatctgttgcatttgaagcagtttggagaactgctctcttcatatgagattgggaacaattgggattgttcaaggtgctattattgcttatgaaatgatgtggcatctcattttcattgggttttattcccagctctctgctctaaagcagccagtctggttaggagaggctgtgctcctctaactctaacacctgccttcactcagaggccagctctgaggtatctgcaggatgcagggcaacctggccagcaccacccatcttgtgggactgtgtattccctttgctctgcagagggacagaggtcactgagaggactctggcggatctctgactgtgtcatggcctctgttcccttcccattctcacttcagattcatggatcaccccactcttccatggtcccctaacagtgaattacttctccttttttcattctaacttcccacattttcgtttcctaactagcaaaatttaaatctgtcaacatcaggaaaaatagtaaaatgttagattttacaaaaggatttgtattaagttcaacaaactcagctaactagtagcagctataataatattaacaacaaacacaggccgggtgtggtggctcatgtctgtaatgccagcactttgggaggctgaggtgggtggatcacttgagcccaggagttcaagacccaccttggccatatggtgagaccttgtctctaaaacaaacaaaaaacatggccactagcatttgtgaggtgcctcctaaacataacctatgaggtaggtaacacgatcaaccctcattctaagacaaggagtctgaccatggagaaattaaggacctggccacagccacacaatgagtggcagagctggacctggacccgagcggtttgaccaagagcccgcaccactgtggttctagtgggggtgctcttctgcctgtcactgcccatatgagccagagtggaagaagcagaggggggccctccgctgcctccctcccctgccttccctcccaactcccttccctacttccttccgttatttcaagctgtccagtagcctcctgcaggcccaaggcttcatttccatccctccacctctccttcctaggcctttcctttatctcagcgggcattatgaccccttccgtgcctctgcctcacctctgcctcccctctcatttttacgcacatacggacgttccccactgcagccagactggcccctctgacccaccccactgtctaacaccttcatctgctcaacattttctgagaccctttctataccaccattcacacaataaggtctccactcccagtctctttctttctaagcctgcagttgtaggacttccccgggtcctgcttgcacagtgagcagaagagacagaacaggcaggctgcctccctccccaacctctcccagtcattcttacctcaaggccacccttccctgacccatacctctgccaagcctgccagattagccctggtgcctcctgacaggaacagtgtttgtgtgtagtgcctggtactcagatattaataaccaccaccaggcactgattataagcaggaggaaaatcagccctgtggcttcatagtgtctgcattccagttatttttaaacagctttttgttctgcccatgacattgtgcttgtagccaagtgtctggatcatgacagaccctgaggaaaggataataacaacaatacattaattgcaaatgtttgccaaacatacacttagtttattccctggacccagatgctcatacttgtaaccctgactctgagagatagttttaaggcaaaactggactgcttcttgaggcaggactcatgaggccctgcagaggccccactgttcttgcgaccaatcaggctgagaatctgtgtcagggaggtgagccctgaaagcagagaggccaggagagccaaacctcaggctgacctggcccagcagcctcagcccccacacccatgcctcacgcccggtgtctggccctaactccatggcaccacctgagctgtggcccagaagactctcctgcaggcacatttgaccagcatcacagcataagtttctggtcacctcaacacacttacaccctctccatcaccattcatgcagcctgacggtgccaaatctcacctgacgcccctgtcacaaaggaagcccctctgggagggcaaaatcctccacccagcctagacctcagggagctcactttcgcaagtgaggaagcgagacctacagcttctgctccgcccgctccccactatgttcaacagagcctcaagcctggtgtttactgactgatggtgccagtgaccaggaggccctctctgttggttcaggcacctcagggctggtggcaactgttctattttgccagttgcttcttgtttttttcttcagctaaactttcctgaggggcccagtgttataggactattatgaaagtggataacaactcccccactctttaataacagccttttaagatgtaattcacataccataaaatgtttttttttttttttgttttttcgtttgttttgtttttttgagatggagtctcactccgtcacccaggctggagtgtggtggtacaatcttggctcactgcaacctccacctcctgggttcaagcaattctcctgtctcagcctcctgagtagctgggattacaggcacgcatcaccacgcctggctaatgtttgtctttttagtagagatggggtttcaccatgttggccaggctggtctcgaactcctgacctcagatgatccacctgcctcggcctcccaaagtgctgggattataagcacgagccactgctcctggcgatatgtgcccttttaaagtgtacaattcagtggtttttagtatattcacagggttaaaagatcacaacctgattttttgtgactggcttctttcacttggcataatgttttcaaggttcgcctgtgttgtagcgtctatcagtccttcatccctttttaccggtgaataagattctactgtatcatgatactacttgtttattcatttatcagttaatggaaactttacactggaaaatggattgggttgtttctgctgtttagctcttaacacatactgctgctattaacatacatgtaccagtttctgtgtggacatgcatttttaaatctctgagcacatactgaggagtggaattgctgggtcatatggtaactctatttttaacaatttaaatgactttcaaactctttctcaaagtgactgtaccatttaacaaccccatcagcaatgcatgaggtgttgccattctctttggatgttcacagcaaccttctaaggttggtatcattataacctacaacttacagatcaggacactgaggctcagcaagtaacttgcctgtagtcatgcggctggcaagtggcaaggctgagactcaaactatggtcttgtgattccagatgatatgcttttccctctgtgacctactgccaagtattaaccctgcatcacctatgaacagctgtgtttcttaccctttcacctctgtgcctgcatcacccgatgagaagtctttctgtgttgcaggacgtgtcaggaaatgctgcatttctggccttcactccttttgggtttgttgttcttcaaggaaacaagagggtccacttcattaaatggtgagcatcttcatttccaaaataggctctttatatctcaccaactggggaggggcgacggttcccgtgtcctttgtctgtgattgggcagttctggttcagagccctctccaaagccttgcgttgatggtggtaactgacgaagggagtggtctcttcctagggatccttttcttctaaaggggtgtccctgagagccaacagcctctccagaaaggaaaagggatacagaggtttgatttctggggagggtgagaggcctggggctggagccagtgttagcggagcaaagttcctgtgagaactgaatccttggggccgtcacccactgagggtcatagttagccctgttgagccggctgttctggagcatctctgtggatggcttagtgcccttacctgctctactaacaagggaggggctcacagacagtgacctctggggcagatataagtcctttgctactttggcaaaacaccctcctcagaccagccctccctgtgggcatcgtgtctgcaaaagctcagttgctgctgtctcactcctatccctcttgggcatttaagtgtcctcagcttccaggagtcatattcccactctttcttccttccctcccttctccactcccatctaacaggcaagagccactgcctcagctgcagctactctgagctgcttcctctcctgcccctctctgttttatttggggtctgttctgctgcatgcctctgggcagactctggtttgttgattgacatttggctttcctggagaccctttagctggccagcccatacaaacatctgtcagcgtcatcaaaacattttgcatattctactaagctcttgtgatttctgtaccttcctgggcctcagactgccaagtctaagctggccagctccttctaggggcttagataagtggcttcccttggtccagcagagctcagtggggggaagtctgtttggtttgtcttctccaggagagctcatgaggaatcttgagtacagttgcttcctagtcagcgttctgctggggacactgcagaccatctatcccgctgtgccctcttcagctcccccactgagtttgagcttgaggacagataccgcctttccagcccaccttgattttgtgaaggagggcattacgatcgtcagccagagtgctggtgaaactgctcctcacacaggacaggaaactcgactccccaggacaacagccgtgccacaaggcagctgctgccctggagttaccagaatacaccccaacatacctgtttcctaggcatcctcaagtcggcccacttcactgtgctctctgggtgaagatgtgaggatttgcaatctcctgtccaacaaaatgcttttcagaaaaaggcaatgagcaggatcaggcctcagccctcctagtgtggggtctctgctgcctggatacatctgggctatttgatattctttagagggcccagatccacattccaaccagagtagctgttgggtgaggtccctgttagagggaatgtttggctagaaacaagtaggacacacctgtcacagacacctgcagtccctaaattatacccacccttccagaaaccatgatggctcttggttctcacagacacttttctttccacggcttctctcatgcaccacttcttctagaagtctcctcttcaccatgtgtcaactctgtaataatagatgtaaacccaatctcactctcaaaataaaactccttactttcctagcttgcttgttggaacctaggtgatctgtgtgcttgtctatatattaaccaattggcattattgtactgtgtgtgtatgagattgatggttgattgagagggagtttgagagggaatcaaacagggaaggaataccgtgtgacttgtgttagctcagaactggtggtcagaagttgtgaaatctcatcctgacccagccatgattttcaggagcatggagaacaagtgattttcctctgtcccctgaactttttccagcagtaagttgggtacatgattctcgctacctttctactatttcctaggagatgaaggaaatctccttagaaattacaaaaaaaagcagcagccaagtggaggtgaatgtgcatgacaagaccgccttgggggtcccagttgggttgaaaaatggggcctccagtgacatggagagggctgagagactccagagggcagctatgttgggcagatagaagggaagtgaggagcaaccagtgctgaggcctagttccatggctctcagggacattcacctaagacccagtagtttttccgttttgcaaatgtaaccaaggctgagagcaggaggtggatgtggaggtgaggtctaggccgtgccatgtacagtaaccatgtcacttcttctgatttgtgtctgtcccacgggtgatgtaccccagtatcctgtttgcctcttttactgcagccattcactgggctggtggcttcaaggatttttctacaataacccctaagcccctttcctggtcagtacgctgcatgactgttccatgtaatctgttctctctctttggtatgttgccctgccccgctccctgagattgtttgatatttgtctgcattaaactgcattttccatccagtggcacagtcacctgaaagactcaactccctcagaacctggttgcattgtttctcattatttgctgtatcttgaactttggcctcatcagctacctgtggcatcttacgtttgacagtcccatccagataatgcacctgtgttatgaacccaatcctgaaatgaccccagatactctacctagactcactttccatgcaaatgtttcccttttacagccactgttgataagcccgaaatcctcctgtcaccctattactatagtgtgattgaccagaaaactgtggattgaactgtttcaacaacattctctaaggccactgcgctgctgtcttgtttcagttctgattttggctaaaattgtgtctgtgcctggagccccttccagttggggtgggctgtgcatctacaagatttagctgtgaacaagcagcccacaatgaggtgacaggcactatctttgtgcttctaggaatgaggtgaccaagctgaaatttgaaggaaagactttctatttatacgtaagtcagaaagaggtgagtgctggcttccttctcttcaaggagggctggggtgatgggatgcttcctggtggccagagccaagcttgagggaccccagtagagccaagctacccacatactaagccaagaccaaggtcaggacctggaggtacaatatgaaggagcgggaaggccctggagcacaggacttcctcagggatgctattgacacccagagcttccactcaagagatctttacctccaggaaatgcaaaggaaggctctttttctttcgtgtatatgggaattccagaggcaagggcaactttctcaccaagagctctcctggttcaatttgtgccacttttgtgccagctgagacttaccctgattggacttgccaagtatgatgtgatgcacttaactgagctctgcctcagtgggtcccacaggccctcccctctaactagccagctgccagggcctctaacagctctggggtcagggtcctcgcctacttcaccctttgcttctccatccacactcagccatatcaatgtggaattttttgcaggaaaagaaaattattcttacatattttgctccaactcctgaagcgtgtaagcacctctggaaatgtggaatcgagaaccaagccttctacaagtgagtggatacatgtgatggggactgtctttcttagagccagagtcagagagagtcggtgacaggaggccaagtgcccaggaacttggggcggggtagctggaagtgggcaagagcttgacagttactgagaagccaggttgaggccaaaggcaagagctttgcctaccaaagggattttgtaaagaatgtggggcttttgtgttgttttcttcggttaagaaagtggttataaaagcattaggtagtgaagaaatggcccactgagggcatgatgccaggtaaaatatgtctcactaagccctttggtcttgttttaaaaatataccgtaatgatttatgctttactaagatgtatctgaatgaggtcaaggcaagacagagtgtggtatattctacctggggtgagccctgctctcaccaaatgcccctgattggccaggtcccagttccagtaacctgaaggatcctggagagatgagaactgctctgggatgagtggcaccatacttctctccagggaagattctgctgcctgctggctgctatgggatgctggctggcagaactgggtcctcccagttgccagggccacagccccagaagctgtttcttagacaggcattctgaattacttaattcccattatgtgtttataccagaaccaaggattcactgaatcggcagcctttcttctcctgaatatactcgggagactttggcatggtcacacttccctcctgttcagtccctactgtccatagaaagtcaagaaaacatttattttcttttgctaccaccctccctttgcctgtgaggatgtaatccaggtttggccagttacctgaacctagagagaagcaacttgagatgcaagctcctgcctgtgggactgaggagcagcccaagaactggggtcccacgggtctccgcagcagagagaggaaggcactagccgacaggggcctgctccacactgaactatccctgccctgggaatggcatatgtggaagctttccctttctctctaccaaagggtagagaagaagcaaacagaagcaatctccttgcctcttgtcttttcatgccttcagcagcatttcttaagggcttggttttcccatctgtgtcacggaaacagaagtgttgcttctgaacctgtgacctcactcagtttctgagtcttcccacgagtagatctccctacccacccagccctgcctgcacccacactggaaatggaggtcatttttcagttttccattgcctccttaatgttctcatcaaacggtaaaagcctgggtgagatccccaggtatgtcaagtctctggcagcagcgctttggccttgccctcagtgtctctcacatacagatccctagtcctgcctttggcctagtgccatggcaggagcccagtcagatgcaagaacatgcccaggctccagtaagcagctcggatgtcctggagccctgagacgggcagggatggtgtctcccaagaactgttcatggattgtggaaacagctcctactcactgctcatagcacaggtttcagactcacataggttactggttggatcagtaccataggcacctgggcatgttacaggtggatcccatcttaggaggcttctctctgagctgctgtgcccaagctgagagagctaatgggctcagtgaagtcacccaggagaaagtattacagagctccacatcggctgtctgcagcttcaaacgagatataaaatagatatcctgggggagggagaaaggctccaaattcaaatacatgacggacttttattaaagttaagctagtttcttcatcgcaggatttctgtctttactgtggtcatgtattttaggaccctccaaaagggagatggaacaggaaagacagcccccaccctcttctccacccacaattacccagacatagacacaaaatcaaatactgggactggaaaggagacccctaaggtccagtagtcccagctctatcattttataaaaagggtgaggctaagagagaaggaaatttgcccgaggtcacactgctaataagtgacgtggctgagattagatgggcattctattattccccaagaccatccacccgagcatgtattctctcagtccccctggtaaaacctatgaagcattttgggggagccttcactctcctgacactaaaatgggtttccatgttgacagtcctgggcactgaggcaggagagcagctggctgtgagcacagcccccagatcctaaatgagagtcagagacaaatgtggactatgaagggcttttttcctgaagtttcaagtagcctttggaagaagctggggatgtgctgccttaacctgtgtgaggcagttcaggctgtctatcacactggactttgccttgctacaggctggagaagtcaagccaagtccgcacagtgtccagcagcaatttattctttaaagggagccggttccgatacaggtaaatagtgacagtaagtaaccattatggatctattttcagacccttctctggagaactcagtggtccttatcctttagaacagagaaaccagggaggactcagaaaagtctgaggtctccatctaattctcccatcttatgacccttttactatttccttccttccctacagcaatttgtctgtagggttttaaatgtatattggccggccatagtggctcatgcctataatcccagcactctgggaggctgaggcaggtggatcacttgaggccaggagtttgaaatcagcctgggcaacatgatgaaaccccatctctactaaaaatacaaaaaaaattatctgggtgtggtggcacacacctgtagtcccagctacttgggaggctgaggtgggagaattgcttaagctcaggaggtcgaggctgcagtgagccatgattgcaccactgcactccagcccaggagacagagcaagaccctgtctccaagaaaatgaaaaataaatatgtatcttctctttcccttacaatagcaaaataagaactataacagtgattcatgtctcactgtctaaaggttgttcttatgtgtttttttgtgatgtaattggaacatgctggaaaatgaggaattactcctaaatgagaatggaagatcctaaagactctagagatggagagagttctctcagataggctgtcatgacagtttagaagtctaccccaccaagcaagcctttctccatgaccaaaacatcagggaaagggtgggccacagatgccatttcctgattcagggaaagcacctaagatcttggagaggagctgtcctacaacacagtctcatttcttgctgcttgtttttattacactacttacagtggccgagttgcaaaggaagtcatggaatcaagtgctaagatcaaacgggagccaccggaaatacacaggtaggctgccaggggcttccccccaaacagttgtagctcagatcccagaatctcaatccagcagtttgagtactgtgaagcccctggctccagtggctaccaaaaagtccaaaatggagcagaaggctgaagaaacttctcagagggatggggagaagtctttgacccttaataagagagctggggagggaggaagggctactgcagatagtacatcagatccaggtgccacttcacttggcaattctcttctgccctccctagtcttgacactgatcatagatgtgtcacacaatttcagtggttctggaaccagtcgatcatatgaagccaaggatagtcccacagccctgccacactggctctaaaataatttcaggatccatgcttcatgtagatccacaaattgtgtttccagaagcctatctcctagaatctaagacccagaaagaatatgactgaccaagaagggtaggatttgccaaccagcctttgcctctgggaaggggagcattactgcctgccccttcacatggagccctgtcatcagcagcctctattggaagtcaggggaggctgccagtattggtccaggcatattttcaggagtactgctcatcctggggctctactctctgacagtcttgcccccaccccagagaccagtggcactgctgccacactaaaaaaaaggttcagatgagtctagggttacaaagaggtggaggagtttgaagcactatctctgactggaatccagagaccaaaggcaaagagaaggtattaaagattttaaaaaagagagagaccaagacttaatatagccaggcaattctagtagccagtactcaattcttaagtgcctaccaaatgtgtccatgcactgaattaacaaggttctttttctttaacctcagagcagggatggttcccagccggagctgtccctccataacccatggcccaaggctgagcagcgtccccaggacccgcagaagagctgttcacatctccatcatggaaggtgagcatgagcttcttgaggtgaccactggggtcctccaagttgtgatctgggaccttgaaaagaggctaatttgcattagtgatggcagcatgtctcttggggaaaagggcctccagtggcaagtaggaggttttatccagtggatgggaatattagctgggtacagggtaaaggggtgtgggtatctaagcaggagggttgtggatttgagggtgctgggttagccctttgggggacttgcatatgtgggatctataggttccatgcagttctgaaattgctttccatcaagaggattttcacgccctgtgcggtggctcacacctgtaatctcaatactttgggaggcctagatgggtggatcacttgaggtcaggagttcaagaccagcccggccaaaatggtgaaaccctgtctctactaaaaatacaaaaactagctgggcgtggtggcacatgactaatcccagctactcggggggctgaggtaggagactcgcttgagcctgggatgcagaggttgcagtgagctgagttcgtgccactgctctccagcctgggtaaaggagactgtccaaaaaaaaaaaagaattttttaaaaaaaggggctggcgcagtggctcacgcctgtaatcccaacactttgggaggttcaattcaggtctcaggagtttgagagcagcctggccaacatggtgaaaccccttctctaccaaaaatacaaaaaattagcagggcatggtcgtgggagcctgtaatcccagctactagggaggctgaggtgggagaactgcttgaacccggaaggcagaggtggaggctgcagtgagcccagattgcaccactgcactccagcctgggtgacagagactctgtctcaagaaaaaaaagaggattccacttgtttgctaaatctgaccaatctccacagtaaaattatcaggatggctgagactgttaaccaagaattttcacttcttggttccgaagcatttctagtagctgccaccatgttttgcttcagctatagaaatctgtcccgttggctgggcagtggctcacgcctgtagtcccagcactctgggaggctgaggtgggtggatcacctaaggtcagtagtttgagaccagcctggccaacatggtgaaaccccgtctctactaaaaatacaaaaattaaccaggtgtggtgatgcacgcctgtaatcccagctacttggggggttgaggcaagaggattgcttgaacccaggaggcggaggttgcagtgagctgagatcgtgccactgcactccagcctgggcaacagagtaagactccatctcaaaaaaaaaagaaagaaatttgtcctgttgctatctgcatatcttaccactgtctcaggaaattcaatacgacccatctccctccagactcccttcctttggagcaggccgaggtgggaagagagagaaattctacgtatctccactgaactagataccccaatagctgaggccaacaatctattctctgggtagttaatgctgttaggaggcgctcttggaatactgccctctagctgctgtcactggcccaggtcacccgcaggctggatacaggtgtaaagttgagtgctttcattcccgaagatggtgtttttttaggacctcagaaatctcacacagcgggaaacagcagaattggttcatacctgtctctctcctgggattaatggtgtggaagctggcaggacagccctttgtcctttctgtaagaatgctgcttgggaatgaaaatgaattgctcacgttaggaaggctatcactctgctgtttccctgagatctaatttgtgtttaggattttaggatgtgtcactgtgagtgtgagattccatgttaccaaagtctagtatgtaactccctatggtctagaggttgagaaccccggctagacaaacaccatcaagttacttgagtatcttcattgctccatttgtaaaatagggacatcttccttgcccaccccattggttgcaaggaagctaatatgtgcggaagtacttgaaagagactaaagcgtttacaggccggcagcaagcacagtgcagagttctgatcaggaagccaaggtctgactaggagctctgccatgcactttctgtaacaggttgttttatctctgagcctagttcccccactgcagaacagagctgggtgtgggagagtgcctgtggactaccaagtagaattgttatgcaaagaatggaattatggatatatgaccatcatgagacacagcctcctggtgtttcctcccatcttaggctgacccggagaactgagcttggctctcactgtcccttggctctctccgtccctcttttggggtgtacatctcaggaagtagaatgaaattctctgaggaaacataactttctcccctctgtggcctttctttccatccctctgaggctgaagctagagggtccatccccatcctccacagagagctgggacagctgtcctcccaaacaaaaggctcaccctagggaagctagcaccatgcaggatgtaaaacaggagaggagccttgtgcatgcctacttcccagaacagggaagaatgtccaggaaaccagcattcccaaaagagggagggctgaggctctctgtgtagagacaaaactcactgagagttgctgccaagtagggttagtagaacaactcagaggcggggaaaacagtccttgtgatcctgagacatgctgaggctgagtcaggtccccattcagctctggctttacctccagcctcctcctcccattgcagcagcaggttccttgtccaaactattcccccttgctgccaaatgcaaagagacgtacagtggggagaggctgctgaggagtataggccccctagggccagggcacttcctcaaaaccagcctcatagaatggcacacttggtaggttacagctcagcagacttccaggtgcttctcacaccctgtgcccaaggctgcaagtggccctggtcatggcccccagcccaggacccattagatgcaggacagcgcaggtaaaactgacctggcccaaatgaacctcacaggctcagggtgaggagagggagatggacatcaggtttggatgtggaaataaataaaagattgtagcaattaaatggctttatcagtacaggggctaccaagcctgtggaagtaaagaatgggttagtttccaggaggcgagagttcaggtgcaacgtctttcaagaggagggcttgcctttaaaggtcctgacaggcactgctgaccctaactaactgcccaccccaaccagggagggaggggctgcgagggatgcgatgagggcctcagaagaagggcgcaaccaacaaaaaccccaaggaatttagaggcatttaaattggttcatgctccaccaaagactttcttttctatagtccatttggcccatttagtatcacagagactacctcctcccacttcagagccacccagccccaaagctaggctgaccatgcaacttggctggcaccagggcaggcctggactatatatggcctggataaaggccaatggccttgtcactttacatcctggattttctgggacggtcttgattccccttaccctctgggattgttctctgccccctctgtcccttgccctctgagaggttggagcccttatccaggcctcagggaaagagctgcaggccaaggaagcattactttttatggctctaagtgcttctgactaaatccagtcccctgataacggtggcctctcagagctgctccttccctgcagttcagcctgatgtgaagcttggggaggtgaccttctccctgcaacacgcgaggcactgccaaggggctgctatgatgtgggatctgcagaaatcctttgttcctagttggctttccatctttgcctctctgtatctctccctgcctggctggtttctctgaagagatcagctggtttccactgaagaagtatttgccttcctgggccaccatggggaagagtctgattaagattcacaccagagtccgggtccagctccggctgactaatcactgctttcggcccctaagtgtgcgcatcctgaggatggggccccggctccagggtagggtcctgactgctgtgacccccgggcaagggaatcagctggagcatttccaaggtaaaaaaggctctcctgttttgctgtgccagttagcgcagatccttcccacggcacccatcccatctatcccaaaataacaggttcgatgaaatggcaggacaggtggtggcttttacagcagtgaaaacagtttctaatataggactaacctgatgtgggagggtcaccttacaggtgagatcttctgttaagggaggagaccaactgatatttactgagcaactgtatttgtcaggcattctactagaaatgcacatctaattggatgtggtggctcatgcctgtaatcccagcactttgggaggctgagatgggcagatcacttgaggtcaggagctcagaccagcctggccaacatggcgaaaccccatctctactaaaaatacaaaaattagccgggcatggtggtgggcgcctgtaatcccagctactcgcagggctgaggtgggagaatcacttgaacccgggggtcggaggctgcagtgagccgagattgcaccattgcactccagcctgggcaatgagatggagtgagattccatctcaaaaaaaaaaaaaaaaaagaaaagaaaaaaaaaaagaaatgcctatctatccattatcttgtttaatgagagcaccaacagctcccagtatgatgtggctccaggtggtcctctgacattttcctcttctgatgtcacagcatctgcctctccttccccacaagctgaggggtgtaatcgtaggttaagctaagcttttcatactttgaaagatcctgcagtcagagctgtcttcatgaaggggcaggcctttgaaagggtggcaggcgccctatgcaatggggctgaggactgcctgggaaaggagccaagcaagcaatatgctgcaaccagggccttaaggtttctgctttatcagtgacccataacctgtcccaaggtacatattcctcaagctgcatgtgcaaatggggacatcagggaggaatactgtggaagagagatcagaggaacagcaagagctctagaacaagggacagagactcttaatttcaggttatttcaaaacagtttctcgagcaattaagacctaaatctaaggtagatgctggctgttgatttaatccgtcctggcccatggttccattccatggaatccgactacagttaagtcatcacttaacagcgttgacagggtctttagaaactgcaactttaagcaaaatgatgtacaattaaacttttttttttctcatcaacattataacaaaatggggctgggcgtggtggctcacatctgtaatcccagcacaaaaacctgtctctacaaaaaatacgaaaattagctaggcgtggtggcacatgcctgtagtcccagctactcaggaggctgaggtgggaggatcacctgagcctgggaggtcgaggctgcagtgagccgtgattgtaccactgcactccagtctaggcaatggagtaagactgtctcaaaaaactaaagaactttaaaaaaattataacaaaatgatgctgaagaaaacattggaggacctgctgtaacatcatttggcttaaagtcatggtttccaggaacctgttgacaacatgaggacttaatagatatgatcagcaggatcatgaactagaaagcggcttggattctatccttggttttgccattaactgccaaccacatgacttcagataacctcttgccctcactaccttgtggagttactgaaagataaaatcaaagtgctttaaaaagatgaaagcattatacaaatttaagattttagcacagggacaaaaaatacagctaagactatgaggagcttctgaaagcagagattgagagctgtggcaaatatatgagccgtgacgcaatggggagcgtaactagatggcaggtgccctgcctttgcccccaccctctctccccattgtcctactcattcataacccagattccagggctcattcctctggagaatccttaactgtgcctgtgccaagacaggctccacaaggctggtcaggcaggctgcctgggtgcaaacggccaagccatgagggagccaaggaagatgggacacactgcttctgaaaggttactaacacctttttaagagagacctttggactgcttcatgtcctggaagaaggggaaaaaagagaccctttgggcttctggagctagccctgaaccaaaaaactccctaatcaacctgacttaggtaaaacctttactgagctgggaatctggttcagtctgggattgtcagggactatttcagggcaacagaaggggactggcttttcttgtcataggtcacaaaggcagagagaaccacaccagcatcaccaagatggccaggagtggaaaatgcagacattgagcctaaaacaagaagccatttccttgggagcactgtgatgggggccgcgctcactcactatatgcccaaagcctctggcctgggtggctgctgttcagttgagagtgtaaccagctcctgttttccctgccagggcttgagtcctgtgagaaccttgggaagagagaagagataatgggtagttttaggggatagaataccccttcctcctaccaaatgtaagagaaatccacccccgcaacaagatcttctcaaactgttttgtgctctgaagtgtctaaagataggggagcttttcagcctattctagacccagctccttctcagaggaaaagagagggagctggccagggactactcccatgccccctcaagaagagcagagagagtttctaccccatcattccacaaagtcagaacagctagaacggaggctgaagagactgagagcagctgcagaaatccaaaaatattgaccttataagctcaagatgctgtatgctgggtttttacaaggatattcggtatttgatgaaacccagttaggcatgacatattccccttctccccattcctacctctcttttattaaaaattttatagttacagtgtctatgttgcccagcctggtcttgaaccctttggctcaagtgatccacctgccttggcctcccaaagtgctgggattacagatgggagccatcgtgtctggcccattcctgcctcttaaagccctccacccaacaggcagacttgagactcaaaccgtggtcccagctctgcatcaggggtagtttggaattcagattctttcaaactggggtaaaaaccaggcccagagttcagagttcaacaacaagcttccaagatgccgcccaaaggaaaaagtggttctggaaaagcggggaaagggggtgcagcctctgggagtgacagtgctgacaagaaggctcaaggtcccaaaggtggtggcaatgcagtaaaggtcagacacattctatgggaaaaacatggcaaaatcatggaagccatggaaaagttaaagtctgggatgagattcaatgaagtggccacacaatatagtgaagataaagccaggcaagggggcgtcttgggttggatgaccagagggtccatggtgggaccatttcaagaagcagcatttgccttgcctataagtgtgatggataagcctgtgtttacagacccagcagttaagacaaaatttggatatcatattattatggttgaaggaagaaaataaaatcatatgaaagactgaaagaaaaaaaaaaaaaaaaaaaaaaactaggcccaggacaccaaaggcaagaaaggcagaatctttaacaaattaggggctgggtgcggtggctcacacctataatcccagcactttgggaggccaggagttctagaccagcctggccaaaatggcaaaaccccgtctctactcaaaataaaaaaattagctgggtgtggtggcagacacctgtattcccagctactcagaaggctgagacacaagaatcgctggaacccgggaggcagaagttgtagtgagctgagattgcaccactgcattccaacctgggcgacagagtaagactccatctcaaaacacacacaaactaggccaaaaccgtaagcaaaaagcaaagaaaaactcttctaaaatggccactgtgatttctgtgccttctcttgtttcatacatacatatatatatatatatatatatatatatattttttttttttttttgagacagtctttctctgttgctcaggttggaatgcagtggtgtgatcttggtttactgcagctttgacctcccaggctcaagcaatctgcccccctacaaagtagctgggacaacaggcatgcactaccacacctggcttcctcctcgccccgaggcagagtcttgctctgtcacccaggctggagtgcagtggcacgatctctgctaactataacctctgcctcccaagttcaagcagttctcctgcctcccctcctgagtagctgggattacagatgcccgccaccacacgtggctgatttttgtatttttagtacagacggggtttcaccatgttggccaggctggtctcgaactccttacctcatgatccgcccgccttggcctcccaaagtgctgggattacaggcatgaggcaccacgcccagcctttttcttttttttaagatggaatcttactcactctgttgccgaggatggagtgtaatagtgcgatctcagctcactgcaacctccgcctcccgggttcaagcgattctcctgcctcagcccaccaagtaactgggattacaggcatgtgccaccaggcccggctgatttttgtatttttagttgagatggggtttcaccacgttggccaggctggtctggaactcctgacctcaagcgatccacccatctcggcctcccaaagtgctgagatgacaggtgtaagccaccatacccggcctgtcgtcttctcgatatatcaaaatagagtgcagtggctactgctgctggtcatgtgggtgtgcagaatggtacccaataaaacacaatgggtgctactggaaagcaaagggtgcattgggacacagcctactcatgttccttttgcctttctaggcctagagtccttacgggacagtgcccattccacaccagtgcgttccacttcccatggggacaccttcctgcctcacgtgagaagcagccggacagatagcaatgagcgagtagctgtgattgcagacgaggcctacagccctgcagacagcgtgctgcccacccctgtggctgagcacagcctggagctgatgttgctttcccggcagatcaatggagccacctgcagcattgaggaggagaaggaatctgaagccagcaccccaactgctacagaggtggaggcccttgggggagagctgagggccctgtgtcaggggcacagcgggcccgaggaggaacaggtgaataagtttgttctaagtgtcctccgtttgctccttgtgaccatgggactcctctttgttttgctcctcctcctgatcatccttaccgagtctgaccttgacattgcctttttccgtgatatccgccagacccccgagtttgaacaattccactatcaatacttttgtcccctcaggcgatggtttgcctgcaaaatccgctcagtggtgagcctgctcattgacacctgagaaggcatgactcctcccaaaaactagccaggtggaccaaggaacccggctacccattcccagcaatgggacccatcgcggaaccatcggcacatataccaagtcctcctctcatgactcaaagtccactgcagcctaggagggtgtttcccagaagaagaaagggataggctcatgccctgtctaaacaaactgggaaaactcattttcttcagaagttatttcaagaaaggctcagcgactctgtttctcatctttccaatttgcaggataatttttggttttgaattttgatttttcatagatgtatattattttgaagtatcaaataaaaataatttattttactattactgattattgcagtagtatcacctagcagaggggacactagttgaaaactagagagctgctgtcctctgtattctgcaggagcttttcctgctggtgccactgggttccagtagactcatcactgcagcctcagcagggcaggccagggatctggacaatggggactgtttagttttttgtttgttttttttgccagccagaacttttaaaaaagtaaacatccatgtagaatgattaaatggaaagttgcttcttatgatggtctgagttggattttcttttccttttgttttttcaaatctgagcagagtgggcatctgaagggaccaccgctacagcaacagcagcatcaggggtggggtaagtctgtccccttagtctagagcctagtgggcatcaccatagttttgtataatgaaactagacttaacgtgattttttttttccgaagaacctcaagacttttatagtgctccaggggcgttaaacgaattcagtggtaccagagatagatagttctgtcagaaatgttggacaaagtgtagttaagagaaagcagagttaagttacctgagagactgttgagatttggatagcagtgcttattttatatacacccccttgacccaaagactatttcaatttatattttaacaacgaaatgttattttcttaacaattcatattttgtttttactttatggattaagaaaatagagcctgatgaactaaacgatgcaagaaagaaactgatcctgagaatgaaaagcttcagaaaatagaattccaagatcaacagccttagaagggaccaggaaaagaatcttttaaaatagatttctaagagatgcctacaaaacacagaatgtgaccgtggcagagaccaacacttagatgtagaaatgctgccccctagggtcatcctctgcataagttctaggaaagcatcaccatccttgcagagggaagtcctcgaagcacgcagcacaggcatatgaagggcgagtgtgggatcctaggcccaagctcttcaactctaaaaccaatcacacacaagatcctgttttcatctcagggagagatttctaagtcatctggggcttgagggcttatttaagggtggtcaatggacatattcctggacccacacaaaagtagagcagctgctgataccctaattggacagccccaaacgcagaacagaacaagtcacttgtagacttgacctcccctattttgtcccccgagatggtagaaccatgtccatgtttacaatatgacaactgtggaataattggggttcttagggagagatttgcataattttaaagacatcctttcatctggaccagaggtcaatcaacttatgtcaagtgctacacagtaaatattttggtttagcacgccatactgtgtcacaactgctcaattctgccatcacagcacaaaaacagccacagataatttgtaaatgaaggaacatggctgtgttccaataaaactttatgaaaacagtgagctgaatttagcctacaggccataatacgccaatcctgctctagacaataaaactgatccttaccagtatgttagcagaagagggtcagtcagctctgtttccatgcctgacatgtatcaaagatctgggacctcttcccagtggaggcactagggttgcttgtttaaagggtgcttgaacaactaaccagcaaagagatgtctgatgccaaatgggcaagatcaaatactggaatgctaaaacacagctggaatctaagaagggaagagggcttctctgaccattttcataccagcaacaatttaggcagaattataaacatctatttatcgagtgacaatacaaaccgaaggagatcctagtagagattaggggtcagttaaaatcaactagccactgccacttgtcatctacatagcaaaggctttatttagcacaggactaacgtgaaaagtagacccagagatgaaaaggctgtcaggagacagggggctggtgtccacctggtatctactgtcttatgcaacatagaagattaccttttagtgtagtgctcctacctcagtttgtagaatctggtgtttctatgcagtgagtgatagcctcaactctgacctttcatattcacattagagacagatgcagtattccatatcctagtatgttccttgtgtctagagttctaacagtacagtagtctatgccatttctaacagctaaattttgctctgtaaacagaaactttagggttgtttttttccagggctcatcccagaaaatatggatagaaaagtttccttcagtttgcttttcaaatagtgcttgaataataaacctcctttgattggtgactagtcttttttggtatatctccacctttaaaaattgttcaagtttttaacctggttatactgtgttctaacatgtctctcattttctctcaaaattagtttatctcattgtagaaaaagcaatggttttcatagcttcatctatcaggaaataaaactcttactaaagaatagcatactgcatctttaagcagtagagggtaaactacctgcaaatgtgaatttcttagatacatttaaaaatatatagttgttaaccttctgtgtgccaaaaactcttaagttacattttccttcaaagcaatgtacttttttctacatatgcagtatgtagttagcataaaatcattggtgccatgaagattatttttaaacttaaataaatatttaaatatca

SEQ ID NO: 439 - DNA, 11443 bp, Homo sapiens
gcaaggacacacccacagcttacaccattggctgctgtttagctcccttatataacactgtcttggggtttaaacgtaactgaaaatccacaagacagaatagccagatctcagaggagcctggctaagcaaaaccctgcagaacggctgcctaatttacagcaaccatgaggtaaggatttctttgctcctctgccataatgtctaaagtttttgaaaaaatggtaattaaatactatttcaacaggttagatctcagtgaggtcaggttttctaattcctcgatttgagtatctgcttatggactgaatgtgtgcatgcatgtgtgtgcacgttcacacatacataaattgtttaatgcatttttatgtttgttagcatgaacttgaggaagcttacctcatgctatagcccaaagaaggggagggaaatgggaaaagagttttgcaggaagggagaaaatgatcccaatctgagagattctttcccatcagattcacttctgtctgatatggggaaggaatggacagcttgtctgagtagaggcattgctttctgcaggttctttaccacagagaaaaagcaggacccacaagaatgtgaaagcctcagtcttgcagcctctctgatgtcttgtgggtaatacagtggagatgtggtaggaaaagctcacagccttcctccataggcttctggtctcactttctgcactgctggcctcttacaacaggttttcgcaatcaggctgagcttaagataaacagattgcctcctccctggaaaatctaggctcttggtacgtccttgactgaagatgatccacatctgcttgggaagatccgtatcttccttacctaaagggcctaatgtgggaatttctcagctgatttaaaaaccattacttaggccgggcaagggggctcatgcttgtaatcccagcactttgggaggccaaggtgagcagatcgcctgaggtcaggagttggagcccatcctggccaacatggtgaaaccccatctctactaaaaatacaaaaatttgggcatggtggcacatgcctgtagtcccagctacttgggaggctgaggcaggagaatcacttgaacctgggaggcgtaagttgcagtgagctgagattgtaccactgcactccagcctgggcaacagagcgagactccgtctcaaaaacaaacaaacaaacaaaaaatccattacttaatactgatttgtaaattttcccctcagtgctccagttggcaaaattttgaagaggtaaaaattccagaaaatgcacattacaggcctatgatgaaccctcctctgtaaacagatggagttggtactgataattaaaataataataatattaaatgttataaaggtagttatcacttcttgaattcgtattaagtgacagcctggcttctaaaagtgttatgtaaattattccatttaattctcaaaagatacttataaggcaggtacttacacagtcatgcatcgtgtaacaatggggatacactctgagaaatgcagctgttaggcaatttcatcattatgcaaacatcaaacctagacggtatagcctactacacacctaggctataaacctgtgcagcatgttactgtactgaatactgtaggcaactgcaatacaatggcaagtatttgtttatctaaacatatttaaacatagagtacagcaaaattgtggcattaaaatcttataggaccaccaccaaatatgtggtcctttgtggactaaaatatcattatgcagtgcatggctgtatgatcctgattttacaataaggaatcttagatttagaaatgttaagatcacacagacaataagtggtagctttgagatatggatcaggatctctacattcaatgatatttcattaaacctttaaatcaatgtttcccaaagggtgtcagtgggggctcatgtgattatttcagatggcaaactcatttgcttttatgttttcctgcttttatgtttatgtcaatatgtactacaggaaaatatatatatatatatatatatatatatatatatatatatatatatatataaaacttgaattttattcaggttagcaatgtgattttttattgtgataaaatacatgtaaaataaaatttatcattttaattactttaaagtatacaatttagtagtatttagtatattcatgatactactgtgcaatcatcatcactatctagttcaagaacatttttctcgctatgtggagaaactgcatagccattaagcagtcactccctacttgcctctttccccaggccccagcaactgttaatctgctttctgtctctatggatttgcctattgtgggtatttcatataaatggaaacacatactatgtggttatattgaatttttataattttatatttcctaagcatccctttttgaatattaagttggactttctcattccagaagcagggctcagtcacccttgagacaatttctagttctccacctttttccagttcctcaatgtgattgatccagatatctgctttatataactacctcctggtgaccacttccctatagcatagcagggtatgacctatttgacttgcccccactgaccccacccccaccccacatggaccaggcagatgtgctgcagtgaccacctctcagtcacagcatgaccccttggcaaaattgcacctgcttgctctaaacccaccaaatagaactctccacaggaaacccacctaggtaacgccctggcctcccataaaggcttgggcccacattccccactcgctggttgagcaggcatgtcctcaatggctccccctttcccattggccctgcaaggcatattaccctcttctctctggatctgtaagtaataagctgcttctgttatttcacatactatttttttcaattgcctcctttgtatttcacctgaccaacacactcaaactcttctttactggtcatggctttccgagagagtggctgtctcagtagaaataaactaaacacaggtcaggcaagaaccacaagggcatctgcctgatataaacaagtttcctataaaaggggacacctagacatagatcagacgcttaggcattaggctgttcatcaaaataaagaagtatcccaagaaaggcacattgtaaatatccatgaccaaataccctgaagctctttcaaggcagggctgtagattgtagccactctcacaggagagacctcaagacaaaattaggaaaaaaaaaaatacaacagtgaccttttggatcagtttttttcatttagtgtagtgttgtcaaggtttatccatgttgtgtcatgtatcagtacttcattcctttttatggctacataatattccactttatggatatattacatttttttatctatcagttggtgaacatttgggttgtttccattttttggccattatgaatagtgctgctatcaacatctgtgtgcaagtttttatttgaacacctgtttttaagtatcttaagtatatatccagatgtggaacatccaggaatgtatacccaggaatgtgtcatatggtaatattatgtttaacttattgaggaaccaccacattgttttccacagcagctgcatcattttacattcccaccagcaatgtatgagggtttcaatttctccacatccttattgccttagtcctttttgtgttgctatagaagaataagcaacaatttctaaggctgggcaatttctaaagaaaaaaggtttatttagctcacagttccgcagcccatacaagaagtatggtgctggcatcttctcagcttctggtgagggctttggtgctgtgtcaaaacacactggagaaggtcaaaggggaagcacatacaaagagggtctaaacccagggggcatcctcacattataacaacccattctcaaaggattaatccattcccccaagaaccaatccagtctcacaagaatgagaattcactcactactactagaatggcaccaggtcattcacgagagacctacctctatgatccaaacacatcccactagaccctacctccaaaattgtgacactagagatcaaatttccgtagatttggtggggacaatcaaactgtatccaaaccatagcacttgtcaatacttgttcacctattctccttttctaaaattattattgtagccaacttactgggtgagaagtgatagctcatggttttggttagcatttttctagtagctaatgatgttgagcatcttttcatgtgtttgctagtcctttgtgattcttctttggagaattgtctactcaagtcctttgcccatttttaaattgggttgcttatctttttgttgatgagctgtaaatatacttacatatatttctccatacatgagtaatcacatacatacaaatatataaggatttggttctttataaaatagggtcgtgttttggacacttctttacaattcacttttcttgatatatatgaaagtccatcaaactcaagtagttttgatctaattcatgtagtctagtggctacataatattctatggtatagatatacctttatttaaccgttccctattaatatttccagtttgttgctaatatatacagtgttggtaatgaatattcttgagtatacatccttatgtactggttatttttttctgggagatagattctgaggagtggaattactttgttgaaggaaatgtaattttaatgaccaccattaattttaattttgattttaaaattaaaattttaattttaattactatcaattttcatggctgtcatcagattgatcttgaaggccataataatacatggcttcagaaattgtgtcctcatccatttaaactcttgccaatctgagtggaataaagttataaattattgcttctttaatttgcatttctctaatggctagaggcttagggcatcttttttctttttatagagacagggtcttactatgttgcccagactgatcttaaacttctggcctcaagcaaatctcctgccttggcctcccaaagtgctaagattataggcatgagtcattgtcttgatccagagcattttttttcatatttattggccatttatattggcttttctacaaattatctattcacatagatttccagtggtctgttgaactataccaatttacaaaaacactttgtatattacagatgagagtcttctctgtattacaaacattttccacgtttttgttatttttctatttactttgtttggagtacctttgccataaataaatcacaaattgttttattatggtaaaacatatataacataaaatccaccattttaaccatttttaagtgtacagttctatgacattaaatacattcactttattgtgcaaccatgaccaccatccatctccagaaatttttcatcttcctaaactgaaattctgtactcattaaacaatcatttcctattccctcctcccccagtgtggaggatcagtcagagtgacgggaaaaactatagggaaagaatgcaagccttctgaaaggtcagaaggttctgcagagccctgggggagaacagctgaaggcagctgttctataactctgaggcagagggcaaggagtaggtacaagggagtgtgggggaatgtatcttaaacaggcttgtttatttatgttgaccaggaactgacctttgatcatccacatgcgtgatgttccctgaaaggggaacaataaatgttaattccctacaggttgtgttggctccaggttttcggcattgtgcctgcactgaataaaagtaagcagctccagcttctcggggatgttctctggccactagagccaggcagtcacctagctgctcttacattgcatacctgtgtctgagtactcatttcatccatcagccagggtctgtgggacagacccggcaccctagtccctgttaatcactattttactttctgtctttatgaatgtgcctactctaggtagcttatataaattgaatcatacaatattgtccttttgtgactggcttatttcacttaacataataccttcaaagtttatccatgttgtaacatgtatcagaatgtcttttcttttttaaggctgaatattccattgtatgtatataccacattttgtttatccattcatccatcaatggacacttaagttgctcctaccttttgctatgtgaataatgctgctatgaatatggacaaataaataatctgcttgagtctctgctttcacttctttttgggtataaaaccaaaagtggaattgctggatcaaatggtaattctatggttaatttttctgaggaattaccataccatttttcacagcacttgcccccttttacattcctactagcagtgcacatttctctagattctcaccaataattgttatatcctgctttttttttaaaataatagccaacctaacagacatgaagtggtatctcattgtggtttttatttgcatttcactaatgattagtgatattgagcatctttgcatatgtttattggccatttgtatattttcttttgggaaatgtctatttaagtcctttgcccatttcttaatcagttgtttgttttttgttgctgagttgtagaggttctttatctattctgtatattaatcccctatcaggtacaagatttgcaaatattttccttcattctgtgatttgtcttatcactctgttgatagtatccttccatgcataaaagtttttaattttggtggagtccagcttaattatttttactgttattgcctgtgattttggtatcatatctaatgaatcactgccaattgccaaatccaatgttacaaagctttttcctttcttctgagttttataattttagggcttacatttaggtctttcatccattttgagttaatttttgtatatggcataaagtaagggtccaactttaccctttttcatcatatatccagctttcccacacatttgttgaaaagaccatcctttccccattagatggtcttgtcattcttattgaaaatcattccaccattgttatggaatgaattgtgcacttcccacccacccctgcccaaaattcttaagttgaagccttaaccctcttatgttgaactgttgtttggagatagagtctaaaaagaggtaataaaggttaaataaaatcgtaagagtgaggccttaatccaacagagctggtgtccttagacaccaaagctcactctctctctctctgtgccactgaggaaaggccacttaaggatgcagcaagaaggagccatctgcaatccaggaagaaattccttgccaggaaccaaattggttgtcaccttcatctaggacttctagcctcgagaactgtaagaaaataaatttctgttgtttaagacacccactctgttatattgagttatgacattctgagctaactaatacagtcagataagtaagggtttttttcagggctttctattctatttcactggtctatacatctgtctttataccattgttgtaatattgtgattactgtagctgtgtagtaagttttgaaatcagaatgtgtgagacatccaactttgttcttctttttcaagattgctttgactatttgagatcccttgacatttcatatgaattttaggttgaatttttctatttctgcaaaaaatgtcattgggatttttattaggattgcattgaatttgtagatcactttgggtagtattgacatcttaatattatgtcttctaatccacgaacaaaggatgtccttccatttatttattgcttctttaatttctttcagcagtcttatagtttccagtgtacaagtcttttgcctcctaggttaagtttattgctaaatattatattctttttgatgctatttttgtaaatgggattgttttcttaatttccttttgggatttttaaattgttactatatagaaatatgactgatttttcatgtagattttgtatcctgcaattttgctgaatgtatttgttaatgtgtagaatccttagaattttctacatataaaattatgccatttgtgaacagagataatcttacttcttcctttccaacttggatgtcttgtatttctttttcattcctaattgctctgactagaatttccagtaccatgttgaatagaagtggtgaaaggagcatcttacctcattcctgatcgtggaggaaaagctttccctttttcaccattgaatatgatactagctataggtttttcatatatggctttaattgtgctgagatagttcccctgtattagtagtctatagtctgttttttttttcataaagggtgttgaattttgtcaaatgcttttcctgcatcaattgagatggtcatgtatttattcccttcattctgttaatgtggtatattacattgattaatttttgtatattgaactatccttttatatgaaagtctccatttagatgactttttttttttttttgagactgagtttctctctgttacctaggccagagtgcagtggcgcgatctcagctcactgcaacctctgcctctcagactcaagcgattctcctgcctcagcctccgaagtagctgggactacaggcatgcaccaccatgcccacctaattttttttttgtatttttagtagagacaggatttcaccatgttggtcagctggtctcaaactcctgacctcaaatgatccacctgcctcggcctcccaaagttctgggattacaggtgtgagccaccgcacccagcctatatgacattcttgaaatgacaaaattacagagatgaagaacaaattagtggttaccaagggttaggggagtacaggtgaggaggtgacagatgtgaccataaaggggtaatatgagggagatgtggtagtgaagaggagtttcgtttctttatcaaagtggtggtctcataggcttacgtgaaaaaaatgacatagcactatacaaaagcattgttgtaccaatgtcaattttctagttttgagctactgtattatagttgtgtaagatataatcattggagaaagtgggtgaaggatacactggatctctgtactgtctttgcaactttccgtgaatctgtaattatttccaagtaaaaaaaaaatgaaaaaaaaaaaacccgggtcaaatattatctgtttcatgtggtcttaatttgttgcattacatgcagagtaaggtcctgaagtcaatgtttcctaaggttctgcatttctaactgacctctgtcctaattatcttaatattaaaataagaaactcttatatagcatataatatgctctaagtgcttgacacatataagtttattaatcctcaccaaacccagtgtgataaatactatcattatctccattctacaaataggactcataagtacagaatagttacttggctggaaattgctctagccagcatatgaagccaagcaaacaatatcaacagtccatgaataacttaaaaatacattaactttaatgaaacctaagtaagttgatcctttcaaggataagcactaaaatacaaggtattttatctgacttttttcttttagctgttcctcacctaacaaagaaaatctgtttttgtttttacagtacaaatggtgatgatcatcaggtcaaggatagtctggagcaattgagatgtcactttacatgggagttatccattgatgacgatgaaatgcctgatttagaaaacagagtcttggatcagattgaattcctagacaccaaatacagtgtgggaatacacaacctactagcctatgtgaaacacctgaaaggccagaatgaggaagccctgaagagcttaaaagaagctgaaaacttaatgcaggaagaacatgacaaccaagcaaatgtgaggagtctggtgacctggggcaactttgcctggatgtattaccacatgggcagactggcagaagcccagacttacctggacaaggtggagaacatttgcaagaagctttcaaatcccttccgctatagaatggagtgtccagaaatagactgtgaggaaggatgggccttgctgaagtgtggaggaaaaaattatgaacgggccaaggcctgctttgaaaaggtgcttgaagtggaccctgaaaaccctgaatccagcgctgggtatgcgatctctgcctatcgcctggatggctttaaattagccacaaaaaatcacaagccattttctttgcttcccctaaggcaggctgtccgcttaaatccagacaatggatatattaaggttctccttgccctgaagcttcaggatgaaggacaggaagctgaaggagaaaagtacattgaagaagctctagccaacatgtcctcacagacctatgtctttcgatatgcagccaagttttaccgaagaaaaggctctgtggataaagctcttgagttattaaaaaaggccttgcaggaaacacccacttctgtcttactgcatcaccagatagggctttgctacaaggcacaaatgatccaaatcaaggaggctacaaaagggcagcctagagggcagaacagagaaaagctagacaaaatgataagatcagccatatttcattttgaatctgcagtggaaaaaaagcccacatttgaggtggctcatctagacctggcaagaatgtatatagaagcaggcaatcacagaaaagctgaagagaattttcaaaaattgttatgcatgaaaccagtggtagaagaaacaatgcaagacatacatttccactatggtcggtttcaggaatttcaaaagaaatctgacgtcaatgcaattatccattatttaaaagctataaaaatagaacaggcatcattaacaagggataaaagtatcaattctttgaagaaattggttttaaggaaacttcggagaaaggcattagatctggaaagcttgagcctccttgggttcgtctacaaattggaaggaaatatgaatgaagccctggagtactatgagcgggccctgagactggctgctgactttgagaactctgtgagacaaggtccttaggcacccagatatcagccactttcacatttcatttcattttatgctaacatttactaatcatcttttctgcttactgttttcagaaacattataattcactgtaatgatgtaattcttgaataataaatctgacaaaatattagttgtgttcaacaattagtgaaacagaatgtgtgtatgcatgtaagaaagagaaatcatttgtatgagtgctatgtagtagagaaaaaatgttagttaactttgtaggaaataaaacattggacttacactaaa

SEQ ID NO: 440 - DNA, 36868 bp, Homo sapiens
aaagcctgtttggtggtctcttcacatggacgcacatgaaatttggtgccgtgactcagatcaggggacctcccttgggagataaatcccctgtcctcctgctctttgctctgtgagaaagatccacctacgacctcaggtcctcagaccgaccagcccaagaaacatctcaccaatttcaaatctggtaagtggcctctttttactctcttctccagcttccctcactatccctcaacctctttctcctttcaatcttggcgccacacttcaatctctcccttctcttaatttcaattcctttcattttctggtagagagagacaaaagagacacgttttatccatggacccaaaactccggtgctggtcacggactgggaaggcagccttcccttggtgtttaatcattgcagagatgcctgattattcacccacgtttcaaaggtgtcagaccacgcagggacgcctgccttggtccttcacccttagcagcaagtcccgcttttctggggaagaggcaagtaccccaatcccttctctccttgtctctaccccttctctgcttttctgggggagggacaagtacccctcaactgcttctccttcacccttagcggcaagtcccgcttttctagggggcaagaacccccaatcccttatttccacaccccaacctcttatctctgtgccccaattccttatttccatgccccaaccctttctctgcttttctggagggcaagaaacccccaccccttctccgtgtctctactcttttctctggacttgcctccttcactatgggcaagcttccaccttccattcctccttcttctcccttagcctatattcttaagaacttaaaacctcttcaactctcacctgacctaaaatctgagcatcttattttcttctgcaatgcgcttgaccccaatacaaactcgacagtagttccaaatagccggaaaatggcactttgaatttttccatcctacaagatctaaataatccttgtcataaaatgggcaaatggtctgaggtgcctgacgtccaggcattcttttacacatcagtcccttcctagtctctgtgcccagtgcaactcgtcccaaatcttccttctttcccccctccgcctgtcccctcagtcccaaccccaagcgttgctgagtctttctaatcttccttttctacagacccatctgacccctcccctcctcgccaggccaagctaggtcccaattcttcctcagcctccgctcctctaccctgtaatctttttatcgcctcccctcctcacacctggtccggcttacagtttctttctgtgactagccctcccccacctgcccagcaatttactcttaaaaaggtggctggagccaaaggcatagtcaaggttaatgctcctttttctttatcccaaatcagaagcgtttaggctcttttttatcaaatataaaaacccagcccagttcatggctcgttcggcagcaatcctgagacgttttacagccctagaccctaaaaggtcaaaaggccatcttattctcaatatacattttattacccaatctgctcctgacattaaataaaactccaaaaattagaatctggccctcaaaccccacaacaggacttaattaacctcaccttcaaggtgtacaataataaaaaaaaaaattgcaattccttgcctccactgtgagacaaaccccagccacatctccagcacacaagaacttccaaacgcctgaaccgcagcggccaggcgttcctccagaacctcctcccccaggagcttgctacaagtgccagaaatctgaccaccaggccaaggaatgcctgcagcccaggattcctcctaagccatgtcccatctgtgcgggaccacactggaaatcggactgttcaactcacctggcagccactcccagagcccctggaactctggcccaaggctctctgactgactccttcttggcttagcggctgaagattgatgctgcctcattgcctcagaagccccatagaccatcacggacgccaagcttccggtaactctcacagtggagggtaagtccgtccccttcttaatcaatacagaggctacccactccacattaccttcttttcaagggcctgtttcccttgcctccataactgttgtgggtattgacgccaggcttctaaacctcttaaaactccccaactctggtgctaacttagacaatactcttttatgcactcttttttagttatccccacctgcccagttcccttattaggccgagatattttaaccaaattatctgcttccctgactattcctggatatagccacatctcattgctgcccttcttctcaatccaaaagcctcctttgcttcctcctcttgtattcccccaccttaacccacaagtataagatacctctactccctccttggcgaccgatcacccaccccttaccatctcattaaaacctaatcacccttaccccactcaatgccaatatcccatcccacagcaagctttaaaaggattaaaacctgttatcacttgcctgctacagcatgggcttctaaaacctataaactctccttaccattcccccattttacctgtcctaaaaccagacaagccttacaagttagttcagaatctgcgccttatcaaacaaattgttttgcctatccactctatggtgccaaacccatatactctcctatcctcaatacctccctctactacccattattctgttctggatctcaaacatgctttctttactattcctttgcacccttcatcccagcctctctttgtcttcacttagactgaccctgacacccattaggctcagcaaattacccgggctgtactgccgcaaggcttcacagacagcccccaatacttcagtcaagcctaaatttcatcctcatctgttacctatctcggcataattctcataaaaacacacgtgctctccctgctgatcatgtccgattaatctcccaaacctcaatcccttactaaagaacaactcctttccttcctaggcatggttagtgcggtcagaattcttacacaagagccaggaccacatcgtgtagcctttctgtccaaacaacttgaccttactgttttagcctagccctcatgtctgcgtgcagcggctgccgctgctttaatacagttagaggccctaaaaatcacaaactatgttcaactcactctctacatttctcataacttccaaaatctattttcttcctcatacctgacgcatatactttctgctccccggctccttcagctgtactcactctttaagtcccacaattaccattgttcctgccccggacttcaatctggcctcccacattattcctgatgccacacctgacccccatgactatctctctgatccacctgatattcaccccatttccccatatttccttctttcttgttcctcaccctgatcatgcttgatttattgatggcagttccaccaggcctaatcgccacacaccagcaaaggcaggctatgctatagtacaagccactagcccgcctctcagaacctctcatttcctttccatcgtggaaatctatcctcaaggaagtaacttctcagtgttccatctgctattctactactcctcaggcattattcaggccccctcccttccctacacatcaagctcgaggatttgcccccacccaggactggcaaattagctttactcaacatgtcctgagtcaggaaactaaaatacctcttagtctaaatagacactttcactgaataagtaaaggcctttcctacagggtctgagaaggtcaccacagtcatttcttcccttctgtcagacataattcctcagtttagccttcctacctctatacagtctgataacagaccagcctttattagtcaaatcagccaagcagtttttcaagctcttagtattcagtgaaacctttatatcctttacggtcctccgtcttcaagaaaagtagaacggactaaaggtcttttaaaaacacacctcaccaagctcagccaccaacttaaaaaggactggacaatacttttatcactttcacttcccagaattcaggcctgtcctcagaatgctacaaggtacagcccatttaagctcctgtatagacagacgctcctttttattaggccccagtctcatttgacaccagaccaacttagactgtgccccaaaaaaacttgtcatccctactatcttttgtctagtcatactcctattcaccattctgaactacatgccctgctcttgtttacactgccggtttacactgtttctccaagccatcacagctgatatctcctggtgctatccccaaactgccactctaaactcttgaagtaaataaataatctttgctggcaggactatgctgaatctccttaggcactctctaatcagatgtcctaggtcctcccaattcttagaccttttatacctgtttttctccttctcttattccatttagttttttaattcatacaaaaccgtatccaggccatcaccaatcattctatacgacaaatgttccttctaacaaccccacaatatcaccccttaccacaagatcttccttcagcttaatctctcccactctatgttcccacactgcccctaatcccgcttgaagcagccctgagaaaaatcgcccattctctctccataccacccccaaaaattttcgccgccccaacacttcaacactattttgtttaatttttcttattaatataagaaggcaggaatgtcaggcctctgagcccaagccaagccatcacatcccctgtgacttgcacgtatacacccagatggcctgaagtaactggagaatcacaaaagaagtgaaaaggccctgccccgccttaactgatgacattccaccattgtgatttgttcctgccccaccttaactgagtgattaaccctgtgaatttccttgtcctggctcagagtctcccccactgagcaccttgtgacccccgcccctgcccaccagagaacaaccccctttgactgtaattttccatttcctttccaaatcctataaaacggccccacccctatctcccttcgctgactctctttttggactcagcccacctgcacccaggtgaaataaacagccatgttgctcacacaaagcctgtttggtggtctcttcacatggacgtgcatgaaaggattataaatcataaagccactttggcaaaaagtttgaaaaattttttgaaagttaaatctaaatgtatcttatggtttaacaattctatttctgataacctacccgggataaattagaacatttgcccacagttttgtatgtgaatgttcatagctgcattatttataataatgcataacaggaagcaatccaaatgtctactaactggtaaatgaatagacaaaatattctgtatctataaaatggaatactattgtatagatagagcacataaatagtaataaaaatgtaagggatatacaatagaatagtgcacaggcataaaaaggaatgtattaacagcatttgcagtgacttggatgagattggagactattattctaagtgaagtaactcagaatggaaaaccaaacatcatatgttctcactgatatgtgggagctaagctatgaggacgtaaagacataagaatgatacaatggactttagggacttagggggaagagtgaggtggggcggtgagggatagaaaactacaaatatggtgcagtgtctactgctcgggtgatggatgcaccaaaaattcacgaatcaccactaaagaacttactcatgtaaccaactaccacctgtaccccaataacttatggaaattttttttttaaagtaaggaaatgttgatacatgttacaatgtggataaaccttaacaacattagaagctaaatgcaaaagactgcacaatggatgattccatttatatagaatgtccagaaaagtaaaatttatagaaacagaagtgaatcagtggatgcctggggctggaggagtgtaagtagagatttacaagcagcaggcctaatataaatgcaggaggtgaaggaaaagttctaaaactgtattttgatggtggtttcccatgctataaacttattaaaaaatcaatgaattatacacttaaaatgggtgaactttcaataaatctattaaaactactaaatatttaagcagtgttcttcaacgatgctggcacatttggaccatgtggataattttaaaatttatgtctgtgtcccattctttgatattttgatttaatattcttacaattgggcattgagttttttttaagctgagtgattctaatacgcagccatattggagaaccactgcaataaagtattgtccttccttgaggtcattaatatatggtatgctaatcttactattctaactctcagttaatttatttaacatcttgttaaacactcactatgtactaggcacaatatttgacacaaaggagacaaaaaattaggaacacttcatttctgtctttatggactcatggacaagggagaagtacaatcctaaaggtatatcaatgtaataaattttataataaaagtaagtacaaggttagtggaagtacaaataaaggaatgatcagttttgagcaacaaaagaaaaggtcaggaaaagcttaagatgtagtgattcttcatcctggaagattagagggagaggaaatggcagacaaaaatattcaaagaactgaatatttggagaaaagcaagtaattcagtacagccttaaaaaaaatgaggtggggggagaatattgagaaaactgatatcagaggacaagtgaaattagagggtatttcatatgccataccatgggaaaccactggatgaaaggacatggtcatgtatgtattttagaaagagcacactcaccaggtgtgttggcatgtgctggtagtcccagctacttgggaggctgagacagaggatcatttcagctcaagggttctgggctacagtgtgctatgcaaattggatgtctgcactaacttcagtatcaatatggttatctcccagagcaggggaccaaccggttgtctaaggagggatttaaagttgggcctttgaaaccactttataaataactgtccaatagttgagagtccaggcagggaagacagagaatagcaaactactcaaagatactctacagacagaagtattacccttggcgagaggccaagagagaacaagctggcacagtctatacctgggcaaggctgctgatggataatactccaaaagaaaaatgctgaagaaggaaggaaaggaaatttcccaaaaaagagaataacatgagcaaagacattctcaaaatatataagattttttaaattttatttttttgtgactagagagttgaatattatagaacagtgttgcaaataaggcagaaaatatattacaaagttctttggagtccaggcttatggacttaaaatctattcttcatgcaaatggtacccactgaaatttttgaagattaacaaatttgctcaagtttaaaatacaatcgatttaagatgcatgattatcatatatcaatttgccaattatagagcattggctataagatgcatcacatatcagagataaaatatgaaaagtggagtttaaaattgatgaaaaaattggtatcaatggcagaagcctgatgactttaggtaactacataaaaactataaaatctgactcatttttatatcgttttttctttatatatgaggggattctctatctttgaagagtgaaaatataattaatgtaaattaaaatatttgtaacagtattttctagcttttgtaattcaggtggttagatgaatttaatgaggccaaggacttcaaaattatcccaagtgtgccagttaataaccaggaaaatcatttttgctcaaggccacagtctataatcctttctagaaatcaattttgcaaatgcatactacttatcacaaaactaccagagtaggcacagtcacaaaattatagaattaaagaggtggaagagatcacagaatttataaagtcaaaacaccctcagtgtgtatatcccctccaagacactcccagtagaagctggccattcagcttctacttctacattcttccctgcaaactgtaatcctgtgaggtccaagactctgtcttgcttactgtggtagcatcctgaataatatactgtagtcaataaatatttctgagtaagtgaatgagtgttcttatgggggaattgtaccattcatgcagtagtacccattgctgtagaagagctcaaatttgagaagtatttttaaagggcagtaaaagtcacctctggtgtctctgagaaaatctgccacctcttcttatgtaagccttgcaaatacttgcaggcagcaactccaagccacactttcctatttcagtccacagtttgccacatatcattgtttccaagactttctactgtgccctatatgagctacatttggtcagtttaaaaaaaaaaaaaaaaaaaacttctggtgcccagaatgaaataattatttacctagccagcccaggcgacagacttctctgaccaaatgtatgcaaatccctcgctttgggggaaaagttcttcaaatggcagtatcatgctgatgagggatctttcagggaacattaataggtaaaactgtgaactcccccagcaggcttcattcatctattaaggacacctccgtgagggactaggatgccaagagagagtgatgcattatactcctcatccaattaaacccatagtaaaatattttggagggttttctttcctgagtggaggctaagaaagcattcattaaacctgggaagttctaagtcttccaatttgcatagtgaattggaactgtggtagcctgaatatgaatggagatgtggtaattcagtaacatgaaatgggaaatgcagtttaattaccccagagatttttttttggaacataaattgcttctacttttgtaacaatattggattatgaacccattcaccttgatgttgtgtaatgaagcctataaagcaagtcataaaaatgctttgtttgcaatgctgtttttagaaactccaatcttatggaaaaatcttctcattattgaaagcatttgtagtctccccagaatcctagaaattaaaagattcctgagcgcaaggtccttcctacctagttaatgaacgagggaagaaatattcctcaagttacctcaaatctgtagatctggattatacagttctttactactaccataaagtataatttaatctagaaatggcccaaatatacatctgaaaagagatattgatttgaagtgacagtccaggaccaataacaattttaagggaaaacactttttatgaaattacatttctgccattagaaaaaatatctgaagaataacaagttcaccttagaaaaccaaaaggtaaattttaaaaaattaatattgaatgaaaattaaaggaagaataacaatctactttttacttattacattagtataaagtttaaaaagcaataacattcagagttaatgaggataaatcatcctcagactttggacatttgagtataaattgctacaaattgaagcaaataatttggaaatgtgtattaaaatctaaaatatgcattctattaactaaaaatactgcttttgggactctgccctgttgtattcagaaacatgtatagctaatataaatgtataaaggtgtttattgcagcattgtgtgtcacagtgtactactagaaatagatccgtatatctgtaattatagttaattaataaaatattaaactgtaaaaagtatacattagatgttgatgttaatactggagggatgcccttgaattaataatagaaagttgaaggataatatacaaaacatagtcccttttctgtaaaaccagataacaacaacaaaaaaaaaacctttagatatggatttgtatatttccataagcatggctcttttagtgttgattacctcatggtaggggcagcactaaactgctttagagctccataatctacattagttccctcaaaagccacttcatataaacataaaaagaacacacaaaaaaaactatgtccaaacttgctgtttggacatagttccaaggaagtctcccatttatttctcactctctctcaagtcacagcacctatacatttctaaatggaaatttggaagttgccatagcttcaggaaagtgaataagaaaaaagattactttcatataaatatttttaacttttacaaattgtcttgtaatacttttggaagttaagataaaattctaaaaaaccaacaaacagattatggtgaaaatgtttaggaatttttaccacagtgtgtggtctctttttaggaagaaaattaattttaattactttttaaaatagtagaaatgttgctcttttttcatcagtttgttcagtccatattcctacatactttttctagcatttttctttgtctcagaactgtatccaaagtctagacattgttagctctgtcaagactagcaagggtcagagtgattcttcaagtcattccttagtcactgcattctcactctctcttcaaagtttattctctagcgctggtctccaagttcacacactatatttttcacacagcgaccctggccactaacataggaccaataggaccatcagtgagaatcagatgaggtatcataagtaaaaataatgtatgaactggaaagtactatggaagtgaggattccattaagaagattattgaaataggctagcttcaaattgatgggtctctgaaaaggatacttacaaaaaaactccacaaatataataatggatagagccctaatctcaaaaacataaatttgaggggtcccaaactcaattacacaaggttaagaatatagagcttggtaaattctctctctctctttttttttttggagacagagtcttgctctgtcaccaggctggagtgcagtggcgtgatcttggctcactgcaacctccgcctcccaggttcaagccattctcctgcctcagcctcccaagtagttcagattacaggtgcccacccccatgcccagctaatttttgtatttttagtagagacgggatttcaccatgttggccaggatggtctcgatctcgtgaccttgtgatctgcctgcctcggccttccaaagtgctgggattacaggcgtgagccaccgcgcccggccggtaaattcattttaattcactttaagcttatattggctatgtgtagattttctcttgttccttcattttgttttagtacaattgtaattagacttttgggatacatttttagtggacttcaaggtccaaaagactcaaagccaaatactccagaagtacttatgtaaataagaaataatccaagtatataattaattatattaaaatacataacacatatacatatgtatatatagtacagaacatatatacatatgtgtgtatacatacatatatattacatatatatatatatatatatatatatacataacatagcatacatttagttagatagcttttccaactctgatggtgacttccaatttctgaaaaattctccagtaggggttgcttgaaacagaaagaaggagacgtgtgtgttaaggcgactgaatggggctgtggtggtagcactaacgtacctacttatgaacctggtcagatccttcctttctctttgttttagtttactcactccttctaaactgaaaggcagtaaactctagtatctgtaagatgacttccttatctaagattttaaggttttataatttaactgtattactttccaattataattctacttcatgctgaaaagaaatccataatctagcttttttcgtgttggcaaggttagttcatagaaaccatcttaagaaacattgacatgatggcacaaaatagagtgattattgatagcaatcaactcattgtatacattaatcaaattattctaatgcgtgccaaggtttcacatgctttttttttttcaaacaaatactgaaaagtcttggagaaatcacacaagaatataataatcttttatgtgattttacccgtcatcagctttccccttctatctgaacatttaaacctctctagataacaagagttttactataatattcaggaataagattcttcctggactaggaggatgtagggggaaatgagcctctgttttcagcatccaatctctgagcaaaggatctcccaccacctgctgcttccaacaagcccaaactctcgctccagctagctttcctgggaacagagcagaaaactggaagggaggggaagaaggctggtgagagcaagaggcggggagtgaggaatgggaggctggaggaggcgtggcccggcttggggccgtcgggataaatactgagaactgggtgcggggtgtagggagagaactctggaggaacgctgagctgagcagcaccgaggacagcgcccggcagcgcccgcgcccaggtctccctccgcagccctgactcgcgcacacgctgagcttttgctcactccccctcgcgcggacacagacacacgcatattcacacacccagacacacaccccgctgtacaatggcagaatcccacctgcagtcatccctcatcacagcctcacagtttttcgagatctggctccatttcgacgctgacggtgattatcttctctttttaactgtttcaagacccgtttccatgccccttcccattctttgcccttttctgagcctcctgatcccattatccctcctttctattctttacttcttcccccttctgcctaatcttatcttcttatctccccgactggccgccaaactgtcaacctgaaagtttatattgtttccaccgtaatcccaaaaccttaaacttttgtctttccaggaacggtaatggtaggagagagagagcagggattggggaatgctgcccccccaaagtttctgtggctgcgcttagcaccccaaccatcctcctttgtcctcagtggatctaaagtttgataccccaggaggggagcgcttcaccgtctgtacactttgctggttaatcaacgtccaggcaagagagagcctctcgggtcgccagaaagataactgtcttggaaagtgaacgggaaagacacttggaatgagatatctgacacctgggtgcctctttgtctttgcaggaagtggttacctggaaggaaaggagctgcagaacttgatccaggagctccagcaggcgcgaaagaaggctggattggtaggttcaagtttgcgaaaaagaaaaaaagacttttaacccccaaattaaaacattcttgtgttttcacaaaaagccagtagcgtaaagcgctttctgggtaatgtaaacgtttattgactgcgaaaggcaagaaaaaacacttttccaactcgaatacagagaaatgggaaaggggaaagagactgagaaagagagagggggagagagagagagagagaagggagggacagagaagggagggaagaagggagaaagggagacagacagagagagacagattttctaaagggaaaaaccttgctatctgaaactggagctttaaatatatatatattctatactagtacttgcattaataggtcttaaaagggaactgtgggtgcatgagattctttagcggatcaccacctctaccactgagtttgattaggtaatttttaaattctcttttactgtgtgagaaataagggggtggaaatgcatttctgccccttggtggtcaagaaacagatctgcagattatggatctcttactctatcaccaattattattgttgtgatgttgatgtagttggggagatgagaaaacatcttgtcctcactaagggtaagttgcccaacttgcaacctaacagtgagaaagaatttagcaagaaaagatcttcatttctgttgaaagcaagaaacccaaaaggtagagaagtaaaaagtaaaacaattttaagaatttcatgtattgtaaaaaaagcaaagtgatactctgatgggcagcaattgatggtgttttgaaaatggctatgttcgttatttaagccattagttaattaaacaaataaccattcttattaattataaatgactccctttgggcataaattaacctgttaagaaaatatgttgtcagcataaatataaaatacagtcagcttttaaacatagatgagatggttgtccagaggaaaatgggttaaaaattgtactactctattgaggtttatgtaacactgcctttcagaaggcagtgttgaattgggatgagttacacgttaatggtctttggcctttttgactacgtttagaaagagattttacactaccaatgatgtatatattatatagcagatcaccacctctaatattgagtgatatatataaaatttaataatagaactttttgccctatctaaattgaaaattgtgtaatatacatttctgtacagcatattcaaaagaatcccagagggctctaaatgtattataatgcactatagaactatcagttacaaaaatcattgaccaaattgattttaaaccagattgtgctctagggattgttttacccagatttaatattatataatctaaaagtataatagaacggaataaaatagcataaaaatgttttatatactctccaccctccccatgtcttatatattgccatgtaaataaatttatgcaatactgtcattatagctttatatatctttggctaatctaataaaagcaattatcttcctcatttaaaaatacatattttaaaatcaggttggaaaagtcttactttccataaaatttagaattaaaaccttggaagatgcttccagcaggtaatgattatattttattttgtgcagaagtaattttaatattgaaatctattttcagcttagaaatttaaatattcatgaactttaaaaaaatatttttcttcctctgattttaatatttgtacctttttgtaagcaatatcttcatgttggagatttagaatttaattatttttctctgttttggaatattcaaagctccaattattagactataatgtaatgatactaaacaagcatagttataggattatatcaagttgcttaataccttgattcttgagcatttttctggaatgtaaatacaatctggatttttctgaatttagtatttttcttgatttgggtagttaaaatctaaatcaagatgtggattcagagtttcatatagtagatacatgtttcattatactactaacttcattgcattaaacctacttgtatatatttcttctctttctttagaacataaaaattgcccttataaaccaggctttttgcatttctagccataggataacagatttcattgcattaatggaaacattgtttggcttttcgtattaataacatgaaatttcaaaattttcactaggtgaatataacattaattaaatataacaatgcaatatattttcagaaactatccttttacactaaacatagtgtttggtctttgtagttgcactcatttttatacatttttaattggtggtgattatatgttttgcactgtttaaaaaatagattttgacatacttgtcagaaacttcacaaagtaaatgtcaagtctgctcgtgaaagtagtggtattacaccattttaaaatttaaggacagatgctttggtttttgtttacgttaagatgtatgtaaaaataaaaaaactgtaggacctgatattcccactattgccatggttgaacactttcattttcttacaattgtttctataacaaaattagataaatacaaattgtaatttatccatagtaagttttataaagactaaaatataattatattgctttgttattatttattatcttagttcaactaaagatgtctacattggttccaaacggcttttataaatactagtaataatgatatttagtctcaatatagccctttaattatattaacctatctatccccaaagcaaacttgtgtggtagataataccaccatcttgttagctatgatgaaaaccgagaccttaatttgctttcccaaggacgtagaatagaacattagtaagggctgacctattttaaataggcttcagctaatgcaacagggctattttaaatgggctatgttggagacccaagggtaaaaattaaacctcctgaataccagttctatgttcagatcactagtttatagttcatagctctctaatctatttaatttttaaatttatttaattgatgaatgcctcttttatgcttaaaacaatctttgcttacaaagtgagttaatctttaacattcacattttttgcttgttcaaaatgaaaacatatattactctccatagataaaacattatgttagaatgagaaaaatgttgtaagacaagatagtgtagcaatataaggtaatctttaatgaagcaagcattgtttaaaatatattgatggtgatgattatgttaaaattcactaaaagttatgaatggaatgattctgactacactttcaaaggatagcatagtctcaaaattaataatagaagataaatcatattaattgagaaataatcatgattacaactctttcatttggaactaataaatactgtgtatcagttatgcctttaatttttttgagaatagttaatcattatgcatatttctaaatggttctaattttggtttttctttgcagtaagttattaacaccatcacaagcataactggtatttttttaacaaacctcctacctgcttttatataattttaggagttatcacctgaaatgaaaacttttgtggatcagtatgggcaaagagatgatggaaaaataggaattgtagaggtaaggaatttatgcatttttctgatttaattttaataaatgagtttcaattttgaagttgtcttcaagtcaagtaagatatagcaagacccattcagtacagtttattttacctaagtaatacattatcttctgttcagaagtataaagttaaaaaatgttcacaaatgaaaaacatctaagagtattcctaacccagggcctaaatttcatatattacaaaattgagaccatggaaaaacaaaattgtttgcctctggtcatacagctatttgctggcacaggtgcagttagaggaacaagtccctgacttctacatgagtatcaatcacattccattacccagccccacttccatacagtgtctaagcacatggtccatcagtatttcttatcacttaacagtgtagacttgacttttaaaatataaaataaaatgtttgcagtccctgtgaaatatttacagtccttatttttcatggcaaaaagctgcatcctggtttgacagttggccttcgtaaaaacagaataatttaactagagtgagtgaatattttatgatctgttataggtacagatttcatgtgaatctttgaaagttaaaactgtgggtgtcacatcttatcctttcacagtgacttttcctattaagggcaacttatttttgtctgtgaatcaaggaagcaaaactgattatgcatcaattcttctgcattctcagatttgtgaaagagctgttgcttcccttatatctacgtttccagcctgtggtgtcttagcctctttctttatctcagcagcctattagagaaattgggtggaagtctttgtccagaaaaattaattaggtcataatttgaaatatgccaaatcataacataattatgttatttatatagtgtttctcagtgtattagattgtgaagtattctggatctcaacaacatttagtaataatttacctttgattcagaaaaataacctggttttcaaataattgatcttataggacacttgtgatgccagtgtgaaatacacttatttttaaacagctgatacaaatagagttaagagaggacatactattattatctttgtaattaaaaattttccctggagtacatacattcccctttacccgtgtgtaactcattactatataaatagataatagtaatgggacttacagatagacatataggccaactaatcaaggtatgaaaccatcaaggataagaaaataacttttaaattaaacataaatgagatgaggtaaatctaattattcaaaactagtttggaaatatgacatcagtgaaattacggattggctcttttagagtttgacatactttataatcctagttaaggaaaacctgtcaccttacatttaacatacttctccttgaaggagtccaatggactcagctatttattcaatttcatttcttcagtgatactagattgtgcagtaaaaggcattgatctgattcacatggattttacatttttataaggataaaatggatgagcatgttttgaatcccggttttactttatgtgatacagtctaatcatttatgacttattatttcagcgctattttgaatgagaggttagaggccatttagcagacgcattgtcctggaggtttaatgaaggaaatttcctcagaagttttagataaggaactgttacaggaaagaaaaggctttctgtggaaggaaagatatagaaatataggtaacagaagaggacagagaaggcgatgaagtctgaaataaagaagtgagaagcttttatagcaacaaaaataataaaataattcacatttgtataaaataaaattgacaaagtgttttcaaatatgttatctcatttgatcatcataactagaaaattaagtaaatttaaatataaaatgaagatctattttatagttatagcatgtgaagcttcaataggatttgcctaaggtcacagaaaaagtaagaaataaatggtagaacagtcagaacccagccatgttcccccaaactattctgccttttttaaaataataaataatctgtacattttctgcattaaaaggaaaacttttcaagcttcagttggttgattacttatggcaagtttctaagtttatctgggatgaatagggatgcacaaagtgttctgcagagaagttatttgggcaaagcactcgaaacataatttcagcagaacttttgatcagctgaagcagaaataatttaaagggagacaaatgagatacatataaactgattggaaggttttagtgttccaggacatggaactttttgctagatgggactcttgggaagaactagccaacattccttattttaaggatgaagaaactgaagcccgaaaaggtcgaatgatgtatccaaggtcccatttgcagggagtgacaaattctatatacagacttagatctcattccgattttagaactcttttcattaatcttagttatcagccaagacataggagtaaggggtctggaagagggcattagtttgagagaagagaaatggagaataggaggaaaaataggagattgcttcaatagttcatatgcatgttggttcactgtgtgatggttaagagtgaagaaaagagaaattctgaaaataattgggaaatagaaattaaaagttacagattacatgtagaaaatgtggaaagggagagtaggaaatgtctgaacttatattttgctctctactgtaaccagaaagctgtattaaatgaagttcatcctttctttttccaatttgacatatatcacttgcttagaaatcctataaataatatagaacacaaatacacaaattctagccagctataaaggaatgcaaaatcctatgttttctacaatttataataatctacctactgacatcaagcacacattaactttggtgttcaaagggaaaggaagatggatttacttatatgttatgcttacttaatagttatactcacaaactcatcaaaatctaatcaaagtaaaccaaatgatactcatgcagtggtctgcgtccctgatggaacaggccaaattggtttgtctctgaaagatgtcattcaaaaagattagaaaatgtaatggttaactttcaaagttctaacgtgacaaagttagctgacactttctaacaacatgcatttgctacctagaaacaaatatgtttctttctgaactttctaatttcttgcctttaaatagatttaaaaatccacacaaatacagtttagaaataacgagattgttaacacaaactcaagacaggagcatcgaaattttgagataatttaacaaataatgtgatggtcaaaaaaatgttccgaatttattcagactaatagctctactgcaaagaaggctgattaaaataattaaaaaggaagacttaatgatttagcagataatagagctttcttctctggtgttcacatgaaatataggtatttctcttaaatgggtgtcaaatctgtaagtttttcacctgatccttttggcaatgtgtgagaacctaccatcctctccattcttactgtttctatctgtccaggtcagtgcatccattgaaaaacagacctaaaagctattttagtcctaaaactgtaacaaccctcccagggaagcaagctcttctccagcctttccctcttttcatctgcagtgggatttgagcctgtgagtttagccatagtgaatataatttttcatggaagactacttttccaccacagaattttgggaaatgactgacaatgaaatctgattttaaaattccctctgcatagatctttctaagtgatttattagggatacttttttgattgaggattttaatggagggtgatgaaggtaagggacagagtctctaagccaagaaagtcagactctgccttcaaatctggctccaactgcaatctatgtgagagcaggccatttaccctctttgagcctctgtttccttggtagtgaacaaggatgacaatgtattaacttcataaggttgttatgatcatcagtatcaaataatacatattgaacaagtagattgaccctggcacactgtaaaaactcaacaaatgtatttgcagttattgttacatataaaaataacttactacaaaatcgaccccatcttctgaatgccaagccttttcccccacttattatataatttgtcaaattcaaattattaaactgaaagagctttacatttttgataaagttatttacctttcaaatttcctggactcacttctcactggctagggaaaacgtttttctggttctcaagtgaaaaaaaaaaatgaatgcttggctaatacatgttcaagaatgttaacataccatgattgtctttaaaagttaggaattctgcctcatgtgcactgtgatataatttgtatcactaatgaagttgcctttcatgtatactctcctcacaactagtacttagctttattgttgtttttatctcctgctttgaaattgtcaggggaaaagttgtttgaaagtatctgcctccctatatggttctcactagtggtgactgtggtcaccagcacagtgcctagtatttagtagccaaatgagccacagcaagggatttcaacttactccaaaacatcaggcaaagtctctgtattacgctagaaataaaagagagatgtaaagtcccctgttatgggtagagttccctgggaagcagatctgagtggaagagtagcaatgagcaggtttattaggaagtgctcttgggatcaataccccgggacagaagtgaagagaatagatctgggcagagggagaagctgggctgtgtcacagtctcaacggggacatcagctgaccctacagtgagttctgaagctgggatgacccttcaggaatgtctctagttttgagtgagaccgttgggcctttatatccccatgttgatcagtcataggatgccacctccttggggacacagctgtcttcagcccaggtattccttcaatggggcctcacaggtgaggctgcagcaacactcccagcacttgaagggagttctgggtagcatatcacaatgtccaccccaacccctattcacagctcagtaataagttattggaattatctccaaaggaactttacctccatttatttacagcctatcctgatgctaaacaaatagttaattacctttatatattgcttcaataaaatatttactaaaatttgtgcagtttctgggccacaaaacagtaaataagacacagaccccatcctcaaggagcacgtagactagtaggggagacaagcaagtaggaagttgttggttttttttcctactcttgataacaagcaatcagttctcagaaatgaagctctgagggattctacttatttccttagctacctgccttccactcatccccttgatattcttcactctcttttccaactcataaaaaagttttgggagttcataaaagagcaggcaggcagcccaaagattacagaatcaccaataatattgtaataagaagtattggatacttctataaacagcagtgacttagcatatctgagaataaagcaactctacttaacacctcctatatgaaagacctttggcacattatagacatagtcataaaggctacagctggagaattactgtgcccagctctgaaacttgaatattgattcatacgcattgagagaagaaccgagagacaacacaggaccaccacattgtgaaacatatcttaagaaagatttctttacattcactatagccacatcctatatacacataataatttttatatgcttaagactcctttctaacatttataaaataggatggtatcatgttgagtgtaacattaatggttcagtgaaattaaaacagattgaatatgttgcacattgatgtaatctgtattttttaataatttaagtataaaaccaaagcagtatgggcaagaaatacacatttatagtagacatgaagagcatttttactatctctgtatctgacattcaggagacctctcaactttatgtgagttacatgaacttttatgttgaaacaaagatggcaatttccctaattttacatttagtgattgcttactagttcattcatttgtttttttctgtttttatgtattcagtgaatttggagatgtaaaatatttaaagaaaaattattcttttttgttcaaagcaacacacactaattataaaaatccaaacaaaatagagaattatgatgaagataagcaaaaaataactcaattcttttaagtagatgtttttaataaagtaaaattaccaaccaatccgcaagcatttatttcaggcatataacatgctagataccatgctgggcattcaggggatgcagaaaagtattattccctgccctcttgaaattaatggtctagaggaaggtcacgcaaaaattgtaagaagtatctaacaagttgcatactaataaataaaggacgagttggggttagctatttcctgtttcctaaatgaacacttatattcatgaaaaaaacataataaaatgtggctagaccttctatatcatgcagaaccctccaaaatgtatacataacatccatttccattgttcaatctttccctcaaaatgtctgcctctgatatattttcttctctttgatgtgttttattgtcttccatctttgttccctcttctttcttgtgttactttttcttctcttcccatcttctttaaaatcctcaaggagatattcttcagaatccctccaggaaagtattattatagaagaggccaggctcaacaagactggaggggtgtggctctccgtcctccagagcccctctccatgccgagcccacccactgccattctccctcccttctcctcttcccccttagctctggggggagacctacattctaggcctaacttaccagatatctggatactttataatgaaaatcatttatagctactttccactaggagcccacttacagatgaggaaaaaaaagggatttttataaggaaaatggtgttctagatttcaatgagtagaaacagcttatcatatttaaactatctcattgtcacgtgtaaaaatcaccaacaaattcattatttgcagtccaagagcaaagaagcaaccaaaccactctattactgtcttcaacaagcatgttgttgacttaatctactaataatcaccaaattaaagtgattttcagtctgccaatcatcaggtcatcattcaacctctttgggccttagcatcctcaattgaaaaatttggtcttgaattaaattaaattatgttatttctgaggtatagaattttatgattcaagtattcaaaggaattgaaagaatgcaaaggtcacagaagtatgtcctgagtttaataagggacctggataacacacacacacacacacacacacacacacacacacacacacacactgcaatgatgcaaatgtgtttatgtaccaaaagctaattacatttttttaaaagcactggcacattataaacccccatttttactttttagatatattatcatctacccacactagtgacctttctttaaaaataaataagaaaatgttttataactaggtcatattaaacatgttgacataaggtttggccctttcccttagtctcacccacatgtgtggtgcgtataaatcgagtggttttaatttgaaatattatttcaaaaatctaaacataagataagctaaagggcatacacaggcataagaaaaattagattccttgcatataaagtagaatagtgcattttatattaaatattaaatttttaaatgaacctaaaaggatgaattttttaaaaaaagttatgatagtattttctataacttggtagaacttttagaactgactctgactttaaggctgatctagactacaggctgttggcctaaaatccacggatgagggtccgtccatgcccgtgatctagggaattcatcaaatcctggaaattagatgaaatatagtgtgtgtagattcattatttaatggtgaaaatgcagtgcttccaacagaaggcgttttgaacccaatatattcaagaaacactggcttctatttcaagtccttgttttagtgatgagggtactgaagtccagaaatggctcggggttgctggggaccacagctaattagctactgtgccagaaatagatctcacatctgtagtggagccatcaatccagctccttccttctctgtacgcaatagattagtcataaaatgggatatggaatccttttttcttccaaaaaaaaaaaaaagagaggaggattgaagttttgaaatgagatctaagggaaaatgtcatagaggcatgccgtggagatcagaaaataaaccccagccctggattcaagcagtggatgtcctttcagcagaaagcaacaatttgagaactggcttttcctattcctgtttaacgccccaccattcatggtgaatttcttttccattgccttacgattgtctttggtttatcttctcttgtatctcatggtaggctttctcctcgggcttgggaatacattttcccccttcactcccctccccaacatttatgttcctcatggtttctttcacttcacatgaaatttatggcccccacatgtgcctttctgtgaccctgtgaggagagaggagagaggcatagaacactaatctgtggcatagaacacttgaagggttcaagccacgaggatgaatctgcctgaatgtccagcagacaagaagtggccacgctagttctacctgagcacaggtctgctgcggccacctcactggccaaagaaccaagcacacaagggcacacgagcgttggagaatcgacagcgctccataggaaagtaccagaaagggaaagccgactctaatgtttttcctctcctacttttctagcctgtgagggaacacgttgaagaaaaactaagcagcaggtaatggcagagacttgtttttgagcaacttacaacacgtttctctcttcttaaatcttttccagttggctcacgtattacccacagaagagaatttcctgctgctcttccgatgccagcagctgaagtcctgtgaggaattcatgaaggtataagaaagctgcccctttaagaaagctgcttaaagtaggaaaattgttccttttattaaaaatgtgtttgttttccttatccaaaattacttacagacatggagaaaatatgatactgaccacagtggcttcatagaaactgaggagcttaaggtaagcaaataaaaacttgtactaagtttttcctttcagatgcaattatgaactaagagtttcctagctttttaaaaaacctcccacaaaagaaactaatgttgaacagtgtcacattttcacctactcttcgacattgttaatgaagtaccagatcaaaaaagcatcttcaattgcttctggaaattctgtacagtaatgcaaaaaattaacattttttgtggtgtacacaaatataagacagacagacagatagaattatagataagccgaataagccattcttttattgaaatttgtagttttagttctcaaaataaacacatatatatataaattttcttacaaaagaaagaagaaaaagttactgaatagctactgtatgccaactactttacacataatgccttatttaatctttgcgtaagttgtatgacattgtattaccccattgaggaagagttgagagaagttaaatgatatactgaaggccacacagaaatcggacagagccttgatgtgcaaatccaggcttgtctgcctccaaggcctgtagacattctacacaacctactgactctcagcaatgatgataaaaaataaaaaatcttctaaaattaaacttttgaaaaactgcaacttagagaatgaatttatcacttcggatatcacagaggaggatataaaggaaaaggcagagatctgaaatcaagtcttaactcattaattactatatctttccaattttctttaatctttaaaatgagtgtaataaatccttcctctcaggcttattgtgaagctccagtaagattctgcacatgaaagcttttgtgacatgcaacataaaataaattatattattcatgaactcaatttactagcctttcaggaatatggaagtattcttctcatttcctcaagccgaccccaaaacatcgccatctgaaagaccctactttttctatttttagaacatagagtgactaaaatataagtgagttaatatttactgactatctgtcaggcagagtacaaggtgcttgaagtgtattttaaaatttaatcctcacagaaaatatgcaaggcaggtattatcactcctaatataaaaacagtgagattggaatgcagagagatttgatgatttttcaagattacacagctgcctaggaagagaacctggatttgtacctagaatatctgataatgctaagaatgattccccaccccacccccacagcactacatgctttcagacttcatttattaagagctgctcttttgctatgtggggaaatatgaatatcaacagttctagtcataattcaacatagtttgagtagcatacaattttaaagatggaacggggacatttgggccatggcaaaatggctaaaacatactcaattttatcctcttgaaaatgtaaacgtttttaatgtgaagtcactgaaaacagtgtattttacaaacttgcagctcagcaatccacaaggtgacagttaagccactgtgtttttattttattagttagaccaaaaatattcttttaaagatcctttttagttcataatgaaaaccttagctcatttccaatactgacctctaaatattctaaaagcctccttctttgttctaaattttattctcagaaagagattctaaatagaagtcctcttccctggggaattttgaagataagttggcattcttttttaatggatctttcaagaaagctaattttaagatccataatagagtaaaacatcacttgctctcagacacgactttgaatctctgcgtcccaaggtttctccgaggctatttttgtgaccaccattttagtctctgatgaggctttttaacccaattaatctctgacaaaagccccagaaggctcaaaaataaaattcaaccccaacagataactttgaattttccatgcttcactttggatttgaagtggaatatttgaagtaaaaaatttttatcaaactaagaaaagagtctctttcctttaaaaaagtggcatcaaatcagcccagaactggaacatttaggagagagataagtcattgctaaatcaaagaaatctaatccttcaataatatctgggcacagtatctgcctagtttttcctaattgcattaattcattttctgagaaaataaaggagttacgaatgaatagcactaaacaaaatgaatgactattataaagtgcttacactgtcacttatatggcaaatctttgtaaagcttttatttatgtttctgttaaaaaaacttaaattcattcctaagctccaggtgtcaagttaataatcatctttttttcatccttcccacattaatctctattttaatatgattcatatatctttcaaagattcaatgacatcaactgtggccaattttgttaatttaaatagtcagtggaagcattttaaccaaagtgctttggactgcattaggctaaaaactacccaactggccctctggagaaataagcatcatgctggctataaactaatgtgtaaatacagcctggggagcagaaaatggatttgaaattagggatagatctctatttggtttactgatattttttcacaatattccaaaggtataaaggcccttgtgtttcttgcagaacaatccaatgagtacttgtgaagatatcagtaagaagaaatgcatccattgggctggctggttttaaaaggttttattcaggttaattgaaatcataaagtcatggtaatgcacagacaatgatcaatcaagtctcagtaaaaagcaggtattattcctgtcaaaggtagtttcattgctggaatgccaggaggacaacctggtttagtctttcttctattataagttcctctactcacctgcttctacccctcaaaaggagactttctttgcattcctggtatgtcctgttccaaggcattctgaaatgaaagtagacgatatattattaatgaaattaatctaagtgttctttgttttaacagaactttctaaaggacctgctagaaaaagcaaacaagactgttgatgacacaaaattagccgagtatacagacctaatggtaagactgatcttgaaaagattgtacccaagagctcatgaagtagtatgatgttcttgctaactcccaaggctacacaggatgaaataaataaacggtggtgtgggcatcatatgcacataggtatcatttcatttgaaaagtgaaatacttagggatgcttacatcttgtcattttgagttctgcaggcattggctttaagactcaacatatgagcattttcttccttgtagagctgtgtaatttttatctatcaaaagatgacttgttttgcttccaaagccagtgtaattatatcactaaattatataacttacacatatataaggtacactatatatatataaattatatcaccaaaaactcacttattatagagttcctaaatccatttttatcatagtttgggaaatcacactttgttgagtttaaagagaccatctagctactttattaattaagcaagttaaaatgggtctccttctttcttttgatttttgttgttttggggttttgtattggtgctttgaatgaggaaatctaaatatgccctaaggttgatgctatggtaaatagtgacaactaagatcaattatagaatgttgataatagagccaagaaaactgctttacacataggcacttactgtttcaggaaaaaaaaaagagcagataaataaggttccagataaaataaaccaatgtctatgaagttagtttctattggacgaagtttgctcattttgactcatcacagaattaggattaccaggagatagatatatttatacagctttcagtactgtgaaggtactgtgaattcttactccatggatttacatcaataaaccataaacatggctctatactataaaagctactgttatattagattgaagaaggagttagactttttaattactctgagaaacaatctaataaagggtttgattatatttgatgtaactgaggtttgctttcagcatctcagcttacttttatctgggttggggagggggaactactagaactttactattgccttattcactaactagtgttatttattataaggtggggctaagctttaatttcaaaacaaccaaaaaggttttcatggtcatctttaattcctcattacatctccacttacaatagcactagcaaacaaatgggggagagtttcttgctatgtgtcacaatcaacaggtctaagctctgaataacttttaggtaatggacaataacctacatttatcaattttctattttgttccaatcttaagggatgcctatttaaagaaaggctcctttccaggtagaatattgaagcagcctttcaaaacccactcagatgggagtttccctctgttggattggcctgacatatctgattaaatgtcataaaccagttcaaatccaggaagcaaattaatcgagagctaattaaaatttaaatatatatgttgggaaatatttccccatgggcacaaaactaagtaatcgagctgtccagtatcttggtaggtagtgtgacaatatcagaatttatggtcaatggattataaaatgttttgtcagcatgggatcctgaaaaaaatctgcctcctacaaaagattcttagaatacctcgaaccacagaatgcccttcctttccttcttaaaaagatgtcactaaatctatatccattataacactggacacattctgttctttaaaaacaaaaataatgttaatttttcacatatttagtgttcatttagtatacacattttatatatttaatgtaattcatatatactactttggtataacatattatagcaatagttgctactatctaaaaaggtgaatgcttcccaaatacgggtatgagtgtgtttacatctggatgtgtctttgtgaatgacgtatatataagtgcagtggagagttggagagctttatggagtttctaatacccaatagaaaataaaacaattcaaaattattcaaaaattctgttctgtaaggatttatttgtcatctgttttctgcttctgtttgtggtattctatgctctaaaagggtgaaataaatatttattttcttattggagagattccagatgtgcaaaaactgtcagacaccatccctcccacatcttgatacacatatgaacgtatttgcaataaaaaagtgacagtattctagaaacatagctaaaaccactatttctctgtttgactattctatattatcctgataaactctagcaatggacacattacagaattgaaaatttgcattgaaagttttaaaaatgctagtttttaaaattttactgcatatatacaagtagttgataactcaaacagctttattttgaagttcatctccttcatgcaataaattattcctcaaatagctagaataatggcattctgtctttcagctgaaactatttgattcaaataatgatgggaagctggaattaactgagatggccaggtgagtttaggaaccatgaaaaatattgtaagtggatccttttcaaaaaatgtaatatattaatataatgtttttctctcaaaaggttactaccagtgcaggagaattttcttcttaaattccaggtacttaactttttactaccttaaataatattttccttgaaaagctagaatgtgggagacttgtcaagggaaacatactgaaacatagtaataacattttaacatttactctcttctctatctttagggaatcaaaatgtgtgggaaagagttcaataaggcttttgagctgtatgatcaggtaaaagtttgttactttttcctttcttttttattgaagtaagaacacaacataagatcctcttaacaaaatttaagtataaaatacagtactgcaaactatagagacaatcttgacagcagatctttagaatttatccatcttatataattgagactttatgcccattgatgagtaactcgtcatttctccttcccccagccctggcaataacattctactttatgagtgtgactattttagatacctcatacaagtggcatcatgcagaatttgtcttgtgctgagattgattgatcatatgcagttctatttttaattttttgagggctctccatactgtttttcatagtggatgcaccatttttgcattcccaccaatgtatacaagagttccaattttcttcattctcactaacacttgtcttttatctttttgataatagccattctaataggtgtgaggagatatcttattgttaatttttatttctctgattagtgatgttaagcattttttcattacctgttggccatttatataccttctttggataagtgtctactcaagtcattaacccattttttaaattgaattattcattttttgctattgagttacaggagttctttataaattttggaaattaaccctttttgggatgtggtttacaaatattttctcccattctgtaggctgcttttgcactctgttgattgtttcctttgctgtgcagctttttagtttgatgtagtctcgcttgtctatttttgcttgtgttgtccttgcttatggtttcatatccacaatatcattgctaagaacaatgtcataaaggtttcccttatgtttgtttgcttctaggagttttacagttttagatcttatatttaagtttttaatctatcttgaatttattttttatatggtgtaagctaagggtccaatttcattattttgcatgtgtctgtatagtttacctaacaccatttgttgaaaaaagctatccttgtcccattttgtgtttttggcacccttatcaaagatcagttgactataacatgtgaaactgagagctcattagtctatgtttcgatttttgtttcagagctatactgttttaatcattgtagctttgtaatatattttgaaatcaagaagtgtgatgtctccaggtttattcttttttctcaagatggtttttggctatttgggatcttttgtggttacatatgaattttagggtttttttatttctataaatattgccattgggattttggaagtgattacactgaatctgtagatgtgtttgagtaatatagacattttaacaatattaagccttccaattcataaacacaggacgtctttccatttgtttgtgtctctgttaacttctttcatcagtattttatgatttttagtgtataagtttttcctctcagttaactttattcctaagtattttattcttttggtgctcttgtaaatgggattttctaatttccatttcagatagtttatcatcataactaatttctgattgttaattttgcatcctacaactttatggaatttgtttattaattccaacagtttttgtgaggtctttagggttttctctctataaaaataatatctgcaaacagggataatttaacttctctctttccaatttggatgccttaaaattttgttcttatctataatttgattcttcagaatttggaaaaaacgattatgaaaattacacaaataactccttcttttcataggaaaggtaatacggtatgcccaaattacacaaactcctgattcgaatcccacactatcatttacctgctttgagactttgaacaagataccaaactcatgtgagcctcaatttcttcatttgtaaacaagagataataataacaccactttgcaggattgaatgaggattaagctaggtgaaaatatccagcaaaataaaggttatttgtgatgtcactaggtcacatcctttgcttctaatttgtttactcctggacctgtgagctctagcagaactctgccacaccctggtgtgacatagagccacataccttcctcagccctcagtttcctcacttgtcctagaagatattattaacattaagtgaattacatgtgtaagtactttgaaaagttcaagatcttttacaaatgtaaggtgttgaatgagaagtaactaataccttgcatattttacagctttggagcagctaaaaacttgggtggcctgacataacagattatctgccaagtatgcagttgggagactttctaaggattccaattatttccattttacttcatttcccactactgtagatggagttggttgtatactattttatttctcctcccccaggacggcaatggatacatagatgaaaatgaactggatgctttactgaaggatctgtgcgagaagaataaacaggtaacttagttaccatggcacttacttctttaagcagactctgtggatccatccaaaaccaacagcacatccattttggaaatctactttaacaatttatagaggagcagaaatagaattcaattcttaactcaatttggttctggcctaaatcagggtaactgtgataaatagattttaaaaacaaccttgtgattattcacatttgtataagaatttaatccagctcttttgttaatggattgatgtaacaagtagtttcatctcacattttatcacttgacagtggttaattaacttccatatttaactggattacaatgccatttatattctgtacaggatctggatattaataatattacaacatacaagaagaacataatggctttgtcggatggagggaagctgtaccgaacggatcttgctcttattctctgtgctggggataactagagttggtggccgcaaccacttgctagtgatacactgtatctaaaaaataactgtgcactataagggagtaggctgtattttcttttatatctgtaaatttaactgcatatagataattatccaggatgtgtggctcattcttttcagcttgtttctatactgtttgtaatatacagtttttgtaaccatatgattgaaaagaagaaagtctatgcttaggccagtcagtacacccaattttaaaaaataacatattcttgctttcacaaatatagttgaacaagatttccctaaaaattccaccaggattaatctctaaaattctagtctctgatttgcaaatgcacatttgtcactgaataatggaattatgtataacaagccaaacattcttattttagacaaccatagaactgtcccacaaaatatttctaagcttatttctaactattaggaggaatgtgcttttccatctaaaatactcaccaaaatatagttaattgtggctttatgaagttaacagtctcattacagatttagtttaccaatcaacagcatgtctactgcttggatccatacaaaactatcggttcaagttgatgtgacaagggaagggagcaccagatgacacataaatctgtctgattctatgcctgtatttccaacaaacttactgtcagagaatatgacctaaatccattttctaaactgttttcatgtgttgcaaattattctagtcaactgctgttttatgtcatactctgtgtaatctctgattaaatttaatatactgcatatcctggtgtctagtttgcatacttcctggattttctttctatgtagaactgttcatttccaccaagggtatctgctgcctctgaaaatatttttttctagctataacaactctattttttactacataattaaattttaatgtaaaattcatagcatcctgattattgaatgttatatcatcaatacttttgtgtattctgtggattctatatttcatattgagatcagcattcaaaatagttctatttctatctgcaaatagtttcaaatgagtttaaaaaaataacatctgaaaagaaatgctaatgtaatcatttatcttatctagcaagaagattctaaaacattctttaacatacatctaagtcagtttcacatatttgtagctagaatatcctatactggttatagttgatatgtaacagttggtgattttagatttctttgattgtgaaacagggagctatgagagatgtgtccatgtgaaatttacagttactgcctaggagttaatgatcgttctgggtcagcttgaatgtccccattctataaattcaacacttattttctgaattcataaaaataaccaaaaaatgtgagctataatgtttccctcaagaacaaacagaaacgagatttgccaaaaactaaaattcaacaaatgatgttgagtgggagattggctttgcctttagcgtgtaaatggaagcactgccattagactgaatttaactactaagaataaataaagaagaaaataaccttaa

SEQ ID NO: 441 - DNA, 2862 bp, Homo sapiens
gcaccacgccgcccgggcttctggggtgttccccaaccacggcccagccctgccacaccccccgcccccggcctccgcagctcggcatgggcgcgggggtgctcgtcctgggcgcctccgagcccggtaacctgtcgtcggccgcaccgctccccgacggcgcggccaccgcggcgcggctgctggtgcccgcgtcgccgcccgcctcgttgctgcctcccgccagcgaaagccccgagccgctgtctcagcagtggacagcgggcatgggtctgctgatggcgctcatcgtgctgctcatcgtggcgggcaatgtgctggtgatcgtggccatcgccaagacgccgcggctgcagacgctcaccaacctcttcatcatgtccctggccagcgccgacctggtcatggggctgctggtggtgccgttcggggccaccatcgtggtgtggggccgctgggagtacggctccttcttctgcgagctgtggacctcagtggacgtgctgtgcgtgacggccagcatcgagaccctgtgtgtcattgccctggaccgctacctcgccatcacctcgcccttccgctaccagagcctgctgacgcgcgcgcgggcgcggggcctcgtgtgcaccgtgtgggccatctcggccctggtgtccttcctgcccatcctcatgcactggtggcgggcggagagcgacgaggcgcgccgctgctacaacgaccccaagtgctgcgacttcgtcaccaaccgggcctacgccatcgcctcgtccgtagtctccttctacgtgcccctgtgcatcatggccttcgtgtacctgcgggtgttccgcgaggcccagaagcaggtgaagaagatcgacagctgcgagcgccgtttcctcggcggcccagcgcggccgccctcgccctcgccctcgcccgtccccgcgcccgcgccgccgcccggacccccgcgccccgccgccgccgccgccaccgccccgctggccaacgggcgtgcgggtaagcggcggccctcgcgcctcgtggccctgcgcgagcagaaggcgctcaagacgctgggcatcatcatgggcgtcttcacgctctgctggctgcccttcttcctggccaacgtggtgaaggccttccaccgcgagctggtgcccgaccgcctcttcgtcttcttcaactggctgggctacgccaactcggccttcaaccccatcatctactgccgcagccccgacttccgcaaggccttccagggactgctctgctgcgcgcgcagggctgcccgccggcgccacgcgacccacggagaccggccgcgcgcctcgggctgtctggcccggcccggacccccgccatcgcccggggccgcctcggacgacgacgacgacgatgtcgtcggggccacgccgcccgcgcgcctgctggagccctgggccggctgcaacggcggggcggcggcggacagcgactcgagcctggacgagccgtgccgccccggcttcgcctcggaatccaaggtgtagggcccggcgcggggcgcggactccgggcacggcttcccaggggaacgaggagatctgtgtttacttaagaccgatagcaggtgaactcgaagcccacaatcctcgtctgaatcatccgaggcaaagagaaaagccacggaccgttgcacaaaaaggaaagtttgggaagggatgggagagtggcttgctgatgttccttgttgttttttttttcttttcttttctttcttcttcttttttttttttttttttttttctgtttgtggtccggccttcttttgtgtgtgcgtgtgatgcatctttagatttttttcccccaccaggtggtttttgacactctctgagaggaccggagtggaagatgggtgggttaggggaagggagaagcattaggaggggattaaaatcgatcatcgtggctcccatccctttcccgggaacaggaacacactaccagccagagagaggagaatgacagtttgtcaagacatatttccttttgctttccagagaaatttcattttaatttctaagtaatgatttctgctgttatgaaagcaaagagaaaggatggaggcaaaataaaaaaaaatcacgtttcaagaaatgttaagctcttcttggaacaagccccaccttgctttccttgtgtagggcaaacccgctgtcccccgcgcgcctgggtggtcaggctgagggatttctacctcacactgtgcatttgcacagcagatagaaagacttgtttatattaaacagcttatttatgtatcaatattagttggaaggaccaggcgcagagcctctctctgtgacatgtgactctgtcaattgaagacaggacattaaaagagagcgagagagagaaacagttcagattactgcacatgtggataaaaacaaaaacaaaaaaaaggagtggttcaaaatgccatttttgcacagtgttaggaattacaaaatccacagaagatgttacttgcacaaaaagaaattaaatattttttaaagggagaggggctgggcagatcttaaataaaattcaaactctacttctgttgtctagtatgttattgagctaatgattcattgggaaaatacctttttatactcctttatcatggtactgtaactgtatccatattataaatataattatcttaaggattttttatttttttttatgtccaagtgcccacgtgaatttgctggtgaaagttagcacttgtgtgtaaattctacttcctcttgtgtgttttaccaagtatttatactctggtgcaactaactactgtgtgaggaattggtccatgtgcaataaataccaatgaagcacaatcaa

SEQ ID NO: 442 - DNA, 56603 bp, Homo sapiens
gcagaccgagcctgaggacgcctatagaaactgccagaccccaacctctggttcaagggcagctacccaggctggctgagggtcacagcttaccagacaggacaagatctgagtcagtgcaagtgcaaactgtgtagatagcgaagtgaagcgggtaaaagagaccttttcaggacaaggaaagaaacggtggaagtgcaagggtaaggtttccagcaccttaggtgcagaaatcaggacacgtttccctccctccctctaaggtgaaacggcagccacccgcgcctccgccttccgtcgtgtgcagagctaacactcgcgcgtgcgggccgcgtggaccggcctctctgggaccccgtcccgcaagccgatctgcagccccagggcgagcgtgcgagcagtgcgcccgccgccagggagaaaccgttgggaggaagcgggctgcgggaaagccccgctgcgcctgcgtgctgcgcctgcgtactgctcccgcaggctctaactttcgcttttcggtttcctctcaatcccagtccttctcgctcccgggcagtttccccgaaagcacgtggggcggctcttccgagcactcgcgtccctcccgccgcgcgcgccgggccagctgtttccgaagcggttcaaactgcaccgcgcaaagccaggggcgtgggcgggcccgggctgctctacctgcgctcggaaagctagggctccaaagcgttcctgagcggtttttgaccgcgaatgtgatagtgctcatggtaaacactgaaaataaattacatagacatatcttactacccagacacattaacattttagagtatttttccttctccctctctgtttccatttatttacatttctatatattattacaataataggataatactgtctatgttttctttccttcattttcatttaattttatacgtggatattttccaatgtgaaattaaatagtctttgagagcctaactttgatattctactatatgaattgtgctttaactgacagttggaaaattcagtttctgatttttcactgttactaatgaagctgctatgaacatcattctgcataaatctttcatctatatctgatcacttccttatagcagatttctgtaagttcaagaatattataaaaacttccaaaaaaagattgtgttccctacattataatcgtcaatataattctggtcgatgtgttatttttccttcatgtaaagaacacagcttgcttgcatatggccattttcctaaaagtattcatagctttcctccatattgggatgaaatatgtcatgtacatattgcagttttgttcaaaccgtgatatgcatccctgcattttaaccagctgctatgtaggaggcctcttgtacttattaactggaaagaaaatacacacaccaagacaggtaagtgactgtacaaaacccaaatccagagaactacaagaaatgatagaaatcttttatttcaattctattatattacagatgaacaaatacagtttacactgatgaagtgacattcacagtataatagcaagccttacagaaaggaggagaggtgaagaggcattgactggaatttttagaaattcctactatcagatatttagcttataacattattagaaacattgggacaatatagctgaaatgcaaaatggtagctggaaggagagggaaagttaaaacatattactacagattggttcatcagatttgtagctgtcattttgaaatagatcaaggctgtaaagaaagcacagagccagtaagttttttttaataggaatgtggtaaggacacagataaagtattccttaaggatgagagactccaggggaaattcccatggttgggaagggcaatggacctgttccacttaattaagttccacttacttgttttagaattcagttgtaggatgttttgcttcatttcataaattctttatgagtgatctattgctgcataacagacgaaactattcccaaaactttggtaaaacatcaaccatttatcagtgcttgtgagtctagggtatgctggggagttcagttcacctgggtcaggcccccactttatcttgcctgggttctctcataaatctgaggtctaaacttgaacaactactgtgattcaactgtggtctgtgtggtctctcatgctcctgcaagctagccggacttctcatggaggctgggcagggttttgagagcggagtgtgtaaggcctcttgaggcctagactctaaatgtcacaatgtcacatctgctgcaaggtggggaaataacagagcagggaataatctggccattattgaaaatcattgatcaggagagccttcttagtttcagtttcatataatgaaaactacgtaactgatatctttttgccctggtttgcaggctgtactgtattctttatctagttattgtagatatttctgctataagttgctttaaaatgctttgtgcaacaaggcagataaactaagtaaatagaactggatgatttgggtataaaagaaacagtgagtgaagaataggaatgatactgtcttttctccaagcaaaatacagttcctccaaatgggaagtgtggagtagttcttaagtctttctactgtaacatcatgtgaacttatgagttactccggtgacttcacatcagttactcatcatataatagtattttctggattcctcactgtccttgactctcctttgtctgtacaccagttcaggggtggcaaataggaaatttcaccttacctgttgcttctgattgattgctggtgacagtgtaccctgtcatttgttgctcttttaaatccaatacaagtagttgcatttattgttttaaatgttgtccagttgatgggaggctgagggaggagaatcgtttgaacctaggagggggaggttgcagtgagccaagatcgcgccactgcactccagcctgggcgacagagtgacacttggtctcaaaaaaaaaaaaagttatccagttgaggccaggcacagtggttgacacctgtaatcccagcactttgggaggtcaaggcagacagatcacctgaggccgggagtgtgagaccagtctggccaacatggcaaaaccctgactctactaaaaatacaaaaaatttgacgggtttggtgatgtaggcctataatcccagctacttgggaggctaaagaatgagaatcgcttgaactcaggaggcggtggttgcagtgagccgagattgcaccaatgcactccagcctgggcgacagagcgagactctgtcatcaatacatacatacatacatatatacatacatacatagtatccagttggtttcagaccagcagcagtccgttagaatatttagattatttagaattttgatttagcgtgggaacctgaggcatgctgtctcctagcagagggaaggagcacacaagaacaagttgattacaaagaacacgcagtttcaggacagatggtatatacatcacaactgttcatattcctttatccagaacaagtcacatagccaaggtcagagttacagcacacagagaggtatactccacccttagtgaaccatggcaagcagtgggaagggacagaagagatttgaaaatagtacaatctacagacatagtgttagctgttttttctagttttgtgtcttttgcaaatctgacattgttgatatatagatatagctttccaagctgactgttataaggcaaccgtcacacatttgtatctgtcaaattctggatttctaggtttttgtttggctttggtttgattgctttttgaagcagtcaatatgttatacagtaagaaaatataaatagtttatccttcaggaatattgaatcttggaggcataaggattggacacttcaaaaaccataatattagagagtgtatagttattgtccaaataaatagagacacatatattatttggtcattcagagaccccagattaattgctacaggttgaggtggttctagaaagagaatatagtatttgggctgggctttaacaggtgaataagaatttggtaagtgaagagagtgaggagcaagacttgccattcagtatgtacaaaggggcagaaatcaggaaattaaaagcatggggggagtgctggagctagacgaggttagttgggaaatgcgacaatgatagaaaaggctggaaagaaggaaagaaacattttgtggaggatccagactagcagacaacatttgtgtttatcatatgtgcaaggagagttgttaaggcttttgagcagggaatgactatatcaatgcagtattttaaggaattgaatttggcaaatatagtgaaggagaaagagacaagaaaaaggtagtatacctagagattagcatagcattccaattctcaagtgatgaaggcttatggtaggtattgctgtggatgctaaaataaaggggggtagggaaggaagcatccacagatcttgatgatccaaattgggatttggagtgccaaataatcctatttgcagatgttaggattattccattccttcatcaatattgaagctaatatctgtgcaagttttatagtaccagaaaaaaaatttttaacatgtaatctacccttcctagagtcaacttttgatatagtttggctgtgtccccacccaaatctcatcttgaatgataactcccacaattcccacctgtcatgggaggaaactggtgggaggtgattaaattatgggggcgagactttcctgcgctgtttttgtgatagtgaatgagtctcgaggatccgatcattttaaaaatgggagtttccctgcacaagctctttgcctgccgccatcaatgaaagatgtgacttgttcctccttgcctcccgccatgattgtgaggcctccccagccatgtggaactgtaagtccattaaacctctttattttgtaaattgcccagtctcaggtctttattagcagcgttaaaaatggattaatacagcttttttcagagaacagtaaaacattgtcttggttcttgggtgagtaagagcagaagggacacttttggtgccgtggcatctcttggcagagaagtctaatttcactgctaacttgctttgtgagggtgcatttgtgacaagaagaacaaatagatgtgcaaagaaaaaaaactcatacacacacatataggcatatccatgggaaattattcagatccttctcctaccccaaagtgcctaattattcaaggcttgactcaaatcccgtctacttgaaggaactaattgattttatgagcatatagtccaaaaagatttagtttgtctggcttcagcaatgcctacctggagaagtgacatttaagctgagatttttaaactaagatctaaaagatgagttagccagcgaagagttgggtgaagcagatgttggctcaaggggttttccaaactcagggtgagaagtccctgagtttggagagtgtggtttatttgaagaactaaatgctgaagtaagcaaagcagagtggcacattatggggttggacaaagagatcgggcaaccagggctttatagtatgtattaagaaactgaattttataagagcaaagaaaagccatggaaggattttcaggttggcaaatgacatgatctgcttttcaattaaaaaaaaaaacactcaaactcttgtatggagaatggattaaaaggtagataagggctgaagtgaggcagccattcgggaatctactgcagaaggaggcagcagaagagatggagcagagtaaatgagacttgggaaatatttaggaggaagaatcaattaagatttgaggatcaggtgttgcgaggtgagggagaaggcaatgtcaactatgaatcctaggtatctgtcatgtgccatttctagaaaaagagcaggtttgaggagaaagatgtttggttctgaacatagtttgtagagctcactgcacatacaagtggagaggcaagtgggagttgtaggtgtgaagcccagaggagaggtgtggacgggataagcatttaagactcctccatctagaaggaaactgaagctgtgggtgaggtcatcacagcacagcgtttaggagaagcccaggtaaagaagctgacgaatgtctggaccctgacaaccttaacatataatggtttgatagtggaggtggaggcaatgtagaaagaatgccagaggcaggaaaaagcaagaaggatgtgttatcatcatgaccaaggaagaaacgtgtttcaagaacaaaggcgtcaactctgccccatgcttccgagctgtcaagtaaagtgagaaaaacagaaaagcgttccctgggtttagcaacacggaggtcagttgctaaagggagcttctagaatgacgacgtcgccaaatctgtcctctgcctggattctcggcgatgaaactactacagagacctccaagtttgggcttctgcaaacacagcacgtccttctgatcgttctctaagatatgtaaacagaacgccagttcccagcgtggcaacacgggactgggctgcagctcacccagccggcggcccccgccggaagccggcggaaataccccagcgcgtgggcggagcagcggcccgcagagggaggcggtggcgcccacggaacagccgcgtctaattggctgagcgcggagccgcccggtgattggtgggggcggaagggggccgggcgccagcgctgccttttctcctgccgggtagtttcgctttcctgcgcagagtctgcggaggggctcggctgcaccggggggatcgcgcctggcagaccccagaccgagcagaggcgacccagcgcgctcgggagaggctgcaccgccgcgcccccgcctagcccttccggatcctgcgcgcagagtgagtggccgtgaggttccgggtgccgggggtgggacgcgcagggacagagtcctcgggccgtgcagttggacgccgggcgaggacgggccgtctgtgctgacccgcgaatagtgatcccagaggaagaacgcgtcctgagtattccaagtgcgagcagtgccacctgttctcggagatggcactgctcagcacgattgtccttgccagtcgtgctctggcagtgaagaggacttgtgaaatataattttcctctagaaggcactgcaccttcccatttaccgtcactttctcccgtttccacccctttccatcagtcacgttttcttcttttcgcagaaagtttcatttgctgtatgccatcctcgagagctgtctaggttaacgttcgcactctgtgtatataacctcgacagtcttggcacctaacgtgctgtgcgtagctgctcctttggttgaatccccaggcccttgttggggcacaaggtggcaggtcagtaaatgttcatggaatcagatgaatgagtacatgacttcggaatcttaattatgtttctatgttcaaagatggaagggcttaatgtcttcctagagtttaaaagtgatgtttagtttttgcagaccccccaccccaaaataatatagtcttaaaaaaatttctggccggtactgaagagttctgtggtaggtatgcagaggtgtggttgattgtgctttgaatgttgtttgtatagataaggagttattttcatagaacagaaacaggacttgagcctccagcacagtccattgtgcaaccattgcttaatgaggatgctggactcacacttgtgagatcataatatggtttgctttttactttctaattccgtctgaaatatacataatttcaattcaacaaactgtttcgagcacatagtatatgcagggcactgtccaaggtccataagatgttaaaaagcaaaataccccactactctaccccctccccacccaccttcccccgccggggactctggaggcatcacagagctttacaaggaaaactggaaccgatgctctaatagaggtacagaattcagtgagacgcaagtcaaagaaagcttaattgtgagtaagtctcagacaactttatgaaagaaggggcttttgtacatagctttgaatgctataggatttagagacgcaaaaatttgtggagaggctgtttccaagggcgagtagctggagcaaagcagaaatgttgggcacagttgaaaaacagtaaatgatttggtgactgggttgctttgttgatggatgaagatggggtggggtggaaatctgcctaggaatggacagatcataggatttttgcacaggagattgatgtggtccaatctgtgggcagcagaggctggactgggaaggtagaatgttggagacaggaaggagcaggtcttgggatggagtggaaggaatcaaccctaaatctgagatttgagctcagtgactgggagatggccatgccactccctgagttggtaacaggttttgtgagtagatgagactgactccagatttgtgaacatgagcttatttattcattgttttttttttttagagacagagtctctctctgtctcccaggctggagtacagtggcgcgatctcagctcactgcaacctccgcctcctgggttcaagcaattcccctgcctcagcctcacgagtagttgggactacaggtgcacaccaccatgccctgctaatttttttttgtattttagtagagacaaggtttcaccatgttgcccaggctggtcttgaactccggagctcaggcaatccgcccaccttggcctccgaaagtgctgggattacaggcgtgagccacctggccagcccaaacatgagcttattaattcacctcttctgtgccaggtgctacatatgtactagctcaaccagccttaagaaccaactgtggcagggtgcggaagctcacgcctgtaatcccagcactttgggaggctgaggtggaaggattgcctgaggtcaggtgtttgagaccagcctcagaaacataacgagaggctgtctctacagaaaatttaaaaattagccaggcttcttggctcgtgtttattgtattagtctgttctcatgctgctataaagaactgcccgagactaggtaatttataaagtgaagaggtttaattgactcacagttctgcatggcagaaggcatctcttcacggggcagcaggagagagaatagatgcaagcaggggaaatgccagtggcttataaaaccatcagatgtcatgaggctcactcattatcacgagaacagcatgggggagactgcccccatgattcagttacctccactggtcccgcccttaacacatgggaattatattacaattcgaggtaagatttgggtgggggcatagagccaaaccatatcacttgcagtctgagctccttgggaggctgaggtgggaggattgctctagtccaggggttggaggctgcagtgaactgcgctccactgccactgcgctccaacctggatgacagagcaagttcctgtctactaaacacacacacacacaccttgttgataggggagtaagttacctgggttcgcttggctaataagaggcgttgcagctcccattgcctgacggtccagcatatctgctttaggtagatccttattagttaccaagcagggagggagacagccacagatttttccactcaggtaaaataaaactgaactgaaaaatcaaattgcttcagcaggagtgccaaggggctgggcttgggtccgtttctactggtatatatgaggataactagctttataggccagacatttcctcacactcctttggaaggacatttgtggagtaggcgtgacctcatgcctgcatacatgtgctcggctacaagtatgcatacacactcttccatgccctacttgaaaatccagactccttccccagaggtctggcaggacaagattcacttgtgtctgctctgcatattgccacctgtgtgctgatataaatcctaagttacatgatggtcatgggagactctccgttttcctaatgaattttaggacttgcttatatcaagtttttgttgtgattttgaatctttaggatcactatgtaaaaatggacttaacagttatccaaaaagctaagtgttactttatccttttaaattacatttaatgatgttttaatctttaaaaatcattacttctttatgccagatttattgtttgtagtaggcaaagaagaaaatatatctttttaaatgtgtataagaaaaataatgaattttaccatatgaatcataaatataaaacagaagtttgaaaatatttgagttaaattacaaatgtactgtgatttgtaggagagcaattttgggagagtcttgtgatttgtcttaaagcaagtctaattaaaataatgtttttcatgtatttatttgataaaatcacaaactcattttaaaggcatatttattggatacctactatgtggttgacattgttctagggatacaccagtgcacagaatcctccaccaacatccatcccttcaagtggtgaaaacagacaataatgaaaataaaatatgtggtaggtcagatggtggtgtaagtactatgaagaaaaataaaccagggaaaagagagagcatgtttccagggtgggaggtggttgcagtttaaataaaagaggccagagaaggctgccctgatatgttgacaataagcaaagacatgaagatgtgtttcgtggaggagaaaaaaagttcatccccaaactcaattaaaaacaggctttagactataaatgccatttaaataaaatattcctgggacaaactatgttttggattaagcaagatatttaagagtacaacctgatgctaggaaggctttctttggagctatggtttccatatacatagaaagaatgtatattctttttccctataggatgtctcagtggtacgaacttcagcagcttgactcaaaattcctggagcaggttcaccagctttatgatgacagttttcccatggaaatcagacagtacctggcacagtggttagaaaagcaagactggtaaggaaaattcactagacagaagaagaagtttacaccttaaaagtactggttgattaagtgacttggggccatgtttactggaagatgaattccatcaatggccactggaattatttgttgtagaaaagtttgttgatttaaaaaatgactcaacaaagttgagccaaaaagtgtctcaacaaagttaagtatattagtcattaagcacttttatacagttttgccaaatttaatttatgatagatattcctaaatgctttggacaagttacggaatactgacaccgattattttccaacttaggatccagactatagaaagaagtaatttaaaagaaataaagccaaattaatggttaaacattgattagaaatatgaagaaggtagtaaaattaaggggattttttttaactgataggtgttctactttaaaatttattatttgctaatttaaaaacgtcctgaaagtatttgacatagaaagtgaagggtcccctgttgacttttcccccttcagagatagtcaccatgaacactgtcatgcacaatctcttagagtttagaattttttgtgctaattgcacataagagaaataccacataaactgctgctaaaagcaatgtcagtttcaaaagaagaaaataaacctaagaaaatacttaaattatttttaataatttcaataaggaaaccaacatttgttttgtctgttttacatagacatttagttctagaatgaaatgtgtaaatgttaaatctcctagggagcacgctgccaatgatgtttcatttgccaccatccgttttcatgacctcctgtcacagctggatgatcaatatagtcgcttttctttggagaataacttcttgctacagcataacataaggaaaagcaagcgtaatcttcaggtatgacctggtttttgtattttagttgaaatgttctcatgtttatggaaggcagttttcttcattcagcaaatacaattgagcacacacttattggtatttagagaagtaatagagactaactccatttatgttttctacagcatcagtaaatatagcataagtaaaataagataccaatttattttataaacacagaaggaatttttagggttaaatgtatcacctcttaggtatcagtaatcctgagaaaaatgtgatgctataattttgttttactaaaaattgtcaatatttaaaccaaagaaaaggggctacattttaagagcaatgatctatagtaatacattaaagctccagggaacattagtggttaggttcaggtccttgctatgcaaatgaggaataaaacaggaaaggtttgactttcacctaaggaagtcaggtgacttcaggaactagactccaccttgccttgcttctggtggagttggcctctcctggaagagaaagtcaaagaaagatccagacatgagagaacatgctatagagttttaggggttcttcagatgtactcccagcatgcccttggggtggctatcatatttatgttgtgtaataacagaacttttctgttttaatggaggtgaaagctatcattttcttctttcatacaatacaactgaacttttcagcttaggtaattggaagttgttttttttcctttgtgaatgtatttatgattttatttacgagtggggaaatcaaattaactttacagaaatttgttctcatacagaccttgcatgaatgtacctgtataaagagccattattgctattggtagtgttttgcaaactagctttgacaatggcaacagaaaaccctagatgaatatctttggtctagttcaaagcttagaccaacagatgcattcattgaggaatgtcatgtatagtttttatatcatttgcattgtctcgggatcctaaccaaagataattggccttaagaaatatggaaagatattaaagtaaaaatattatgtgaaccatatgtgaaaatacttgtttttaaatcaaaaagtacgttaggtacctgcacttagaaagttaaagcaatttttgtcataattcgtgaaagaaatattttgattttaacaaacatagcttatatagaatttaatagatgagagatgaggtttcccggagaatataaacaaattcatatcaacttacaatacacaataaagtaaacattctgcattttaatttatttttgttctaaccactcaaatctaggataattttcaggaagacccaatccagatgtctatgatcatttacagctgtctgaaggaagaaaggaaaattctggaaaacgcccagagatttaatcaggtacttttttctcattgaacacataaactgtaataaaataaaaatgtattcattcatcaaatactattagggcccatgtcaaagcaatgatgaatatctctctaattttatagccccaagaagtgggagaatcagatttagagattttatagaaccaggctttaagaaagatcctaatctaatggaattaagttctaacgaggagagagaacatataaacaagatacttctgggtagcataaagtgctgagaagataacatgctgaattcatggagtggctgggagtggggttgttcctttagatcagggtcaggaaaggcctctgagttgctggcacaggaatggaagcaggcagatagagggttcttgcagctgtccaaggtagaggcagtggaagcttgcgctcagtagaatcagtggaggtaggaagaggtggacagattcaggttatgctttggatgtgataccaatatagaaggatccttatgttgaaggattagatgcaggagtgagagcagaaagtcaaggatggctctacagcagctactagaaccccttgaaaaatggtaatgctgtacacggagctgggaaggcaaggagggggcaggggcaggagttttgtaggactcaataggtttgtggagagaaaaggaggctgatgggaaaatcaagggctttgttttgagcaacatcaagatacctattaaatattcaaggcatcaaacagtaaatgagtcagagttgtactagtatcaagatttttgatcattgttttattaatcctaatacaaaccttcctagttgtcagggttcagcagagttttgaatttgctatggcatttagtattcctttcttgagcactggggtggtgacaacaagccaacaggcaggcagtgtgaagccaccatgttatggattgttctggaggagcccattgctatatggatgccagaggacacagtatgcatcctgtgtgcatttcaccaacaaataactaccgaagtgaactgtgtgacagtggagagggagggagtttaggtgtggtggaggatgccattctccacacactgcctgagcatttgtcccagtccttgtaatcctgtcacttccctaggcgtatagttcccatcttcttgtcacactgatagcatcttgctgaactgagcatgtaaagatacatattgcttattctaaactcaagctggctagctcatctggtacccagcctagggaacaaaggtgtatatcaacgctggaggagaagctggccaggttgtctcctctgaaagaggtgtgcctgtctctaacctggcatatacctgggagattttcagccggcagttttgattatatggggcttccatcctaaaagtagtatgcgtgggcctcctctgtatttctaatagacttgaaaggacagccaggagcaaagatgggcagaaggacaacctgtttcccccagctgcaagcatgtcatcctcacatttggccccttggcccagagatggcattggcagcagagtaggtgacccctgctctcccacatgaacctcatcccctggctttggatcttgaaggtttaccagcttttgagctccctccccattaaaaatgtaggtaatctggggattgttttgagcctctcagaggacacctgagtccgtgaacacctttgcaaagccttcttggggtgtgagggaagtttctgggtgtctggggatgtcagggaaagggaaaaggcacaataggtgcctcctttccaaagttatccagccaactattggctaggtaggtcagaaacatttcttcaccatttccccccttgttgaagtaactttattttattaatacagacatgcatcacttaatgacacagatacattctgagaaatgcaccactaggtgatcgcgtttttgtgcaaacattatagagtgcacttacacaaacccaggtggtataacctaccatacacctacactatatggtaaagcctattgctcctaggctacaaacctgtacaatatgaagttgtactgaacgctatgggcaattgtaacacaatgttatttgtgtatctaaacatagaaaaggtacagtacagatagtgtgtaaaagataaaaggtggtacccccataaagctccattctaatcttatggggccactgtcatatacgcggtccatcgttgactgaaccattgttatgtggtacatgactgtgtatattctattcatgctaaagtatatgtgtatggaatggtgtgatgtctggtatttgcttcaaataatcccatttggggactagaagagtaaggagaatagggatgaaacaaggccatccatgaatgctaattgttgaaactgtgataggtacatggggattcaacagattcaacaagttaaaaacatgcaaaattccgagttagttcagatcatttagagaccacaaaattctatagacatgccgagatgggaaattattgttcccattgttttttaatataagagcttttagaaaatacatttaagagaatattatgctatacacactgtagtagactataaatgtttcgtgtgctgtcttacagcacactaagtttttttctttctttttttctttgtggtgaaaaagctagttgcatgtctagacaaaaatttaggtccatagggtctgaagggatggggagaatttctttcaggtgggagggaaagacatgaggtggattctaagcttcctttgctgttccatctttgtgttcttaaggactaatggttaccatatgctgagtgcttatcatgtttcaggccctgtgctaagcactttataaacattatttcatttgagtaaatactttcgaaactatcactgaagttaggtattcttatccccattttaaagatgagaaaactaaggtttagaggtcaggtacttcactcagagccacagagctaatgagaagtaggtttggaatttaaacccagtattgtccaactctaaaactagttcactggagaagtcacttttcagttttctaatctgtgggatgggatatgagggctttctggctggaacttctcacacccatggagtgcctattcccttacttggacaactgctcactccattggaaaggacccccttcctgagcagaagacttttctttgctctggggtctggagtaaccaagttcccatccaaacaaggtctctagaggtacagtagtgaaacgagaaagtaagagtcaatgacagccgaagtcccttccaacttcagtgtttgaaattcccgtggtttcagtactcctggtttcttagaaagttaaaaagttaaggactcactgtgaaagtggtatcagtactaaagtgtacaggagcagccaagcatctgcttagcagatgggggcagggtggagggaagcagggagggatgagtggaaggggtaagagagcaccaagggtttgagtgacttggagggactactgcccaagttggaagcaggagatttcttaggccctgccacagtcaccaggtttttccaccaagcatctcccagcaagtcagtagaaaggggatgtagaagctggggatgtagctgctgttttacagccattgtttatatccctgttctctaaaccgagccttggtcatttgggaggaggcctgggaagtcagaattctccagtggcctggtccctctctctaggtgtagtgtcccagctgttacaaagcccacaggacaccgtgcccacatcctgctggcttagaagttgtattagtctgttcttgcatggctataaagaaatacctgagactgggtaatttataagaaaagaggtttaattgacttatggttctgcaggctgttacaggaagcatggtgctggcatctgctcagtttctggggaggcctcaggaaacttacagtcatagcagcaggtgaaggggaagcacacatatcacatggccagagcaggaggaagcaggggagaggtgctccacacttaaccagatcttgtgagaactcgtgatcacaaggatagtaccaagaggatggtgctaaactattcatgagaaactgtccccgtgatccagtcaccttccaccaggccccacctccaacaatggggattacaattcatgagatttgggtggggacacagatccaaaccatgtcagaattagacaacagcaaagatttccctgcacaggcagaaagctgtatggaactcctcaaagtgacaacttattccaaccgcccagagaaaccccttttgtcactgagtgatatgtggcaccttggacttacagaggataccagtaacattcatgtatttctaatacacactttacagctgatacaattcacatgctttgaacttctgctgttggagaatatgtaacatgaaggaaaacttcctatgaagagagaataactttgatgacgtatgcctgataaagataaaacaaaaaattatggaccaattttacttatgagtatcaatataaaagtcctcaataagatattagggatcagaattaaatactacattaagaaaggacatgaccaaatatgatttattataggttacaagggtagtccatgactgggcaacctattaatgcaattcactaaattaatagctacaaggagaaaaaagcatttacttccttccacagaagctgaaaagatctaacagaattcaatactcattcctcataaaaacattgaataagataggaattgatgggtacctctttaacacaaaaaaatatatatatctccattctagagacagtatcttacctaactgggaaaactccagtaagtcagaaacacagcaaggatgctgtgtttccactgctatttagcatcgtattggtggtattggccaatgcaattagacaagagaaaaccattagaagcataagaattaaaaacaacatcataaagatgttagctctccctgagttaacttgtaattttaatgttattccaataaaaataccaacaagttgttttctggagctacacaaatttgttctgaaatttatgaaaaataaacatgcaagagtagcgaggcaacttctgaacaagtagagcaatgaaatgggactggccctactagacagactataaatcctctatagtcaaacatccttcaagggttcaggcttatgaataaaaaggccaatgggaaagaagagaaaaatctagaaggaaacccgtgtgcatatggaaattcatgtgataaagttggcagctcagagcactggggaaaataatggacttttcagtaaatgctgttaagacaaatggaaagctaactggaaaaaaagtgaaagcaaaaagtggacccatacttcactctgatcatgagaataaacaaatatatcagcgatctaaaagttaaaaagaaaaaaaggaaaccttgcaagtgctagggaaatgagtgaatgatgtaatgtcaatagggaaaggctttctaatataaggaaaattccagacatgaagaaaagatgatacaattgcacatataaaaacacccccgtagaatctgtgctgtatagggcactgtgtaagaaaggttgacaagcacagtttttgctgtgtgggggatttaactctaaaaaaataacatctttctagaatttaatctctatgagaacagggatcactggttaccactctaacacccgagcctagagcattgcctgacatttacttagtacctagtatgtgcagggtacatctggtgtatgaagcaagtagagaccctgtcacttctgagtgttctgattatcaaaaataggactgaatactcccaggcaagtctgggtttatattcattattgactttatagtagcagattttcattgatggccttaatggagtgatttcatatttcagtatacctctggatcacccggaattgtgttaaaatagggttttctgattgcctaatcatattagcccttgagattttccaacaagatcctaggtggtgagatgctgctggtctgaggaccacactttgaatcagaaagctttaagataaataaggactgagttaatgagagtaatcttgtgtatagtatctgagaaaccgtgaactaaattccagcgtggtaccatgcaactgtatgaattaatggaaactcccagaaatactgtttattttagacatgaattgagcctagtttttttgtaaccttgttaacagtttgccagcattttccagggccttgggaaaaatttcatattgacacataagcaggaagcctgtagtacatgtcagaagatctggaaggcaagtggggacttgactttggagtgtaaccagcaagtacacaccctgaagaaaacgatggctataatcatgcccttcccattacaggctcagtcggggaatattcagagcacagtgatgttagacaaacagaaagagcttgacagtaaagtcagaaatgtgaaggacaaggttatggtgagtattgagtaaacacatgcatttattctgaaactttctgtaggggaaaaaaggtttcaattgcttggggtgtaaacctcgtaactgagttcagtcttttaagtagttgggaagaaaaattttgcagaagtctcaagctataagtaaacaaattggcaaaatcaatgaccagatagactttttgaatggcctcttataactgccaaacattgagtttagctttttcttccctgaaagatcatgcagtaaatgttgactttgcccagtacccagtaaatgagatgttgctgctctaaatgggcctttatgtccacacctctcaaatcacagtgccccaggataaacatggcccatccttcccagtcatctgttttatcctaagacttggaagaggaacaaaaatacattttattgaaagaaatttggatacatttctgattaagacatccacagcaattttaggatacaacttccaagtcaatttatggaagcagagggctgctctggcgtcctcgatggtgcgcatttactcctctccactgttagggctggtgtggggagggtttgaggagttctttttcacagaggcctgtgtttgtggaaaaggccttccagcttaggggtttggtcctctgtggatctctgggtaatagcagtatggccttgacttacatgcttcagacagcatctttccaaactccacattctttggagcaacttcatcttgcggtctcctagggaaacatttcattaaagtagaaaccgagtgagcccagtccagaaatagccatggaaatccagagaagaatatgtggaaatgtgaccaaatcccaaacaaatgaggcttatttgtagaatgaacatacaatttattgtccagatggagatgcatttgagccgccaagagggcactgtttataattacagcaagtatgaaaccaggtctatcccggtaaagcagggatgtatggtcacttttcttacttggaaggaatgaggaaattttctgtgagctttttccccgcctgctgtgggcttcacagtggagttcttaaatcatatctcagaggtagtctcaaaaatgatgaggaagaatcaaaatttaggcgctggaaccaggttaaggacatacaaatcagtttgagaattattgtacgtttgcttttttaaaaatgttatgacatacttattaatgaaaccgaaattatttcatgtatatgattagaactgtccaagtcagatctctttttgggggagatggaattgttttcgtgtttctctgggttccatagaagcaatactctgttgcctaaagtctttggaagttgctgatcagtagaaaacatgtttacatctttgtttgtagtgtatagagcatgaaatcaagagcctggaagatttacaagatgaatatgacttcaaatgcaaaaccttgcagaacagaggtaagggttcacaactgaagtggtgcccgttggctgcaattttttctgttcacactagataacgaagatgattactcctttctatttgccgagtattttatgactctgaattcttccttgataacccaggccagggcttctcaacatccaatattattgacatttcgggctaatttgttgttggggctgtcctggcattgtagcgtgtttaacagcatccccgacttttacccaccagatgccagtagcactacccaggagccctcactagtgacaaccaaaactgtctccagagattgccaaaagtcccctaggggtcagtgacccctacttgataaccactggttatgtgttactcaccatatttattgcgcctagcccactgactgacacagagcgatagatatgtggagttcccctgccctaatatctcaggtttcttcaaacgttgcagggccacgtgtatacacagcagataagctcagtatttttctcatgttttaaagcagttttactgtattttcttactgttgcgtgtttttaatgagagtagcaacagaaaagatctcaagaatgtacattgtgtaggacacgtagggtactgctgttactctattcatcatctggggtataccatggttcataggcagagattatcagtatgatttgggtagaaagtataagagacagcaacttcaactaccacttcctactcatctacttctctttgaaagctacagctatgctttgtatacattttttatctgaattctgttcagataaaacattttattatttacatttatttttataataataataacattattattaatgttatttacatttatttaggtaattacctgacagtgtcttaagtggcagatactactatgtctgatttacatgggtcactgaaaacaagttttttttgttttttttttgttttttttgtttttttttggagacggagtctcgctctgtcgcccaggctagagtgcagtggcgagatctcggctcactccaagctccgcctcccgggttcatgctgttctcctgcctcagcctcccgagtagctgggactacaggcgtctgccactgcgcccggctaatttttgaaaacaagtattttgtttcagtgtgtctagttgttatacttaggactttttttcatgttcattaaagatcgaagaaagccaaactttgacctgtcactaggcagcatttgtgtcatatttatcctaaatttatatgaatcttggcttttgttggttttgtcttctttatatatttactggctgtctctcaatttatagaacacgagaccaatggtgtggcaaagagtgatcagaaacaagaacagctgttactcaagaagatgtatttaatgcttgacaataagagaaaggtagttatttactttccagaatagcatgccacttttgttatacactgtaaataatggactcaaagtttagaagagaggaaaaattatagccacctggcttagagccccagttgagaatgaaatgatatttgcttttcttttaaaaaatattttaaaattcagtgattaaaaatgaatttatttcactttgtttcttctattgcctttaggaagtagttcacaaaataatagagttgctgaatgtcactgaacttacccagaatgccctgattaatgatgaactagtggagtggaagcggagacagcagagcgcctgtattggggggccgcccaatgcttgcttggatcagctgcagaactggtaagattctccaaagcagaaaactggcagctgactggctaaccacataaacacataaatgtacctttgagctgtgttagttgaatggaccctgtcaaaacattagtatagagtttgacatagtccagcttctgcttaccctggaaacactcccttggaaagcacagtgttattcatgactctcgccacgttcagccacgtctgcttggtttggagcactcctgtaccatggggtgtcgtttgactgtacaaaacatcagtgacatggtcgttatagaacacatttaatgacttgactcttaatgtttccttaaaaacaagatagcttgaggcatttttctaggcttacagaatagttttttaggaaacattcagtcatccatccagtaatacttattaaatgcctactgtgtgccgggcactgtaggacctgggcacacaaggatgagtgattcttggcccttgccaacaaggagttctcagtgtggagggggggatgtagacatggtaataattcgtgtggtaaaagtatccaggtgctctagcaaaaggccatcagaattctgtggaggacaaaggaaagcatctccagggaaggtttcatagaggaagtggccttgtgctgactcaaaagtcactaggattactccacgtagatcaaggggaagtgctttccagcacagagcacagcgtgtgcaaaggcacacatgtgggagactgcaggggctgtattgggtggctggagagtggggtgtccagggagatgggaaggaaagtggacccggtgggagatgctggagcctgatggtgcaggttctcagcaccatgctgggaatgggggatgtacgcagctgtactgctgagccaaggcaggcttttttcttaagcaggagatgtatttctctgatctttgatttagaaagggcactctggccacagcctggaggataggatagagacagaaagaccagttggaatactattagcatattagtgtggtccaggtgaggggcaacaggagctgaacttggaatcacagagtgaacatgagggaaggtggcctgggacaattgctaagggtccaaggaccagagatctcacgaggttattttctatattgccagtttttaaaaaaatcacaattaatattcagccatttatttttgttctgtgaattgcctgtaggtaccccagatttcttgtgggttagagcagagcttctgagcccagtgcaccccatgtgccttgagggatacatacaaccctaaagcccttcaggtggccagggaggccctggggtgtttagagccccctagtggtcctcctagaccacaggagcctcttgtagggacacacatgccctctagttttcccactgtgctgtcattttctctgtgtgcaagcagagttggggacactggtttagcttctccgctggaactcagccagccgttatcctgccttctcctttcctgacgaagggctgctgtcccagggctttgaactggaatcgagcaaaatcagaaagtgaagtagatacttttcccagggaagaagacacttttaaaaggttttcttctgtcattactgcaagtgaataaaacagcgtttccccagcctgtgttgctgttagcagttgactgcaaggaaggaagactaagagcaatcactgggtttactcattggctttttatgtttagggtctagactgagcatactgccttctcctttcagttgagtgaaaccagaatcatcattccttcctctcttcctgtccccggccttgtctcccatctctgtctctcctcctgcccctctgccccacatctctgactggtcctgccgagacactgcttgctgatgccactctcttgacagaacctgcagtggctctttgctgcctcttgcatcacctggaagcacctgctttgctgttttccctgcctctggcctcctctttgccctgcaccagtcacagatcacctagaagccctgcctccacccatctctcctcacataggcctcagtggtgtgtagaagtttttgatgtaggctgtaatcattcagtgcatgttagttgtactcctcaaataacaaagcttctactgctggcacaagcctcgttccctttgtttttccctagagggcagagcatggcatcctaggtgacattttgtgttgcatataaccacttgttggtttccatgccatatggtttggccgtgtccccacccaaatctcaccttgaattgtaataatccccatgtgtcaagggcagggccaggtggagataattgaatcatgggggtggttcccccaatactgttctcatggtagtgagtaagtctcacgagatctgatggttttataagtgggaatttccctccacaaactctcttgcctgccaccatgtaagatgtgactttgctcctcatttgccttctgccatgattgtggggcctcctcagccatgtggaactatgtgtcaattaaacctctttcctttataaattctccagtctcgagtatgtctttattagcagcatgagaatggactaatataccatgattccctttaatccaggctgcttctggactgtttctcatagagacatctgtgtcttgtgtcttcccaggttcactatagttgcggagagtctgcagcaagttcggcagcagcttaaaaagttggaggaattggaacagaaatacacctacgaacatgaccctatcacaaaaaacaaacaagtgttatgggaccgcaccttcagtcttttccagcagctcattcagaggtaactcaagggacatttatttgtaccttctgtaatcggtctatacagaggaacattttaccgttaattcagatgatttacaagggtttaataggtgttttttatatatatatatatatatatatatatatattttttttttttttgagatagagtctcacctatcacccaggctagagtgcagtggcgtgatcttggctcactgcaacctccacctcccaagttcaagcaatcctcctgcctcagcctcccaagtagctgggactacaggcgcatgccaccccacctggctaattttttttagtagagactgggtttcgccatgttggccaggctggtctccaactcctgaactcaggtgatctgccctcctcggcctcccaaagtgctgggattacaggcgtgagccactgtgcctggcctcaaattttttaatgacaatgactcttcctgaattatttggttataccagtggttcttcactcttgtggccagctaggctggaagctatagtaaccttccactcctccttcccctttggctgagtctccgccgtgaccctaacatgcctcacctcctcctctcccctcctcatgtctcaggctctcaaatcctcctttctggactcttccccagcctccccaccagtcctccttcccagtccttcctccctgtgaccagtgctgtcccagagcagagttccattctggttcctcatcacctgctgatccaagtgaatgcccagctgggcattcacggccccccttctgcagcctggacctagctgaacactccacgcttcacgtccacacacgcccctttctaggcaaacttgacctcttgctgattcctataggggccatgccgcatacttgcttttctgtggctctcctgaggatacttcctcttcctcagagccttcttttcatgtacctgctttcaaaattgtatcatcccgaaagcttcaccttgtatctcatcatttaatcttcccagatttcccaaacagatgttatctcccttcgtggcctacagtcacccttcgttcctttcctactctgccttttgttatatagttgttatgtatttctttatatttcttgaatatcataaagttctggaaggcagagacatgcctttgtcacccttttcccccagcaggacctagcgcagtgccttgtgaacagtaggctctctagacacacttagtagatagataaatgtcactgagtggaaaagaagggttcatattgcaagtttttttttttttaatgcaaacttgacatgataaaaatgtacttgattttgggtggaagcaatagctgagtggcagcggctgctgattgcgttccagggggcagagtcggggaagacatttactctcccagaacagcctatctcattcctttccttcagttacccgtggtgcagagagtcagggcagcagctgtagcagcaagggtggccgtggcagcggtggcagctacagtgacatgtccagcatgaatcccaaattgattatttattcaaattacttctgattggcgactctggggttggaaagtcttgcctccttcttaggtttgcagatgataacatatacagaaagctacatcagcacaattggtatggatttcaaaataagaactatagagttagacgggaaaacaatcaagcttcaaatatggaacacagcagaacaggaaaggtttcgaacagtcatctccagttattacagaggagccaatggcatcctagtggtgtatgatgtgacagatcaggagtccttcaataatattaaacagtgactgcagaaaatagatcattatcccagtgaaaacgtcaacaaattgttggtagggaacaagtgtgatctgaccacagagaaagtagtagactacacaacagccaaggaatttgctgattcccttggaattctgtttttggaaactagtgctaggaatgcaacaaggcccggcacggtggctcatgcctgtaatcccagcactttgggaggccgaggtgggtggatcacctgaggtcaggagttcgagagcagcctggccaacatgatgaaaccccatccctactaaaaatacaaaaattagccaggcatggtggcgggcgcctgtaatcccagctacttgggaggctgaggcaggagaattgctcgaacccaggtggcggaggttgcagtgagccgagattgcgccattgctctccagcctaggagacggagcaagactctgtctcaaaaaaaaaaaaaagaaagaatgcaatgaatgtagaactgtgttccatgatgatggcagctgagattaagaagctaatgggtcctggagcaacagctggtggtgctgagaagtccagtgttaaaattcagagcactctggtcaagcagtcaggtggaggttcctgctaaaatttgcctccatccttttctcacagtaataaatttgcaatctgaacccaagtgaagaaacaaaattgcctgaattgtactgtatgtagctgcactacaacagattcttaccatatccacagaggtcagagattgtaaatggtcaatactgactttttttttttattctcttgactcaagacagctaacttcattttcagaactgtcttaaacctttgtgtgctggtttataaaataatgtattttcctgatatcagactgttttctcgtggttggttagaatatattttgttttgatgtttatattggtgtgtttagatgtcaggtatagtcttctgaagatgaagttcagccattttatatcaaacagcacaagcagtgtctgtcactttccatgcgtaaagtttagtgagatgttatatgtaagatctgatttgctagttcttccttgtagagttataaatggaaagattacactgtctgattaatagcttcttcatactctgcatataatttgtggctgcagaatattgtaatttgttgcatactatgtaacaaaacaactgaagatatgtttaataaatatcgtacttattggaagtaatatttaaaaaaatgtacttggttccctatggctaatgttcaaacaagaagtcctgtatgttgggttttttaaaatttaaaaacattacttgtactttgagtgcacattttattcttaattctgacatgtaaatgaacataattaaatacggggtttttattttttattttggatttttgagacagggcctcactctgtcatccagactggagtgcagtggtgtgatcatggctcacttcagcctcaacctcctgggctcaagtgatcttcccacttcaaccctccagtagttgggactaattagccacgcctggctaattaaaaaaaaaaaaacaaattgtaaagatacggtctcactatgttgcctgagctggtcttgaactcctgggctcaagcaatcttcacacctcagcctcttaaagtgctgggattacagacatgggccactgtgcctagccttcattgtatgtttgtttcaatgtaatagtttcacagatcattacagttattctgtttctgttaagtccctattaggttttgggatttctttactaattagaaaatatcactttgttcatccaacttgtcagaatctttcaaatgattttttagatcgtactctctaacccccttttttctttcaggaaaatcattgtgattgcctcaaccttaatggaaatgctaacttatctatcctttgctgggtatttgcagctcgtttgtggtggaaagacagccctgcatgccaacgcaccctcagaggccgctggtcttgaagacaggggtccagttcactgtgaagttgaggtaacaagggaaagatggcatcccatacatcacctgtcacgtagtttgtacccctagtttccttttataaaaactgttatatagggtgcttttgaggaaataatttttcagggggcactttaatatgaactcttactgagaatatctgagagtcttttattaatatattcatagtagaaatgtaactgatatacatatatgtacacactcctggtttttttccaatcataaatgtaatgcgtgttcacaggaaaacagaattccaaattgcagaaatgtgtgtaatagagagtaaaagttcctggctgcctcacccctcttgggcataggctcataacctgagccttatgaaccccagaagctgtatgaatgtggatttataacatgtacatttttctgatggatggatttatagctttcatcagtttctcaaagcagtccgtgatataaatatctgtggaccaccacagtaaatggcctagtgtctgtcctcccaggattttgtccatgtctacacaaatatatatttcatacggaaacacacacgcacaaacatgacataatgtttcctttttaaaaaattaggattccatgtctacacaaatatttcatatagagacacacacacacacaaatatgacatatttcttttttaaaaactcggagtaggctacatacattgttttgtagtctttctcctcgatactaattgtagaagtgtttccaggaatatgtggctttactttcttccattgaatggctgcattgctttaagcattcttcttatgatgagtagctagacgctgaagaactggactggccttcatagttggcccgggtcctttttctggggtgttgctgatttaagtctgtggttaaccctccctggctggtaggtacaatgtcacactgaagccctcgtggaattttagaactcagcagctggaagggacagtagaaatctgatcccatccacctgctccactgaacggagcagacagagccccggggtctccttctcaaagtctccagctcagtggagcagaggtacaccctctcacctgccctccatctttccatgctaccctggggtgactatagatgggacgctattttttctgcttatgggcaatagtttttattgtctcccaacaggacaaagattagatacaagttttaatagaaagtaatgtttgctattttacccatataaattggccaaaggtcgaaattgtgatgaaactgaatattggcaaggttatagaggtaaacagctaccctcattaacttttggtggcaatgtaaaatcagggcggcatcctgtcagaattagtgttacaatttttcctaagcggttccacagctaggaatttattcttacaaatacacttacaaaaatttaagtagatctacaaaactgtcagtttttttgttggtaataccctaaaactggagggggagtagtttatctaaacgttaatagggaattggcataataaataaattgtaacagataattttttttaagtaatggcttttatttttctttccagactgttggtgaaattgcaagagctgaattataatttgaaagtcaaagtcttatttgataagtaagatatctttaacattatataacatacatgtactattgaaatgttgattttgttactcaagcacagattcctccactaaataagcagatttctagctgtggaagggtctatactgggtggaagtttgcctccctagggccccagggctgaacccagagtcctgacaatgctgcgcatgagcagagacttctagtcagatccaccagggccatcacaaatgaccccagcagatttaaatcagcagctcccttggtggatgttgggagcttcccctggagctggtatcaacattcctgtgcctttttagactataaatgaacaaaagagtgagtgtctctttgtgcatatgagattgtaatcagcaagtctcaaagtggctggacttggcatgccaccccctccttctaggtcagccccaaaggagaggcccctgatccaacccgaggctgaacgtccaggctgccatgattctgtggtcatttgggggtttttttctggagcgaggtcagcagcatcttggggagactgtgtggagcctgtgggattcactcttgtctcttctgggcagtgggaacccaggaatgggcatctctcttgggggtccaggtggagcagcctcatcctattttgccctgagaccctagacctggactggcactaacttggccactctcattaaggaacaagatggctccccccccacccctcccatatttaatgtttttgttagcttgtgtcacatactgttttggcaagtttcaaaaatgatttatgatcattcagatcattttcctctggctttttgctttttcccactcctataagaatattcttcctcatagcatggtctgtgccttgtcttccctgccatcatctttggtatatcggttagcttttgcttcctaacaaaccactcccaaaacttagtggctaggccaggtgcagtggctcacacctgtaatcccagcactttgggaggccaaggcaggcagatcacatgaagccagagtttgagaccggcctggccaacatggcgaaaccccgtctctacgaaaaatacaaaaaattagccaggtgtggtggtgtgcaccggtaatcacagctacttgggaggccgaggcacgagaatcgcttgaacctgggaggcagaggttgcagtgagctgagatcatgccactgcactccagcctgggtgacagagtgagactctgtctaaaaacaaacaaacaaaaacttagtggctaaaaactcaaaaactcattatttctcatattctgtgagttgtaggttgtcctggtctgagctagtgtggttggagccaggtgctctagcaaggccttattacatgactgggactcagctgggataaccaggtccttcttcatgcacctcaaaaaggctagcctgggcttttcccatggtgacagtgttccaagtgaacaaggcctgtgagtgctagccttggaacatctatagcatcactcccttccatcctgttgctaaaagcaaatcaaggccagctgagattcgggggatggggaagtatatcctacttcctaaacggaggaagcacaagagttgtgttgccattgcagtttaccatcttctgcgtcagctcagctcctctcagctgcttcgggcccttgtgtcttttctgtcggttccagctctgacggtcttcttagctttgacaagtcagcttttatcatactatcccttttattttaaattctttttttttccaaacgggaaaataggtcccttccatagctaatggtgattgtcattcacaaaagcattgaacttctggttgagattggaaaggaaggggaactaatagatctgtgagtgagcccatgatttctagtctacatctaggacgctcacggatacattatttggccagaacatgacaaagtaatcactggatatagaagtgcaaggtctttcaaaattttaacctcagacttaaaacttaaacttgccactttccccagataactgactttcctggtactttcatgagagcattaaagatcatagagaataaaaatgagaattaaatggtcacattggcagtcctctgagctttgtgactactgggcagtgctgttggctggatccccagtgcttagtgcagggccttgcaccaagtagctgctcaataaacaataacgatagcttaaacatttattgagggtgtactggtgctggtgcttacatttattgagggtgtactggtgaggaattaactagtttattcctcatgatgtcctatatgttggcactgttagtatgttgtgcaaatgaacaatgtaaggcccagaccatttatttgccaaaggtcattcagtgatacttgccagacctagtatgggtagatggaagcagggagtgaatgaaaggctgcaaatccataggtgtagatttattttttattcatcattcacttacactcttatgctcttatactcttataattttgttaaagcttatttcaaattttaaatacgcatatgtgattatatatattttttttgcagagatgtgaatgagagaaatacagtaaaagggtacgtgacgtactttacgctatactgtgctatatttttatttatttaatagttggaagacttttcagcatttctttcctatattgtatagatttaggaagttcaacattttgggcacgcacacaaaagtgatgaacatggaggagtccaccaatggcagtctggcggctgaatttcggcacctggtagggacatcagtttcctctctatgttgtctctggtttcttaggacttttgacaatagagcagccctttttggcacattgccatgtggaggacgcccccctgctggggtttgtagactttgtggctggtgtcttcctgtcgccagtacttggggcattttggtttctcctccttatcccacgactgttcactctgttttctgggctgtatcacttgcagtaaaaatatttcctaagcctgtgtttacgtaaatgatttgcacttgctgcctgcatgatccccacggtcactcacctacgcttgcagttttctcaaaggttatggctcccgtgtcctgactgtgatccaagtgtggtcctgtacaccagggttcactcctcagcccccgtgttccccttcctggtggccctgcccacagcccctgcctccacgccagcctgactctaccaccttttctccagggcagtagggctcattccccaggcagtggagacccagcaggatgctctgtgtgggtgcaccatctttcctcctctgtgaacatgggggctgccagttgctgtgaggctctgtgggtgctgagtccgaagctttccctgggcccagaacctgcaggaggttaaaggcatcctttttcactagagaccactttgtgatccagcaagcctcgtagctaggaagctctacctaactcgaaagcttagcccaactcaggtgcctgagggtattcagagccgccctcagggccccagcctgctccctcgtcagctcagggattgacagctcagagattgacgtccacttgagggcaggtggacctggagtcactgggcccagcctggaggactctgctgagggaaaggggagggagaagctgtcccgagcctcagggcatgaaacagttaacgaaggtgcatggggaaacattcagggaaagtttgaacacaggagaggagcgggttgtgattccaagagatccctccagactggtgtccgcaccatgaggccactgaggaaacgtgcttctgctcatggaccctgaacgagggccaatttgtcccatgttctgcattctaaagataaagtcacgtctgtcattctttctagtcctaactttgttctcatttgtaaatgaagatagcaactttgaccattaccatggtgtttactaagatgattatttgttttatagcaattgaaagaacagaaaaatgctggcaccagaacgaatgaggtgagagtccctttatgttgtgaatgggcccaaatcaggcaggtctgtctagcaaggacaggtcagttggtggctggggacacctcacagaggagttcagacccatcagggaagagcagcaaaggagctgggtatttggtatatctgtgacaacagtaaaaacaccacatttgtgctttactattgtcaaacgattttgcacacaaattcattagacactcatggacaactcagtggagtagctgttgtgggcttttgtattcttcgcatcttacgggtgaagaaattgactcacagaagtttgcaggatttagctaagggtgcacagagttactgtcagagttggaacgagaggccactttgatgactgccttgctgtgtgccaagagggcttttcggccattgcatcccctaccaaaagcattgcctttgcatcagtttccttcctacagcgtgatccttaaggagttgggtttgtgatgcattcagaaatgaactatggacaaaggatgaaatatctggagttgttttggttgagaacactttcgtcatttatgcacacacagtgtgcagtccttccacaccaggaccagtggaggtcacatggagcagcgggacaaacacaggcccaggcagtgcaaagatgccttctagccctggtgtgcgcctgaactatgttttgacctccctgggtctagctgttgcacctctctagttctaagttgtgaggctcacatgaggtaatgcttatgaaggcactttgaaatctatccatttctaccgaaaccaagacaacttgtgacctgccaagttgatgtgagtcagcccttccggtaggcagtagacaatcacaagtatgcacttactcccagtcctctcaccttctccccacccatctgcattgagatgtgcagccacactgggcaggcagacagagctgagggtcgagaagccttaggtcacaaagccattagttgctctttccccattgacaatcattgctctgaatctataacccttgccgtaacttcagacacttatctttcagagcacactgagatactaagaatcattaaatctgggagagattgaatattgagtcttcagacttgccactgattgggcccaggatctctgtggcctgttgcaatgttaattgggcttttgaaagttttaggatctgtgaataattatattcttttcttctttccttttctcttccaagggtcctctcatcgttactgaagagcttcactcccttagttttgaaacccaattgtgccagcctggtttggtaattgacctcgaggtaagacttttatggtcccgagttggaaaacttcattatttttacttttaattgttacatgtatttttatttctcagtgtttgttctggaggtatttacctaattgttttaaaatgatctttttcagctaatactatcttaaccttaatttatggtccagaaagctagacaattgaattaaccttcaaattcaataacttaaaagttccagttgagatcgctgatgttaattttttttttttacattaagcattgggacttatttattttgctctgccctccccccacattttatgttttcattgtgacagttttcatcttctcatattgcatatcccttaattaattattgtagctattattatttttagggacttatttcttaactgaaagatacatcaaagacaagttaaactggacagaagaacagaacttaacacttctcattttcaagtattaaatatgtacaaatttacaaataatcccctgcttttagttgaggctaagcagttatctgaaggtgacatttctgtgattcagatgatttcaaggtctttgtcatcctttagacgacctctctgcccgttgtggtgatctccaacgtcagccagctcccgagcggttgggcctccatcctttggtacaacatgctggtggcggaacccagggtatggaaaacacatttgctttggtcccagggttaagcagagaccccacgctctcactgctgcatctctgaaatagccccaatggccagttgttaagggagaagtgacaaagctcctgtggtatttctaaggcttttgagtaaatctgggaatatgaagcatggatatgtatttgaaatgagaattacgttttttctcccatgtgggtaagctagggcagtcagtgattccataccactttattgttattatttttaaaatgtatacatctactaaacaagcatgctccattcttagagtgtggatactcactgttaattaattacagtcatttataattattcaaagtacttatgttttttaaagtcaccaggaacacttaactagcaaataatgaattgttgctcctaagggaactacgaggctaggttccttcaagcctctggtcacaacatttttgtcaacccatcaatgcataacattgtttatgtgtgtttctgtttaaagacaccttatctaatacacttgttgaggcattaacattacacctatagctaggatcactgtaactcatgcctgagtgaagcttgcctcacacatgtattttctccataaggcacatcccagccttcccatgcttaggaacagtagaccacactgtggtactatgctcgggcaccattttaaacagggatcaccaacagcagtcacaaaatgcaaaaaacatggcgctaaataggcttcaaaaaggacacgtttttcttatgagaggtgaaacaggaagcgagtgtcattttgtttggcttcagttggaagcgtgttaagagactcgaattctttgctgctgtgtgctgctgtgtgtgcacgggtgtgtcttcaaatgaccccaaagatgccatgtatttagattttggagttacaagtaaattttagtgagtaaacaagttcacaaatgtgcatctgtaaataatgaaaattgactgtatttctcttcccctactgtgaaagcacctgtgtgtcatataaactagaattgaactttgggatggacatatgttttagtgccacacttgtgactggtgtctctgtagtaacccttagattttgggtgttttctctctagaatctgtccttcttcctgactccaccatgtgcacgatgggctcagctttcagaagtgctgagttggcagttttcttctgtcaccaaaagaggtctcaatgtggaccagctgaacatgttgggagagaagcttcttggtatatgcatattaacttgttatgtttataaaaattgaaattcataaaaatatctctctaattgctcttttcccctctgctattttgttaaaggtaaaaaagtactaaaatctgtcagcttttcaagctatagtttattatagctaagtgagaatcatatgtcaccttagaaagaaatatagacctgataacatttaaatgaatccgttcctcattgtctcatattaagatttctgagatgaattcccaagggaaagttttatgaattatgtaaaatatattatttgtggctgaaataagttcctggatgagaaagatgaaggcctattaaccattaaccttggggagaaaaaaggaagtccctgacatgatgagaaataaagtcctggggcttgcccactgcagcataaacccagggcccttgcctcaggtggggcccaggtagcagaggatgccgtccccacaagaggatgcctcttttgatctgcagttttgcctgattggacagagtctagacagtggtagataattccctttcagtggttaatgtcagtgcatttattagtccttcatactaaacaaatcaaagatccactagtctcaaggtcagatctttcagtgagtgaggctatctgaactatttctttaaaaatccgtggacaacttgtatccagatttgctttctgtagagcagcactgcatttactccaaacagcagtaggctcttcctaactcagtgactttcaacagtgccttcttctcttggatatgcagctgtcacagtggtggtcttgtgctgtttaatacaagtacaaaatccccttattccatttctttatttggtgagagttaagaaggatatcttttctagctgtaatggctcatttgtagttctctttgaagaccgataatgggcttaccgcctcttctcgcccaggctgctttaatttgtgtagctaataaccccgggcttcttcctctcgtttctctcacttggtttttgatttgcatcagactgcctgagcccatgtcctatttggaggaaagctgagggaaatgcataaataatgtctaaaataaacttgtaaagtcaagtatcagttacattgaagatctaggggtgatcttgggcacctaggttgaactttgaaaaaaattctgtaggatccttgggagagggggctctgctgagcagcagaggaaggcagtgggaagaggcactggatagggaggcttctctaggaggcccagcagaacacctttgatttagtgcaaaaggcaaagtcagctgatggtcttggaaggaagtgtaacatgaagaggcattaaaaggactgtcctctctttagaggagggagggaaaaggggggctggggagggagagagcagatggtaaggctttgtgatgtttccgctttccctaaaaactctcatatcgtggtgcccaggaatctgccatccattcctttctgccattaaactcaaaccaacatatacatattttagaccatttaaattccgccctcttacagcacgtattataattgctcagttaatttggcattaaggtatccgaaaatgtcaactgtgtacatacaatctttgttgggtgtttggctcttttccttgagagcaaatacaagagccatccgtccaaccaaagctttagaatcagtttctgtttgctgaaaaatctggtttttatttgtttaggtcctaacgccagccccgatggtctcattccgtggacgaggttttgtaaggtgaggactgtctgggttttatgctctctaagtcctttttgctcttggttgaggttctcatgtttcttgctgtgatagttacttaactgtttgcttattttggcgtgttcttctctggccaaggagcccctcgggcaagttgtttacttttcttcagtgcaggaggttggtctccgagcaggagtctgacaggaagcacctgcctgagtgataacattctttcatatctgaaatgaggcttctgttcactcacgctggacccctgcccagcagtgttttagccatttctgtgtgaaatgtatgttgtgggctgggtggcgcagcctgaccagccagacgagtttaacggcctgctcgagcagaggggcccactgcggggaacatttagattctgctggagtcaccagacagtgcggaccagcttgcactgctggattttgctagtgtggggcagcttgtgtttccgtgagtcacgctggaggtcacccccaggctagcttgctactgtttggaaagggaagcagagcccggcccagggaagtggagagctctggagagctcctggtctgaatgctgataagagcggggagggaacttgatattccctgccaggggagggatcccattgctgtgctgaatgggacagttccatccttggcacctggggagtctttgcaaatgatggtgggaggggccatggtaagtcattgttttagatttttgttcataatgtctgcatttgtatactttcaggaaaatataaatgataaaaattttcccttctggctttggattgaaagcatcctagaactcattaaaaaacacctgctccctctctggaatgatgggtaagggccaccgatagatgtattttgaaacatatttttagtgctgcgaggttgagacaaggcctgagtccagcttcagtatttgactaggcgtgtgtgaatctcacaggagtgcgcatttataggctgccccttcagggcttcagaagagtagaacctcataacattaaccttacactttcttagtacaagtatatgtattggcaaagctaaattaaaaaaaaaaaacaactcttgagtgccattcatgcattcattcactcaacaaaaattttttgagcacctactatgtggcccctaggaaggaagaaaaacccttttaactgggtaaatcatttctatcttgacttattgccaggatcggctgatatttcaacagaagctttaacttgatcagaagggctaaaatatgaaaatatattgcctaggtcttcctctccagtaaaaaagatgtatacattcagacattgttatggcctttaaaataataaaggaacaataaaaggctcattaatcccacacgtgttattgagcatctgtagcatcctactgacaccatgttcatatcgctttttttaaaaccttagtatatacatgtataagtgaaatgcttccttaagtgtcaactgaacagattttaaaatagtctacgttttttaccgtaggttttttttctcacattccagccattttcttggtttgtaagttagcatgaaaatggaaatcatgattgaactaaaagcccatccgtccatctcttcgatatccaggtgcatcatgggcttcatcagcaaggagcgagagcgtgccctgttgaaggaccagcagccggggaccttcctgctgcggttcagtgagagctcccgggaaggggccatcacattcacatgggtggagcggtcccagaacggaggcggtgagtgggagtttgagcacatagtcccaccattccatgtgtgtgaagtccctcttcatcgccgccagtcagctcatacagatagtgcgtttgggacatgaaattgcagatcttatacttaccccaaatgagcccccgataggatttaataaaccaccacaaatgtttgtggttgtggttcactctctggaacatattgtggaaatgatggttttgaaaagacaatgccaattctttcctttgcatcaggtttgttatctgcagatcaaggatgtgagtcaatgtaatctgcaacccgttcttggaaggaatcacatttcccacaggagtaagcatccacattctcttagggtcatcccagagtagagtgtgcagatgagacaggcttcgggagaagacttcatacacatcatcagccagggagttgatgcaggacctgttgggacgagtggcagcctctaccctgccttcaaacagagcagctgcaaatttatctttatcatatatggggtttctatttaatcaaatgagtccatggctaaaagactccagaaaccttggtgttatgaagcaggtttctgagggtgaagctcaacagcgtaaatgaaaaaatcataaagaccaactgattacttttcactgttgtttagagtttggtctgtttgaagggcaggaggaaaaactgatttgttttagtaatttttatactttcagtgggtagacacaaaatggaatactcttcttgttctatttatttttctgaaatattcctcttctcctgtttttctggaatactcttattctatttgtttttctgccatactcttcttgttctgtttgtttttctggaatactcttctattttttttttctggaacggtattctttcttgttctgtttatttttcaggaatactcttcttgttctatttgtttttctggaatacttttcttgttctatttttcttctgaggaaaaagcagggaggctgagatgagagtctggcgtgggcagtagtcattagaacctgcccttttcctcttatcctgttcccttcctgaaccagctgagagacagatatagtagaccaagcagagatgaagaaaacccttggcaaccaggaaaggtcaagcaggacactaccagccaggaagggttaggatggcagcatagtctcatgttccacagcaggctccccagaacacctgaaccgtggcctctggaaggtcgacacccaaagggagattctgtatcagctaggaagaaggatctgaattcagtctgggaataagaacgggagtaaattaaaccatggtttattacgttaagggttacagggaaatgtagcaaataggatcatttttaatttgaaatgttgttttctatatatcataatttattttaataaaaaattagatttttcaatatgaaaagaaaaacaaagtgagtttatctctagtaatttaaatctgtggcttaagccaagatgatccacttagtagtaagttatttatgtgcctatgggcagcacatcattgaagatgcaggcttttaaaggtttttaataaatcttttttgcccagatttataaatctaagcaaataatggcaaatagaatgttattgagaataatacctccctttattttccctgagacagtattataatttatttagaaataaagcagtctactgtatatgttataatgcttagattgtgattagttcttatgaggttcactcaaatccatcaactctgcagtgttttatttctctgtcctctttcattttgggatgttctatgggatttacttagcttttctcctttttagaacctgacttccatgcggttgaaccctacacgaagaaagaactttctgctgttactttccctgacatcattcgcaattacaaagtcatggctgctgagaatattcctgagaatcccctgaagtatctgtatccaaatattgacaaagaccatgcctttggaaagtattactccaggccaaaggaaggtaagtggggcaagcaggtggtaacagcgtggcacagtctttcctgatgagggggtgattattctgaaactccacccatgcagtgttttgctttcgaattggtaagagtaggctttcaaaagatggcataaactcagtgcaggtgaaacataatgcattatttggcctgatacagctagtaagaaatgaatggacaatttcctattttaggaatgttggaaaagtccattgctggtcttgtgtatttgttactatcactgtttccacatgaaaagggtttaaataaggaactgtggtaaaccaacagaaggcatcttgctcacgttaaagttgaggaaactgaggcctgggagaagtgaagtggttcatttagggtggcccaattacttactagatcctatttttattagataattattaagaggaggcctcatctgagaacacaggtctcttgcttctcagttgtcaatgaattgcatttgagaaggttcgaattagacctgttttgtttggaacacaccaacaaagctgtttttcagaatcagaaatctcaatattaggacaattactttggaatgaagatgtccccagcttaccttgacagctgtgaatattcattagccaggctaatgccaataaactggatagaactttgcatattttgggctcagacttcttgtaagatttcaagttgtgtaaagagaaagctcctagctagtgtcctgctgaacactagcttatttccagactgaattcagatccttcttctcgttgtttctgcattcccactagaattttaggtgactcaggcagggaggttatagctccttaaagttttaggaggctaagctgtctagaaacacagtagaactttaatccccccgaaaagttgatgttgtattctgatggaatttcggttgatggaaagcgtacacaatgtgtttatttctagcaccagagccaatggaacttgatggccctaaaggaactggatatatcaagactgagttgatttctgtgtctgaagtgtaagtgaacacagaagagtgacatgtttacaaacctcaagccagccttgctcctggctggggcctgttgaagatgcttgtattttacttttccattgtaattgctatcgccatcacagctgaacttgttgagatccccgtgttactgcctatcagcattttactactttaaaaaaaaaaaaaaagccaaaaaccaaatttgtatttaaggtatataaattttcccaaaactgataccctttgaaaaagtataaataaaatgagcaaaagttgatcagagtgggaaagtagttcttttcaatctagaaaaggccaaagtaatgattgagatacactgtctccacttgctttgattttgttgtttcattttataaaaggtagaaaaaattttggaaatgtcattgtcagttatttggcctgcagcactgtcttggggtgaatggatgtagccttcatgtaaaaacactgtgtggagcagctttatctgcattcaaacctcaaggtagggatgagggactccccagacatttctctggtgcttttctgtccagggtaagccacgaggcattgtcatctcagggtagtgcaccgcacatgctcacacctaggcttacccaggcagaagcggcacagattccagtctggctattgcttatcacatccctggagtgtgaaacatttcccaaggggctgggctggggacatgagcctcccatgagctgtacttttgcaaatgtattttacaagtgtatgcacttacccaaaataaaaatataacgtgataattcaattacagacaaaagataaagtgtgtaagtatgcactagtgctttcatcactcagatgttgacattgctcttttctttttccccattttagtcacccttctagacttcagaccacagacaacctgctccccatgtctcctgaggagtttgacgaggtgtctcggatagtgggctctgtagaattcgacagtatggtgagtaccacggctggcctgtgtgtagctctcaataagtgtgtgtgctcagaggcagggagcgcaccatggcagatcccgggcctgtctgcgggagggagccctggcggagccaaggagagtgcagtgctcagatgagccatgacaagttggagctgctggatttaaaccacctacatcatcagtgggatttttattcctcgcattcagcaccttccaaaaaacaagtgacatttctaatattcaggtttcctcctctcccctttaaagttgtccatgtagaaatttcatatattaaggaactaagatttctttgataagcaaatgtttttcttcggaatgcgatttcatcactgtgtctaggggagggagtgttatttttagaaagggagggactaacgcttggtagttacagtaattagagagaattatactttagcagcaatgagattacttcatctgccttatatttgagagctaatttgtacaagtagctcctggggctgtgaagggcttgccaagagtaaaaggttcaaggagtgaaatagttaatgagattcgtgatagaaatgggaatatgattgtccacaaaagggaacatcttccttttggagggtgcttttttagtatatcaactagtattgtttgcctttcagcctaaaatccttcctcttaaagattgtgcttgcttggctggatttttgctgatgctgtttaattttaagctcttttccacatggagctattccagctcatttttaaaaatttatttaatgcttccaaaaaatatcctgagttattactggcctttcttccttactgtatacccggtgcctggcaaaaagtaggtgctcaacaaagagaggaaggcagggaggggaaaggtgagcgagaatgagagggcgtcactcttcagacatttggggaatgcgatgataaggcctcagtaagatctgcctggattcaggtttctcatgtgtaattttttgacttttttcctcaccttaagcacgggctacaatcattagagattgtaccttcctacactttcctgattgttgttgacgaaataggccatttagaaaaacagttagctattgtggcagcgaaatagtttcattcctattggcaagtgtaaaatgaaccttttctgcatgtaagaaggatcctgctagagtttcgctcccaacactgctataggcctggcacaaaaatggaataaatataaagccctattcagaaaatatgttacatcacaggaactgtaaaatggggggattttttatacctcctttgttgttcctgagcaaattacatcatcatcaccaccaccattaataggtgacattaagcacctacagtataccatgtacttcacaggtagtaactcattcagtcctcacagccaccttctgagttaggtgttattgttattcctactttgacagatgtgggaacagagcccctcctccccacacagccccttttatgtaacttgactaagatcaagcagttagtaaatggtagaaagaatatttgaatctacctagtgagtctctagtgcatgcttttgtccggtatcctggaaagcctcccacaaaaagctaatctttgccccattcaaaacatgcaccctgaagaagctgtttgtacaggattgggtttattctgttattaagacaaaggcatcatggcctttgggtgagaggcccgtatgtgtttgggatttggcaatcagcattccatctctgtcatcaccattattgagaaaatagatggattggttccctctctgcagtcctgtggagcagttggactgctctctctgctctcaggatgatactgtgagaacaatttaaatatgctaagcacatgtcaggaaacagttttgtggtctttggacactcgctgtagccattccgttccatttcaggtgattttattcatttcatttgtagaataaaataaatccatttcacacacacacacacacacacacacacacacacacaccctctatacaccactaaagcctcccattaaacccatagaagacttaaagagctaaaagaggctataatataaaaaaaaaaaaagaaaagaaaagaaaaagagttcataatataggcacggcactggttagacaacggttgaatcagtctctaaattgggttgacttcacaatggtttgctgtcctgccccttggccatgacttccatccagcatctactcttagaatcagagtgtatactctgaaacagaagcagctctccccaagctggctgtcttctgccaagtctggaggttgcagctctgaaagagggtggtaccaggggccaacgcctggtgcagcctcaggagcaacaggaccataggctcctgaggaaattgtccaagagagccagagcaccagtgttctctgcagtatgacttgggcatttgtttagtctggatttcctgtgtaatcagtgttttcctctgggactgtaatagaaccagtctactctccaagaggcctttagccaaagctcataatgataggactagctattaattgtctactactttctgtctactatactaaacattttacgtatgccatctaatttaacaagcctatctgctaggtactattaatccccttttgatagatgaagactttgagatttagagaggttaagccacttgccctggtcacgcagtgacaggatctgaatctgggcttcctctcttcctctatctatctatctccccctccctccctctctttacccccacggtccaccctattaagcacacatttgaaacatcagccaggccgggcgcggtggctcacgcctgtaatctcaacattttgggaggccggggcaggtggatcacctgcgatcaggagtttgagaccagcctggccaacacggtgaaaccccatctctactaaaaatacaaaaattagccagccatggtggtgtgtgcctgtaatcccagctactaggggggctgaggcaggaggatcgcttgaacctggaaggtggaggttgcagtgagccaagatggtgccactgcactccagtctgggcaacagaggaagactccgtctccaatttgaaaaaaaaaaagaaagaaaaagaaaagagaaacataagctagactgaaacataggggcaacactttcactgtgcttttcaatccaaaataattttcctaagagcccactatgtaccacacactattgagcacttgggattaaaaaaaagttctccagaggctttccagtctagtgccatgtgtctcagtcttggtgctactggtattcggggcttcagaattatttgttggggattggtggggtggggagctttcctgtgcttcgtaggaggttcagcaacacctctggcttctaccaaatagataccagtaagcacatgcaccctcacagccagatgggacaatcagcaatgtcttcagccattgccaggggacagaatcatcctcgattgaaagcatctggtctaaggggaaagaccagtgtggaagtcagacaggaagtcactggcaggctagtatcctttggatgaacagtttacttactataagttgtcctggtcaaggcagctgggcagaaggcactggtggggaaggtgaaggggttcttagtaattctgcttctttagtctgtacctgaaacacagtcattgattttacccactgagtggcctttaggggaagtgtatcatttccctctccttcctctctccctctggcatatggctcagcatttcctcacccgtttcacatgagcagatttgacacgttgctctgtccccagacttgcataacagcaaaaagctttatgcagtctggatggattcacaaaattaagccagtgggcagcagagtaataatccgtcagcttaggtgatataaaaggtcttgattagcccaggataatacatagtacatgctgaaggccctcttattccacggtatttatttgccattgcaagtatcttcctactacttcattctagaatagacaagcaatgtttaatgtatgagtctgcatttcacaagatcagtgtaataaacttaaccacattttgtctttttacagatgaacacagtatagagcatgaatttttttcatcttctctggcgacagttttccttctcatctgtgattccctcctgctactctgttccttcacatcctgtgtttctagggaaatgaaagaaaggccagcaaattcgctgcaacctgttgatagcaagtgaatttttctctaactcagaaacatcagttactctgaagggcatcatgcatcttactgaaggtaaaattgaaaggcattctctgaagagtgggtttcacaagtgaaaaacatccagatacacccaaagtatcaggacgagaatgagggtcctttgggaaaggagaagttaagcaacatctagcaaatgttatgcataaagtcagtgcccaactgttataggttgttggataaatcagtggttatttagggaactgcttgacgtaggaacggtaaatttctgtgggagaattcttacatgttttctttgctttaagtgtaactggcagttttccattggtttacctgtgaaatagttcaaagccaagtttatatacaattatatcagtcctctttcaaaggtagccatcatggatctggtagggggaaaatgtgtattttattacatctttcacattggctatttaaagacaaagacaaattctgtttcttgagaagagaatattagctttactgtttgttatggcttaatgacactagctaatatcaatagaaggatgtacatttccaaattcacaagttgtgtttgatatccaaagctgaatacattctgctttcatcttggtcacatacaattatttttacagttctcccaagggagttaggctattcacaaccactcattcaaaagttgaaattaaccatagatgtagataaactcagaaatttaattcatgtttcttaaatgggctactttgtcctttttgttattagggtggtatttagtctattagccacaaaattgggaaaggagtagaaaaagcagtaactgacaacttgaataatacaccagagataatatgagaatcagatcatttcaaaactcatttcctatgtaactgcattgagaactgcatatgtttcgctgatatatgtgtttttcacatttgcgaatggttccattctctctcctgtactttttccagacacttttttgagtggatgatgtttcgtgaagtatactgtatttttacctttttccttccttatcactgacacaaaaagtagattaagagatgggtttgacaaggttcttcccttttacatactgctgtctatgtggctgtatcttgtttttccactactgctaccacaactatattatcatgcaaatgctgtattcttctttggtggagataaagatttcttgagttttgttttaaaattaaagctaaagtatctgtattgcattaaatataatatgcacacagtgctttccgtggcactgcatacaatctgaggcctcctctctcagtttttatatagatggcgagaacctaagtttcagttgattttacaattgaaatgactaaaaaacaaagaagacaacattaaaacaatattgtttctaattgctgaggtttagctgtcagttctttttgccctttgggaattcggcatggtttcattttactgcactagccaagagactttacttttaagaagtattaaaattctaaaattctattaatctctcattaatagtatttaatataaagattcttaaaattactgacgttatgaattggtttgatgcttttctcatgtacctcaatccttattttaaaataagatcaataacactattttcctaaatgttgtccttacctgccctacacatattcagaattgctatggcagattaagacatgtcaatggaagaggtcagaggagtaatattattggcaacagctgtaataggtgccataaaaagcaaacaaacaaaagtattttggttctttgcgaccacagctgtccccaaatatacagatgattcagcacttattttaaaatgaatctgggtattgctaatacccccaaattagcagtttttaattttaaaatacatgagaaatgggactttgtcttgtctccaaagcagtcatctaaaatctacacccccacgattagatgagttattactgagaagttattgcacccacaaaaaagctgccatttttttccaaagatgtcaaaagctagaaggccaggtcttctcaaagtaaaatacactgtgtattggggaaaaaagggtaagaggcataattaccaagttaggcatagtctgtcaagttgtatttagctattatcatggaatagtgttattccctgataatgaatgttggcatcataaccagaatgattattctcatctccatatcttcgtatttacatctaggaaatataaagcttatttatagtgaacactgagagtggtctctctccaaggagtaaagtaaatatgccctggctaactagtgtaagtttgtattctacataattaaccattataagaagtcactgagtagatcctaacttaagggatatttgtttgtgtttgagtatttctcgtgtggtgtttctaagtttgaaaagtgttttataagcatagagcttatgtgtgctactggggacaaatgtctcattttaaaggaaagagggttttctgagatggcatgaaatgagtgaaatctatttattgcctgaaagctaaagtggaatatgaaggcaagtctttctgaacagagcagtcctgtcactgactaacccagggaaaggacaggaaaaagctagaaagtgttttgaaaactcttctgcttaccttttgaattgggacattaacaaagtaaggaccatttatgtgactggcttcctttggttagttatgattcattcattaattaattcatcagatttatatagagcacctgccatgagccaggcattatactagatgtttgggaaacattggtaaacaaaagcaaagatccctgcttttatggaacttaagatattctgagacactggatcatacattctagtgcagtcaccttattaaaacttaagattttgtgatgcaaacaaacagccagaagctacaaataatgtaaatgttatatttaaaaaatacaatttcaaagaaatgacatttaaaccagttttaggaaagctgaagacaatattgcttttagagctttttaagatcagtttatattgctcttaaatgataatcctcagcttccaagtttttgtgaactcactttggtttatgtgtttgctacactcactgagaaattaaacaccttgcttgatttattgtaaaaaggaaaaaacaacagagccatacttaagcagtcttaaacttatttattaacgttatcttgagtctacagagaacagaaagctatctaagaggtagaaagctgtcaaatacctattatcaaactctgaattctcctataatatttcataaagctattataacaccttaataccttactgtcagtgtctgtttgcagcctttccacatttcttctacataattgaaacagtcttgatattcttttgccattgggactgcttgtcagacacacttcattgcagccttttattggctatttggaaaggaagcaaggggtacagtgggggcgcacacaggcctggagtctggttcattctccagaatagaaataaaaccccccagtctctgcctttaatgccttccatccagttgttttgctgtatctcatgcctcctttttaaaaaactgccttaattttctaatctttctcatccccaaacacatataatctagtgaatcacatcatttccttgcataactataaaagattatcctttcccaaaaagcctttttataagtgccacctaacacattcatgggctgcttccctgggccatctggtatatgatttatgaatttactcattttactatgaggattattagcaagtaaaattaggaaggttatcccaactcctaaaaaagttatacaaaaataaaatgatcttgtatcaagaataaaaataactattcactatttaggattattcacacatttgttgtgcctgcactgatatcctgctcctatccatggatgtgtgtgtgtgtgtgtgtgtgtgtgtgtatatatatatatatatgtgtatatgtgtatatatatatatatgtgtatatgtgtatatatatatatgtatatatatagctgaagttgactatatgttgcaggactttctgttgtagcacttaggcctctgcctaaaactcagcagagaagaggccttagctaataggagatagtgcatatgaataagctaatatgtatattctatccatactgggcataatcagtgttgtaggacgtagaacaacagcgcaggactaagagttctgtatcacagcccactcttgggtctcagcttcatctataaaagaagagtgagttagattagagaatttctgatgtctcttctaatcattgtggtaaccccacttgtcaccttgcatagtacctggctcatcacagttctacaatgccagtaatgcagtgactcttctagcaaagtaacttactttgtgacagataactttgataaatgaaaatgtaacagtcatggtgttcatgtactttctctatggttggaaaactatacactaacccctggcctgaaaggaaagagtgctctgaagaccagggatttctggcattggaagcgaatgctattcccacgcagaataaattaggagctgaggtgtactggctggtgacactcagattctagtgtggcagtactagcttcaactctctaaataaatttcaaggctttgtgaaaataacctctcttctcattcaagggtatgtttactggttccattcaacaaatatttactgagcacttcctaactgtaaaaggatagtgtttgcatctagaggactagagacatgcctgcacatccctcaccttcaaaggtgaactctacacaggattcttgtcctagtcattgtggcaaccccatctgacaccttgtgtagtacctagctttatagcaggcattagaaatggattggaacctaaccagagatggtctgtatgctcagtggagttcctggctcttaattgttttaagaaaattcattttttccacacagttttttttttgatacatatatttattatgctgtaaaaagcaacactacctgattgcatttaaaataaatgtttcccaatttcagaatacttacaacttgtagttttaagattagattcactttgggaggttttagaagcaaatacattcatagctgtgtaatccccaggaagaatctaaatctgacatcaggtcattcagtccctgccagacagacaacagcatcaaatggtcaacagctaatccagctctgcagctaaagggcagtgtcgggcagcagtggggtatagcatattaccaaagatgagaccagcaaaaacaacaatgtgtataaagctttaaattaacatgatcatatagagcgctcaggatacagaaaaagcacatatgatactaaagccaaaacaaaaagatctttggagtttactgacggcagcagttaatagcacagtcaacagcatttaaatcaaatatattattaccagccaacagcaaacagcccgagcaggaatcggcacatagtcataaataacatcaggggtaaataacggcacatttaattaaacaacaaagattttacagaatggttttgatctgaaaaaagatgaaaactctctttgttcccaaataatggttagaacctctttttattatagaaaagcctcaaaatcattggtaatcttcaagtcacacaattcaactgtcttgtttcattttagtcacacaaagcgggctgctctttgaataaagttatcttgattgatttcagttaaaacgtgtctaccctgtaatatctttggggataatgctgctcctgtgcagcatcttacaaatgctacctgtctccatggcttgctagatccacggggtaggaaactgctcactcagcatcctccccatggaagctcaagcatgggaacagcttcgggcctggtgcagctaaggaacattggccgtggtttcaccaaaggaggtgccatctaggtaatgggagggcagtggcaggagccactggcttagactggaagtgaaaatgaaagcacctggaggctgctggagtaaggtgccatcaggcatgtaaagtttagaagcagcagagtgtgctcatagaaaaagaaaaaaaaaggaatttgctgtatgtgataacaactaacattcatgtacttgagctcatttcactaaacacagcttcagag

SEQ ID NO: 443 - DNA, 5506 bp, Homo sapiens
agccccacagtcttcgttacaacctcatggtgctgtcccaggatggatctgtgcagtcagggtttctcgctgagggacatctggatggtcagcccttcctgcgctatgacaggcagaaacgcagggcaaagccccagggacagtgggcagaagatgtcctgggagctaagacctgggacacagagaccgaggacttgacagagaatgggcaagacctcaggaggaccctgactcatatcaaggaccagaaaggaggtgagagtcggcaggggcaagagtaatgggaggccttctccaggaaagttggagacagagagcagggacctgtctcttcccgctggatctggctgggggtggggatgaggaatagggtcagggaggctcagcagggtggtgagccggaactcagcccacacagggaggcatggaggagggccagggaggggtcgccgctgggctgagttcctcacttgggtggaaaggtgatgggttcgggaatggagaagtcactgctgggtgggggcaggcttgcattccctccaggagattagggtctgtgagatccatgaagacagcagcaccaggggctcccggcatttctactacgatggggagctcttcctctcccaaaacctggagactcaagaatcgacagtgccccagtcctccagagctcagaccttggctatgaacgtcacaaatttctggaaggaagatgccatgaagaccaagacacactatcgcgctatgcaggcagactgcctgcagaaactacagcgatatctgaaatccggggtggccatcaggagaacaggtaccgaccctggccaggggctctactgttcccgcaattctgctagagttgcctcgcctcccagctctgtccggggaaaccctccctgtgctatggatgcaggcgtttcctgttggcatattgtgtcctgatttgcctctcctgttagagccattggataaagacagtgggtctgggactgaactgtccagtgttgtaatctgggaaagcagtgggccctctgacagaagcctgagcctggggtgggagttaggcaggagaggaagccctcagggccagggctgccccctctgcctcccggcctgcccatcccggagagttccctcctggccccatgacccaggagtccacccttgacatccccctcctcagcatcaatgtggggatcccagagcctgaggccacagtcccaaggcccatcctcctgctagcctggaggaattaggccccagggtgaggacagacttacagaaggtccgggatctgtgagggattcagccagagtgagaacagtggagaggagcagccctgttccctgcatctcccttagaggggagcagggcttcactggctctgccctttcttctccagtgccccccatggtgaatgtcacctgcagcgaggtctcagagggcaacatcaccgtgacatgcagggcttccagcttctatccccggaatatcacactgacctggcgtcaggatggggtatctttgagccacaacacccagcagtggggggatgtcctgcctgatgggaatggaacctaccagacctgggtggccaccaggattcgccaaggagaggagcagaggttcacctgctacatggaacacagcgggaatcacggcactcaccctgtgccctctggtgagcctggggtgaccctggagagggtcaggccagggtaggaacagcagggacggctgtggctctctgcccagtgtataacaagtccctttttttcagggaaggcgctggtgcttcagagtcaacggacagactttccatatgtttctgctgctatgccatgttttgttattattattattctctgtgtcccttgttgcaagaagaaaacatcagcggcagagggtccaggtgagaaaaggggacagtttctggagatgggaaagctcctttctaggcagtagggtctcctcattgctcctgcccagacaagacgtaggtgacaaggctgctggaacaggggatggaagctggggtatttgggaggggaatgggagctgcatctccatctacacccataagtgcttctcaagccagggctggggcaaggccttcgaatatccagctgtggcctcctcctgctgcaagtgaggagtgggcagcagggagggctgtggcacctgctctgtccccatcccagcctctctgtctctcgggctcactagggtgcgtccaggtggggtgagttgggaatcacgtgctgattgctgagggcctggatgatcatggtgtcagagggaggaaatagtaaaggtggctgtgatctggggagggccagaaactggagaggaatccaaggagaggcggtgcccacccgtgtgcctcctccaggaggcactttccaggttcccaccacctggcctccctgagtttccttgcagatgacacagatgaatagataagcagatgtccctgggccatttgaggagcggggcccagcccctcatcagggcagatgtggtccctgttttcatcctacctccagcgtgttttcttctgcagtccctgagggacacagtccccaggcgccatctctttgaggctttgttctgtgctctgtggccttaccttgccctccctgagccaatttccctttctcaaggtggtcactgcctggtaagtttggagtaagggacggtcagaagcatttcccccacagtcaggttgtttgatgggggatgaaaagagacagcagaagttttgtgtttctgcaaaaacagaggcagtgcaggggacagtgagaggctggggtgtccaggagacctgagtctggcggtaggggcgctggtttctcatccttgaacctaattgcactgtcagtcggcccctcatgcctgagcagatgggaaggttcgtcccctgccctgcagcaagagggccctgtccaggaggcacccacagcaggggcagtgcaggtctgtggtcactcctgctctcacctgcggcgtctcccgtggagggattgtcacttctggttccctgtgggcaggaatggtttcctcgtaggtcactggggttttggccaggaaaagggtatgaaattcatgtgccagtttatcaaaattcctgctttcaatgttgatgtccaataaagatgttcgtaatttcagctctataatcttaataggatttcctctaatactgctgttgtaaagcatattaaataaaacaggaactcaaatttggagccccctctccagaagggtctgtgtggagatggtggctgtggcagcggcagttcccaggtgcagagggtgggcagaggcagcctcaggctaaggggtctcccctactccacgtggagaaaagtccttgtaggttgcaagggcagtggcctgggtggaatccctgctagggacagagcaggaaggcctcgcagcctcaccaagcagcagctctggggtgaagtaagtggaccaggagtaagtggaccaggcaggagcagtagtgactcaacagcaggtcacaggcctaggtgggtgctgaaggtcatgggaggccaggcctcctcgagcaaggtggggggtcccagggtcatgtcaggtgcagatcctgtggcagccatgtctttccatgctgggcctgctgggccccccaggcttcctgatggggtccccagttaggagctgcctgctcagggctgggaggggaggagtgctgagctgcagatagagggcagggcccacagtgggcagggcctgccctggtgtgcaggtgcctctgcaggagaggagggcctggggactgagagcaagggtcagggcctctctttggggaggcctctcactgtaacaggactggtcaggcctgagaggagggcactgggttccctcttgggtcttgtccttttgtcttggggccctttcactccctgcacggtgagtggtgggcacaggacaggggctgatgttgatggagtgatgggagagaactgacaggggctgggaaaagcaaggagggaggaagaaaaaagtgggggcctcatcttctctcagagaaagggtgaatctgattttggggcaactgaagagagaaaagtccttagggaataaacacaacactgcacccagtggagcatttacccgtttccctcttctccagagcttgtgagcctgcaggtcctggatcaacacccagttgggacaggagaccacagggatgcagcacagctgggatttcagcctctgatgtcagctactgggtccactggttccactgagggcgcctagactctacagccaggcggccaggattcaactccctgcctggatctcaccagcactttccctctgtttcctgacctatgaaacagaaaataacatcacttatttattgttgttggatgctgcaaagtgttagtaggtatgaggtgtttgctgctctgccacgtagagagccagcaaagggatcatgaccaactcaacattccattggaggctatatgatcaaacagcaaattgtttatcatgaatgcaggatgtgggcaaactcacgactgctcctgccaacagaaggtttgctgagggcattcactccatggtgctcattggagttatctactgggtcatctagagcctattgtttgaggaatgcagtcttacaagcctactctggacccagcagctgactccttcttccacccctcttcttgctatctcctataccaataaatacgaagggctgtggaagatcagagcccttgttcacgagaagcaagaagccccctgaccccttgttccaaatatactcttttgtctttctctttattcccacgttcgccctttgttcagtccaatacagggttgtggggcccttaacagtgccatattaattggtatcattatttctgttgtttttgtttttgtttttgtttttgtttttgagacagagtctcactctgtcacccaggctgcagttcactggtgtgatctcagctcactgcaacctctgcctcccaggttcaagcacttctcgtacctcagactcccgaatagctgggattacagacaggcaccaccacacccagctaatttttgtattttttgtagagacggggtttcgccaagttgaccagcccagtttcaaactcctgacctcaggtgatctgcctgccttggcatcccaaagtgctgggattacaagaatgagccaccgtgcctggcctattttattatattgtaatatattttattatattagccaccatgcctgtcctattttcttatgttttaatatattttaatatattacatgtgcagtaattagattatcatgggtgaactttatgagtgagtatcttggtgatgactcctcctgaccagcccaggaccagctttcttgtcaccttgaggtcccctcgccccgtcacaccgttatgcattactctgtgtctactattatgtgtgcataatttataccgtaaatgtttactctttaaataga

SEQ ID NO: 444 - DNA, 1118 bp, Homo sapiens
cgcaggctcggcggcacgccccctgacgtgtgtgcctcaggcttataatagggccggtgctgcctgccgaagccggcggctgagaggcagcgaactcatctttgccagtacaggagcttgtgccgtggcccacagcccacagcccacagccatggtaaggcagatgtcacaggtggggggaggtgggctctgtgccagccaattttcgtctccctcccccagccaaggtctcccaggggtgcagggagagcggagctgctcagagcttggccaggttctaagtgtgctcctgaaagcaggtcacccctgagatcctcagggtggggcacagaggggcaccctagcaggtaaagggaggccacgggatggcggtgggcagctggccttctagtaacgagccctcagtgccttctgtgcctggggtccctgccggcgggatgtagaggacagacaggagggagcactgtccctgggtacaggagctcgccctgcagccagtgccttgtgtgtggtgggcctggggctggcgccgcagtctctgaacctgtgtgacgcctgcagggctgggacctgacggtgaagatgctggcgggcaacgaattccaggtgtccctgagcagctccatgtcggtgtcagagctgaaggcgcagatcacccagaagatcggcgtgcacgccttccagcagcgtctggctgtccacccgagcggtgtggcgctgcaggacagggtcccccttgccagccagggcctgggccccggcagcacggtcctgctggtggtggacaaatgcgacgaacctctgagcatcctggtgaggaataacaagggccgcagcagcacctacgaggtacggctgacgcagaccgtggcccacctgaagcagcaagtgagcgggctggagggtgtgcaggacgacctgttctggctgaccttcgaggggaagcccctggaggaccagctcccgctgggggagtacggcctcaagcccctgagcaccgtgttcatgaatctgcgcctgcggggaggcggcacagagcctggcgggcggagctaagggcctccaccagcatccgagcaggatcaagggccggaaataaaggctgttgtaaagagaaa

SEQ ID NO: 445 - DNA, 22878 bp, Homo sapiens
cagtgcagacaggcttggctttgaacagcatccagctccacgattctatcagctaaattttttttttgtactttaagaaatagggatagtcatagtgtttactgtacgcagttgttctgaggagaaattaggaaaaggtatgcagttacacaatgccacgtacaactctaaattccaattaataaatgtaggacaaacgagggaagtagaaaaatgcacaagaaatgttaactattagctttactgcagtttcttcttggtagttatcatttcatgcctgcctacatacatacaaggggaccagtgatagtttttatgtgctcagcaagattttttttttctttctttctcttcctagtgaggaaaaagaaagttagtggcagttggcatgctgccagctgagtttttttgctgctttgagtttcaggtttctttctttctcttcctagtgaggaaaaagaaagttagtggcagttggcatgctgccagctgagtttttttgctgctttgagtctcagttttctttctttcctagagtctctgaagccacagatctcttaagaactttctgtctccaaaccgtggctgctcgataaatcagacagaacagttaatcctcaatttaagcctgatctaacccctagaaacaggtaagcgactttttaattgaaacatagtatttgtacgtatttatggggttatgtgtgatattttgatacaagcatacaatgtaatgaccaaatcaggatcattgggaaatccatcacctcaaccatttatcatttctttgtatttggaacattccaaattttctcttctagctatttcaaaatagacaataaattattgttaactatagttaaactgttgtgctatgaacacaagaacttattccttctatgtagctgtatttttgtaaccattaaccaacctcttttcatcatctccttcctctgactttcccaacctctggtaaccaccatgctactctctgcctccatgaaatcaacttttattttaagcttccacgtgtgagtgagaacatcacaggtaagtgacttcttgccatccaattttgctagctgtgtgtgaagaaaaaagcttgctttctttttttctaaaaaggagtttcagagtggaattgctgctaatactttgctctttcatttgtcttttattttaatgaaaatttcacacacagataactagagagtataaatgaaccatactgtaatctgatatagttttatccaattttaaaaatgatttgctttttaaattagaatagttttcttttacttaaatacaaaagcattacaaataaagttgaagaaatctatgactctctactatatattgttttcttatgagatggagtctcactctattgcccaggctggagagcagtgtctcgatgtcggctcactgcaacctcagcctcctgggttcaagggattcttgtgcctcagcctcccaagtacctgggattacaggcgtgcaccagcatgcctggctaatttttgtatttttagtagagacgaggtttcaccatgttggccaggctggtcttgaactcctgaccgcaagtgatctgccagcctcagcctcccaaagtgctgggattacaggtgtgagccaccacacctagcctctcctatattctttacctttctttttatttccagaaggcaacattatctagactttggtataaattattgtcataattgtttttatggttttctgtatgtgtgtatatatttatctaaatatgatctctagtataatttgttaaaattacttctgtttttatataccagcaaaaatggttttacacaataacttaaaaaattaatatacttatattaattttatttttattgatacataatacattacatatttatggggtacaggtgatatttggtgatgcacttagaatgtgtaatgatcaagtcagggtatttgtggtttccatcgctttgagtatttattatttccatgtgctgggaacaacccaagtcttctagctactttgaaatagacaatacattgcttttggccatagtcactctactttgttgttgactaatagaacttctaccttctatttaactgtatatttgtactcattaacctacatctcttcatctctccctcctagacacccacccacccttcctagcctccagtatttatcattatactatccacatttataagatcaacatttttagctgatctaaaatgatgagtgagaacgtgtgatatttcctgtgcctaggttatttcacttaatattctccagttccgtccatgttgctgcaaatgacatgattttactgtttttatagctaaatagtattccattgtgtaatataccacattttctttatccatccacttatggacagttaggttgattccatatcttttctattgttaatagaaattcacaatagaaaggttgctgtgataaacctgagagacaccagaaggaattttaacatattgaccatactaaacaatatttaacatattgattgtattcagctatcttttacaatgtggtgtacagactctaaaatagctcctaattgtccctgtcctattttttttttaatactcatgtccgtgtataatccccccttgtctgtggatggaaactgtgacttaacggtaacaaatagaatttggcaaatgtgatatgttaagattataatgtctgctatgctaggagattctctcccttgctggtttcaatgaagtaagtggtcatgttggggaggcccatttggcaaagaactaagggtgacttcaggccaatgactaactgagaactgaggataacctctgatcattagctagcaagaaatggagttctcatatctacaaccataaggaactgaattctgctaacaaccataggagcttggaagcatgtccttctcccgttaaacattcagaagagtctgcagctgtggctcgcactttgataactgcctcatgaaaaattctgaagcagagaaccaaactggatttctgacccagagaaactgtgagactataaatgtgtgttgttttaagtctctaaacgtatgagaaattgctatgcagcaatagataaatagcacactaaattagttaatactattactttatcggtagatgctttaaggttttccacatataagataatatcatctgtgagcagagatgattatacttcctttataattcaggtaccttttcctttttcactttcttttttattttggcctacttgttctggctaggacattcagtattatgttgaatagaagtggtaaaagtggataatcttgtcttgtactttatcttagaggaaaagctgtcagtttttcactgctgaatatgatgttaactatgaactttttatacatgtatttactatgttgaggtaatttccttctactcctggtttaagtgttttttgttttttttttttttttttttttttttttttaaatcatggaaggacttgggttttatcaaatgtcttttctgtatctattgagatgaccaatttgtattagtcagcgttcttcagagaaactgaaccaacataaaaaaaataaaattaaaaaaaaactaaggaaatttgttatgggaggtggctcatgtggtgttggagggcgagaagtctcactatctgccacctgccagatgtaaagccaggaaagctggtggtgtaattcagtctgaatccaaatgcctgagaactggtggagccagtggtggaactcccagtctgaaatcaaagtcctgggaactgtgggaactgagagagctggaggtgtaagtcccagaatccgaatgtttgagaaccaggagctcagatatctgagagcagaagaagatggatactccagctcaagaatagagaatttgctcttcctctgcctttttgctctatttgggccctcaatggattggatgatgtcagctcatgttggatcttttttatgcagtttactaattcaaatgctaatctaaaatgtgtttgtatattcatttgcctcaacatttcttttcttttctttttttcctttcttttctttttttgagatggagtgtctctctgtcacccaggctggagtgcagtggtgcaatctctgcctcccaggttcaagcgattctcctacttcagccttctgagtagctgggactacaggtgcacaccaccacacccaatttttgtatttttgtatttttgttagagacggggcttttccgtattggccaggctggtctcagactcatgacctcaagtgttccgccgaactcggcctcccaaagtactgggtttacaggtgtgagtcaccacgcctggcctcaagatatttttaaaattcccttttgatttcattttgatccactgcttattccagagggtgtagtttaattctcacatccttgttaattttctagattttctgatattgatttctagtttcattacatggttatgaggaaagacttgatatggtttcaatcttcttagatttgttaagacttgttttttgacctaacatgtaatctatcctggagaacgctcctataatacacttgagaagaatgtgtattttgttgttgctgggtggaatgccctgtatatgcctattaggtccattgggactatagtgttcaagttttctgttttcctattgatcttctgtttggatattttataatggataaagtattgaaagtgggctatcaaaatctccttctcttattgtgttgctgtttctcccttcaattctttcagtgtttgcttcatttatttaggtgctctgatgttggatgaacatatatttataacggttatatttttctggagaattgacccttttcttattatatgatgtccttcatagcctgttatgacaggttttgatttaatgtctattttgtgtgggataaggacacacaccccttgcgggttatcttgcggttcttgcagttaccatttgcaaaggtacccttattatcacttgattttcatcctatgtgtgttcttaagtctaagtgagttcttggggacagcatgctgttgtattttgtcatgacatgctttgactcagtattatccttctttctttccttccttttttttttttggtttgctaatattttgctgaggatcattccatctatatttataaaagagattggcctgtaatttttcttgcttataacgccattaacaggttttggtatctaagttattctctggaagaacatgtgtaagattgtgtattatttattcttcaaaatttggtagaattcagcagctagactctgatccttgagttttcttggggaagtcttaaattaattatgaatttagtttttaaaaatagctatgagatagtcaaattttgtatttacttttatgtcagctttggtaagttgtatttttctagaaatttgtccacttattctcaaatttaattttacaaagttgtttatcttcagaccattttatcgtttatcatttattgcatctggactgatgttttctcttacgtttttgattttaggacattctttcccttttttccctttatcagtgtcagcagtgttttacaaattttgttaatccttttgaaaactgggttttggttttgttaatcttctctattgtatacttgatttgtccattaatatttctgtccattatttcttgcttttatttttattgttgatttctttctacttactttgagtttaattggtattttttctgactttttgaagtgaaagtctatataattaattttcagcctttctccatttctaatacatatgtttaaacttatatgatttttgtaacattttatcttcattgtataagttttaacaagtatcttttgtcatttaattaaatttcattatgatttcttatgtgaataatggattatttcaaattatattttttattttccaatgtatgaggggatctactagttatcttcttgttaaaaaaattctggcatatactgtctgttcaatattatagtactttgaaaatttttgagacttgcttgctttttaaggtttgtagaatatctcttctatattctttttcttttattcttgttttctggttcatatatcttaactaattttactgtatcctttaatcccttttgcccttttctctttttattctttttttgtctcaatacttcagttggtaaattttcttctaattctttatgcctaccttgcagttaaatgtattcatttaattattaatttcagatatatatttttacatagcaaatctctttttgacttcttattgtattcattttactgtaaatcattcaatcttaccttttagctgtttgaacatattaaacatagtaatttaaaaatctctatgggtaactccagtataagtatgtgtttgtttctagtgtgtgctttttcctcttggttttctatcatgttgtttcatttacctccaaacatgaatgtgtttatgatgaatgagagtcactgaatatttaaaaaatcatagagatattttgaagctggaagaatgttcttttcatccagacaagatttattttgtttctgctatgcagctatggacactagcaattctcatttaccttaattcaatcaaggactgagaatactgaagtatgaaattaactctgtctgcttccagttcatacttcttccctgtacctcttttcttaaattttttttaaaattttatttcaacagcatttggagtataagtggtttttttttacgtggatgaattatatagtggtgaattctgagattttagtgcatccatcactcaagtagtgtacattgtatctaatatgtagttttttttaatccctagctcctcttccatcctctcctttctgagtctctaaagtccatcatatcagtctgtatgcctttgtgtactcatagcttagctcccacttataagtgagagcatatggtttttggttttctctgtagctctttagaatcccaaactgtagcctaagggaaaggtttccaaggtgctctccttattgcactccaaagtatgatttttatctccctaactctatgaatctagcaaacactttgcttaacttttcagcatctcaagtgccttttctgaatttgacagatacacgtcagaaatgtgctcccaaatgcctagcttatctctctttattaacttctccaaatctttgccaatagctatatgtcttaactgccttgtttgctctttagagctttgtaacacatgcatttttatagtttattctgcttttcaagtttttttcattgaaataattcttgtaatgaccaatagtctagtatgctgctgtaagacttctatagctgttaactcctttcatatttcaatttctttatgtgctgttttttgcaagaattcctaggctccattttctaattcatacgttggcaaatgatgaatgtgatatgacaatgatgacctctgttccagccatatacttttttaaagaaaattttattggaacacagtcatgctctcttgtttacatattatctatgacttcttttgtattacagtggcaaagttgagtaattgtggaagagaccatatggcctacaaaggctaaaatatttactatcttgttcattaagaaaaaatttgctgactcttattgagatttatttttcctttattcaactttctgaagtttgtcaattgatttaaaaattttaatgacttttcctttctaaattatatatttttatatctaacattattgtgccatttctatatttttgctatattttttgccttaaccaaacaatgtgttttaattgagtcagtgaataaagaactcactgaaagtagaagtggaaacctaagctataagctactatattatataagcttctcaacctataattgtttttccattagatatagaacaatggaagtgacaacaagattgacatggaatgatgaaaatcatctgcgcaagctgcttggaaatgtttctttgagtcttctctataagtctagtgttcatggaggtagcattgaagatatggttgaaagatgcagccgtcagggatgtactataacaatggcttacattgattacaatatgattgtagcctttatgcttggaaattatattaatttacatgaaagttctacagagccaaatgattccctatggttttcacttcaaaagaaaaatgacaccactgaaatagaaactttactcttaaatacagcaccaaaaattattgatgagcaactggtgtgtcgtttatcgaaaacggatattttcattatatgtcgagataataaaatttatctagataaaatgataacaagaaacttgaaactaaggttttatggccaccgtcagtatttggaatgtgaagtttttcgagttgaaggtttgtaaaattagataatcctacatctcacattatgattctaatccttgtgttcggtaggtaataattgatctacaagagcaaggaaagtgaaaggaacagttagattcatgccatactctttgataaattctgaaatgaaacgtggggaacataaggattatgaggtttttatccagaacgtataggctgctttgagcaaagcaagttgagaaatatatgtgcagagatagagatgacaaaggagatggggatgtggagagagagagatcttatcatcagagctgctctgttttgacatatgacccaaagatcagacccttatatgacccttagaacttctaggtgtaattatgtgagagcttccagagcaagttaatgtgcagagaggataatttttcctcctcttcctctcatgttgccaactctgactcctaactgagcagctcagccctgggttatgcaagaaaactccatgtcttatttcaaaagtagacttggccacatttaaccaaacaagttttaaaaatgtattatgctatgtttatttcctataggaattaaggataacctagacgacataaagaggataattaaagccagagagtaagttggattcttgggctatctattaatcattttatttagaccaattgtataaagaatgctgacaaatatgtggtaaagataaaaatcatgccactggaatgattaaaaaagagttataatgttattgacataaaataacaaaagcactactaactatgaaactttaaatatccacctgatgacattgaccaatttgacttcatttccactttagaccaaaattttccaggtagggtctggataaccattttaggtaatttctctgaatcctttccttgagaaacagcttttgagaatcctcagtaaatgtcaaaaacaaactttctttttaaatttatagatagctacattgcatatattttattttgatttctccttaatgtacttttagtgaaaataataatttatgttcaatgtcactgatatttcttattacattcatgtgatctaagactaatagttgaaaaatggtttggttgcaggttaatatttaactttagtcagatataaaataatgcattttctttaagcacaaaatgtataactttagatatttcaaatcatattatagaagatctcattatcaaaataataattaagtattgaaaaaatacccttctcagggaagagaaagaagctctaggtgacttgagatgttctttatggtattctttattggctgttctgatgctgtatttaaccactatattttaacaggcacagaaataggcttctagcagacatcagagactataggccctatgcagacttggtttcagaaattcgtattcttttggtgggtccagttgggtctggaaagtccagttttttcaattcagtcaagtctatttttcatggccatgtgactggccaagccgtagtggggtctgatatcaccagcataaccgagcgggtaagttatttccctgaggattttattttatagattacaattattatattgcttatgtctttgcctttttctcttagggcaatcctaatatacaattaaatgctaaatcaaatggaaaataggagtaaaattttgatcagaaccacctccattgtgctatattatacagagaagctttcaaattttatggatggaagaagcagttatataaagaatactttttagtatttgtataaaaaacaacaaaaaattaaaaaccctatgaaaatctttgaccattatatatgatgttcattttactcatgtactacatgattttacctggtttaaaatgtttttctttttttgtaataaaataatgagaattatgtaaggtaattttttttaattacgagaccattctctaagacatggtcatgaaaagcaaaatagcaattcactttggtgggtcaactttgaaggagaacttgaagtgtaaatcttacaaaaactatcttatttacaaaaagatatacataaggaaataaatagtaatatagatttcttaattgttgctctaaagaactacaaattatgatgcagcacttgtctagaaaattctttcttgtttatgcttttcaatgttatcatgcacatgcaatcaaacaaaaaataataaagggaaagaatagaaaattttagaatcaggcttttttaatgattaccacaaattaatattgtcacttgttagggaatatgctgtgtattatcaatgcaaaatttagcataagacagcataataagacagtaatggttcattttagcttttgtgtcacattcaataactggaagaattttctaggactttcaagaatcacatcttatttgttgatgttggccagatactgtgctcttgagtggctttattttaatatattagtgtagtctcagaagccgtggcaaggtacggcagcacaaattaaattaattaggcattgattgaaatgtttctgtttgctaaatatttattcagacatagagacctaaatacaaataatgcttggtcccattacccagatatctcagagaccaatgcagataataaatctgtatcattcattgtgatatatgctataatagagatactactcaggacaaaatttctctttcttccttttaagttttaaattccaaaggtcttattttaagagaagatgtagatactgaactccaatgaaatgcaaatgttatttaaattgaagaaatatagggcagacttttatgagggaaattgaatattttattgcttaaaagactctttcctttgaataattgaagttgtaaagaaagcaaattaatgggtaaggaaactaggaagatgcatattggtgttcctgaaattttacaatgtactttaactctagtgcttagtataatttctttcatgttgaggcactggtaagtcctattctcctagataaaaatcttcagtgggattacgcctctgcgtttcatggcccaatgagagcttttgattttattacagattacaataagtcatagactgttctctcccttctggtttgagtgatactacacccttgccagcaccacagatggaaaaattgtaattaaagtgtctctgagaaatccttttctttgcaatcttcccaaatcgtccatatttttttgtgtatgttgaatgtatatctgaccatcaaataaaatactttcagaattgttctagaaaatatccttgcaataagattgaatgtgtttatctaggaaagaaagttctgttgtgcttctcaaagtgaaatttgtggaccccttgggttcccggagacattttaagggtatctctgtgttcaaaactatttttagaattattctaagttttttttgtcttttctagtgtattgacacttgaattaattacacaacatagttttacctgttggcacattagtatgaatcaaacggtggcaccaaacactactagtagtcactgtatttctcccaattactgcacttacaggaaaaaaaatgccagttttactccttgatgaatagtaacagttattggttttatttaaactccactttggaatacacatcattttgatattcagtgtgataaaatgggaagtgctcataaagtacttctaatgcatattgaaaattggcagttgtctttagaaaaagcactggagcagctgagttgttaactgaactttttttaaatgtgacatcatttttactggacagcacagacttactcattcatacttggatatttggcaggtatcttaatgcaaatgctcaagtgaccctactaataaagaacaaaaacaaaaactgacagtgtttgttgccaataacaaaatttgagcttttgagaaaaatcaaactttgagaaacctgtattcactattctgagcctgacagcttttcaacacttaaagacttatccaatgaaattaatggtggtattaacaaatgtgatgttttaatattgcatgatgaaatgtgtcaacattaggaagatctggataacccagtggacgaatgttttaagatgatcaataaattaggttaaaaaatcatgcatgagtaaaggatatattcaaagtataagacaaaccaatggatttaatgtggcagcatataaaaatgtcgcagattccacattgcaactaacctttaagaagttattacttgttgagctttgctatattacattgaggaatattcacaattacctgaaagctatacagtgaaatattacctccttttcatattatacatacatgtgagaggccatattttcttcacatacttcaattgaaacaacatatcaagagattgaattggagccacatatgagattacagttatattctttaatccagacattaaagagaattttactaataaaccaatgatttctgttttctgtaaatttttaaaaaaatgctttttaagtaaaaaatgttatttgatgaacatgtgacaggtttataattgaatttttaatgattaaaacaacacttaagagcaggaggggcagagcaagatggtcacataggtctctccagcaatcattcctccactgaaacatcaatttgaataattattagcacacaaaatatcacctcagtaaaccaggtgaaagattactgtacctagttctagcacaataataacaaaagatacattgaagagggtaggaaagatagttttacgttatctgcatcacccccctcaaccccagggagcatagtgtggagagaactgtcatctgctttggggaaaagagggaagtgagcacaggactttgcctggactccaatatcaggcctactgcagtaaaatccagcactggatagaacctcatggccccagactttaggctgttatttgacggctgagcctctagccccatgctggtgccaagtgagaccatgtggccctaggcttcaagcttgcatggtggactcagtccctggaccacaccatggatgggttattagtggcccaacctctgaacagcacttagtgacacggatgccgcagtggccctgagctttacgcatgcctcagtgctgcaccagtcacagtggtcccaggctttgggactatgcaaggcagcctgcccagaatttttggataggctgattgttgaaggacttttccagacaaaggcaatctgcaaagattggaataagtacctacttccagagatgtttatacattgacacattgtcacaagagtcaaaagcaatcagggtaacatgacgtcagtaaagagagaaaataacgtgccagtggccaatcctaaagaaatggagatgtatgaaccacccgaagaattcaaaataattattttaaggaagcacagcaaacttcaagaaaatacagagaaacaatttaacaaaatgagaaaaatgatgagtgatcagaataagaaatttaatagaaaggttgtaataattataaaaaagaaacaaatttcagagatgaaaaatacaatgggtgaaatgagaaatgaaatagagagcatcaacagcagaattgatcaagtagaagagtctgtgaacttaaaggtaggttatttgaaaatatagatagagaataaaaaaacagaatgaagaggaaggaagaaagcttatgggatttatgggacatcatcaaaaggacaaatattcaagttacaagggggaaaggagacaagaaattaaaagtaatagaaatcttaagtaaataaatagtagcaaaaaacttttaaaacctggaggatgatgtaaatatccaggtaaaactgagagaaaagtccccagtcagatttaatccaaagaagattaacccaagatatattaaaatcaaactgtaaaatatcaaagacaaagagaggattctgaaaactggaagataaaaaagcaaataacatattagaaagttttaatatgactagcagcagacttagcagaaactctgcaggccaagagagtaggatgaaatattcaaagtgctaaaagaaaaaacaaagaaacaaacaaacccatccaattgagaatattatacccagtaaagctgtgcttcagaaataaaggagggataaagattttcctggatgaacaaaagctgagggagttcattacaattatacctgtcttacaagaatgttaaagcgagtttttcaagctgaaagaaaaggatgctaataagtaatataaaaatatctgaaagtataaaactcactggtaaaactacagtaaaattcagaatactcatactataatgatggtgatgtttaaaagacaaaactgctaaaataataatagctataagattttgttaaaggacatgcaatatggaaagatgtaaattgtggtatcaaaggtgcaaactgtggggaggagtggagtaaaaatgtggagtgttttttttttctctgtaagtggagctgttattaacttaaaataaccagttacaaatatgtttattttttgtaagcatcatggttaagcacaaaacaaatactgatagtagatacacaaaatataaaaagcatggagtcaaaacataccattatatatatatatatgtgtgtgtgtgtgtgtgtgtatgtgtatatatatatatatatacacacacgttttacatgataaattacatagaaatttcttttttaattaaaaaggaatatttacatttttttcagttgtaatttccactattttaaatatccatagatataacccacataaacaacagatctttgggattctcaataacttttaagagtctaaaggggtcctgagaccaaactgtttgaggaccatggtgttcaaatattaaccaatctcttttcttcttattgtcatgtcttgaatgctgggtgatgaatgaacctttacacttaatgtatttttttaacagtataggatatattctgttaaagatggaaaaaatggaaaatctctgccatttatgttgtgtgacactatggggctagatggggcagaaggagcaggactgtgcatggatgacattccccacatcttaaaaggttgtatgccagacagatatcaggtaagatttcttcaatatccaaaacatttcaaatcattttcttcagtatttttcattgaatttttaaccacataaggcaatttcaactcccataatgtggtttcaacatcaatcaacactattctactttgaatgaataagaattcatatgaaaaagtagagtgactattgttcttttctgtaacattgagaaataaagccaaaaggcaggattctactcatttgcattctagtaaaagatcaaggagatagtgtgtttttatcactctttacaataatgtaaactaatgatagtcacttaatcccttgcactttttgggttacatagacaaaatattggaacaagtaactattttgtgttgaaatgtcattttatactgtaaatgcttagatttcaccactaaatacctagattcaaaatttggctttgctactaacagatgtttacccgtaagttgcacacttctctctctcggtcttttttttttttttttcaggtgtgaaatattgctattaatagtgtctatctcatagggtggctaagatgattaaatgagatgatatagtttaagttctcaaaaaagccaacaatgattgttacctttcttttaggtgttgggtatcagcctcaatttctaaagaagaatctcttttgcctcccaattgtgctgaattggaaaccttacctatgtatttatttattcattcaaaaaccatctattataaaccatatttgtgccaaactctaagccagttactgaaaacacataagtcaataacagcacaatccttatcctccaggagttcataatccagtcagggaaaaggagacacacagataaagagaggagggatagagcgaagacattggagaaatcaggagcataccaacaccctaatttttcacagcagggagccagtcaattcagtccaacactgaaatacatagcttaataactacatgtttccaaaccattgtttcataatctatttccttaatcttagaaagattactgtcttgtggtaagaagacattaacttcaaatttggtatttcttttatttcactttagtttatttttcttctataaaatcaaaataaattacagtcttttaatttaaatagcattttcaacatatttttctttcttttattctctctatccagttcatttaagcatgcaaaatgcttagggaggagtcttaaattgtatttaacaaacgttaatggtgtttatttctggatactaggatttgaaattagcttttcaaaaatattatttaaactttcctgcaatacttacaatggataattatcatttttaccaaagcaataaagtgttttttttcctataagagagatataatggcattatgctcacagtggaaaggaagtaaagaggaggtgctactgtttggggaaagagtagctgaggagaaagagggagatcagtagttacagtattagaagcattaattgtgtctttaagggttaaacagaggctctctgatttctgaatgttaccttatgtttttataacagtttaattcccgtaaaccaattacacctgagcattctacttttatcacctctccatctctgaaggacaggattcactgtgtggcttatgtcttagacatcaactctattgacaatctctactctaaaatgttggcaaaagtgaagcaagttcacaaagaagtattaaactgtggtgagtctcactgaacttataaaaaaatttactttgaaataattatagatttgtaggaagttgcaaagagagtacagagatttcccatgtacctttcatcctatttccctggagtggtggccatcggagggagagatcattcacaggcatgactgaagaaagaccccaaatcctaatgttcagtctttaaagaatagactggccaaccatttttttttcgtgtgtgattttcctgaggctttagatagggctaaaacctatgtgggtagacagggaagatcgaaaccagaaaattgattattgttaacaatgtgtgtttatagttctatgtcattttatcacatgtgtaagtttatgtacccatcactgcaaccaaatattacatcactttgtagatttccctcatggcacccactattcctccaccatccttaactcttggcaaccactaatattttcttcatttccataattttgtcatttcgtgaatgttatacaaatggaatcatacagtatgtcaccttttgagactggcttttttgactcaacctaatatcctttgacatccatccaagatgtatgtatgtatttattgttcatttaaaaaattgtatagtattccatggtatagatataccacagtttaaccatgctctatcaaaaaatattccagtttttagctattgcaaacaaaactcctatcaagttttgtgtggatataagtttttattcctctggggtacatctccagaaatgtaatgctggatcataaagtaactgtatgtttagctttgaaagagatcaccaaactatactccagagggactgtaccattttacaatcccaccagcaatacatgagagatctattttttctgcattcttgctagtatttggtatcgttgctattaaaaattccttaactcttctaatagatgtatgctgatatttcatcagggtcttaatttgcattgcttaatgactaatgacattgaacatcttctcatgtgcttatttgccttctgtatagcttgtttagtgaaatgcctcttcacgtcttttgattattttctgattggatgatttgtgttttttagaagttgaatgttaaaagatctataaatcctaaatatgagtcaattgtcagatacattgtttgcggatagtttctcccagtctgtagttgtcttactattatgatgatttccatccctgccatctctcatctctccttttggaactctgggacatgaattctagatattttgttatagtctcacaatttatttatttattttttatatctatttgctctttatttttcagagtgggtaatttctattgttatatctttgaattcacttgttcatcactttgccctctccattctgcttttgagcatagctattgtttttcctatcttgggtattatggttttttagctctaaaatttcaagttgattctttttcaggtcttctatttctttgctgagacatcccacttccttcatttgtttcaagaatgttcctacttggttcttaagcatttttatgatggttgctttagaatccttgccaaataattctaacatctttgtcatctaattagggtcatgatcttctgattagcttttctcattcaagttgagaatttcctgggttttgatgtgacaaatgatttttaattgcatcttcgatattttaggtactttattttatgactctggatcttacatcttgtgttttagcaaacatattctgatactggtaagatggaaagtacaggtttcccataaggccttgtttgacacccttggagaaagggcactttcttactgtgccccatataggataccctgacatcacaggggctagaagcctccttgcatcgaaggttaatgaaggctaaagttccagcttctcacttgttctcctctgacacttccagagagggaaaagagcacctcattgctgctgattcggtggaagtctaggatccccaagtagcctcccttgacaccatcaagagggaccttgttagtatagtgcaggtataaatgtcctggctccctacatttttttcttctcttatactaccttggctaagggtgaaagttgggaaagggaaggacatatccatggatagggctaaggtgaattctgtggtgtttgactggggtagtgtggctattttctgaaagttttctgtcttgctacactgtcctttttctcatgctttgactagatgaaactagtcaacagcaaaaaaaattttcctttttgctggctctaatttgtattttccagttgtgagtgtctccaaaagccaatctgggacatatgaagtaaaaagaaaacctagagagctcatctctgtattgtttcttgggtctcaaggtctctagccaaattgcattatctgcacttttcaatctttatgtttgatttatgcataatgtccagagattttagctacatttagtgtaaagaagagggaaaagtgtgtctactccatttggtccagaactggaagtactctcactgaacttccaaaagattttaatataaagaattgttggggcatttatactccaaagcctcgttgcttactttatcagtagaaagatcacatatttaggttccgaaaagtgctatgccgtttaatgtatagagcatggtcttgcttaagtgaacctagtttttaaatagtagtaaactttgacctcgagaaaggtaatttaattgctctgaactttatctcctgttcttctaaaatggggataataagttttgcatctgaacttaataaactgtctaacaaaagtctgagtagtgaacattagatatacacaatgtaaatatataagcttatataagtacttaacagctctaaaattatggagggtttggggtaagacagaaatgctaagttttaaaatgacttttcaaggatgtatggcaacacattgtccttggcgtgctggatggcaatgcttaatgcaacttagtgtgctgacttaggacctctaaaaggacattgtattaattttgaaacagaagaattacattgcaacagaggttgaaaaaaattataggtgtcaactgagaactgctctctaccagaacctaggtattaattggccaactttgctagttattcctctgaaacctgaatgaagagaaggtagtaaaggaaatcatttagtaatggaaaaaataaacacaagattttagtaggaagaaggtactaaaagccctgttaaaagagtcctgggagcttccttgactggcatttgaaattaatcttatattttcctcataagcagttgttagcatagcagaattttgatttgtttagaagtcaaatgtgatttactaattcaatccctgtggtttgagggagaaaggagtaggtccctattagaactgtgaaatcagtacagtttgctctcataaatgctcatacacaaccctcctcacttcctctttttcttgtggttctttttagtccccaaagtccagcaaccccttttttccccttgaccaatttaaaacaaaccatttgaatggaatcgtagatgattgcaatttagtgtggatttagttgcattgaaaaatgctgtcacatgttggaaaaaaaagatcaaagatcatttctcctctagaaaagcttcaggctccatattgagatgtattggggatatttcattcttcagctctcaaaatcaccctatagagttgccttcacacatatttaataacttgttgacacattgctatttatgatataaaataactgatttatctatttgatataggtatagcatatgtggccttgcttactaaagtggatgattgcagtgaggttcttcaagacaactttttaaacatgagtagatctatgacttctcaaagccgggtaaaaaatgctgatcataaccagatattattgtaatagtatcacaatcatacgtgtgtgtgtttgtgtgtgtctgtacgtgtatatgtgcttacagagtgtatttgcagggaaatgaagaatgggatcaattgcttgattaattcaaatttatatcacactttaaaactgcaatgatctgaattattgtatgttccgaagataacttattaagccattgcttttttggtttctttcttaaattgtatttaaaattggtcaaatttcaaatattaaatacaggacttacactttttaaatatactttccacaggtcatgaatgtccataaaatgctaggcattcctatttccaatattttgatggttggaaattatgcttcagatttggaactggaccccatgaaggatattctcatcctctctgcactgaggcagatgctgcgggctgcagatgattttttagaagatttgcctcttgaggaaactggtaatctggcccttttctccccctgtcatagatcactggtgccttttgaaaaatcctaagttatacatcagttattagatgactggggcccacctgcatgccctagtcctgaaagctacattaggatatatgtttcatttccactcttgtttgtttcattttcaggtgcaattgagagagcgttacagccctgcatttgagataagttgccttgattctgacatttggcccagcctgtactggtgtgccgcaatgagagtcaatctctattgacagcctgcttcagattttgcttttgttcgttttgccttctgtccttggaacagtcatatctcaagttcaaaggccaaaacctgagaagcggtgggctaagataggtcctactgcaaaccacccctccatatttccgtaccatttacaattcagtttctgtgacatctttttaaaccactggaggaaaaatgagatattctctaatttattcttctataacactctatatagagctatgtgagtactaatcacattgaataatagttataaaattattgtatagacatctgcttcttaaacagattgtgagttctttgagaaacagcgtggattttacttatctgtgtattcacagagcttagcacagtgcctggtaatgagcaagcatacttgccattacttttccttcccactctctccaacatcacattcactttaaatttttctgtatatagaaaggaaaactagcctgggcaacatgatgaaaccccatctccactgcaaaaaaaaaaaaaaaaaataagaaagaacaaaacaaaccccacaaaaattagctgggtatgatggcacgtgcctgtagtcccagttactcaggatgattgattgagccttggaggtggaggctacagtgagctgagattgtgccactgtactctagccagggagaaagagtgagatcctggctcaaaaaaaccaaataaaacaaaacaaacaaacgaaaaacagaaaggaagactgaaagagaatgaaaagctggggagaggaaataaaaataaagaaggaagagtgtttcatttatatctgaatgaaaatatgaatgactctaagtaattgaattaattaaaatgagccaacttttttttaacaatttacattttatttctatgggaaaaaataaatattcctcttctaacaaa

SEQ ID NO: 446 - DNA, 17785 bp, Homo sapiens
ctcacagactcttacttggatgtctgtaaatccggctggactttcagcttctaagaacagtccgtttctcgaggatccaggcgcaggaggacagagcaatgggtgagagaactcttcacgctgcagtgcccacaccaggtaagtttgctcttaagctttacctttcaagtatatttgggttataacaaacaacaacaaattcccaagcgcagactgcacacggggagggttggagacttcacactggcgggtgacaaaggcagtggaggaacctcgcggggaagtctgatgctgcttgaacccctgagtgctttgctccgtgtggcccagcgtctctagacggtccacaggcggcgaccagaggcgcaccggtgtctccaggatgcgctgctcctcctcgggcttcctcccagagctgtggcattttctcctgcgaaataccatcatctagtatacatatacacattttttgcttgtttgttttattaattttctgtcccccactagaatatgtgataccctaccttgttttaacctgagttgactctcccttagctgaaagagccagacagtctgcatctcggctccttcacttgcagccccttacccacccgcttcctcagggacttaacttgtgcaagctgactcccagcacatccaagaatgcaattaactgataaggtactgtggcaagccatacccgcagttcccaggaattcgcccggttaacagcacccagagccccccgcgtttgtgtctggttgataaagcccaaagccccgcttctatcaccttgtgatagaattaaagcccctgcacctagtactgtttactttcctgtaaccatttatccttttaactttttgcctactttacttctgtaggattgttttaactagacccctccccccaacctctcctttctaaaccaaagtatagaagaaaatctagccccttcttcgggccgagagaattttgagcactagccgtctctcggtcgccggctaataaaggactcctgaattcgtctcagagtgtggcgtttctctgtaactcgctgggttacaacaaatagagctccaagaggcagaagtttgtatcaattatgttccttgcttgttgctgagaatctagaacggtgttaattagcacatggtaggtacgcaatactctttattaaattaatgagagagcaaattcttctggaatgcctggagccttttctaaccactcctcatctcctttttgtaacatcctgcccctatttattccaggagtggaattattctgccatcagtgccttgattttctaattctgtttattttatgcatcaccttgacaaggcatttttagcgttcttgtaagaatcataaataatgtacataacagatctgtactagtctttgacatgctaaactaaatatttttccatttgaaatgtacaaattttatatacatagaaattttatataccattaaacgtagaaatatatttatataccattaaaatgtagaaattttatataccattccacaagcaaaaagctaatatgtatgtgccttaggtagcccttagggatgacttcaagatcttgtattctactgagtatttttttctgggttacaggttatccagaatctgaatccatcatgatggcccccatttgtctagtggaaaaccaggaagagcagctgacagtgaattcaaaggcattagagattcttgacaagatttctcagcccgtggtggtggtggccattgtagggctataccgcacaggaaaatcctatctcatgaatcgtcttgcaggaaagcgcaatggtgagtgtggtcctaggacaggagccatttacttggaaccagtgataacacagctgatcacaccccctctagggtcatcctaaagaagggcatgacttctcccaatgaagaaaacttctaattctcaccactaaatttacaatctcaaatatatatcactctttagtccaatagtaaagaatcatctcaaccctatcgaaagatccgttccatgggtcttcttcatcccatctatgctcacctcttcaggggctcagccccagcaattattccctttctttctcattcatcacttttgtgtaggatacctggtcacttcaaatagcacacaaatatagtttaatagatcctgttttaaaaaataaatatgaagaaggacaggcattataattcttgtgtatcctctatttaaattgggctaccatttctaattttttgcttcatttcatggcaaaactctgataaattatattcccttctagttagtctttctaatatgtgaactatgacacataaagaagagtatgtacaacatacctttacagtgaagttaataaagtgaatacatgagaaatcactatccagatcaagaaataaaacattaccaaacctaaacatccaaaaatcataccctgtcataccttcactagaactcaccagtgtttttgttttcagggcacacttctttgactcttggtttttaaaaatggttctacataatatatatgcattctaaaacatagtttaggttggtctgcttttaaactttacataaaggaaattatattgtgtgtatttttggatgtcttgcttcttttgctcaataagaagtttataagttttctctagttactatgtgtacccattatttataccctcagacagtatgccactacctaaggacagtacatttatttattgttgaaaattggtatttttccagtttttatctttaatgaataaggctgtcattaatactcttattatttatatcctggtgcacatgtacaaaatcttcctttgtgtaatattctcagaagtgggatttctgaatcagagagtacataaaatttctagataaagtccaatagcttttcaaaattcaaatgcaatttacatgcttattagcagtgactgagaattttacatcctgcgaaaaattcagtaacataaagccttttaacttgtgctgccctgtagaatgtattgttgcatgccatttatttcactatgagtaagtttaagtaccttttcacatatcaattgccattttcatttcttattttgtgaaagctttttttttaaattattttttcctaccaggtttctcttttggttcttactgacttttaagacaatctacctatggctctgttaggtgcttctgtttttaaagaaagaccatgcagccatttcttccccctaatgtcctacttcctctctggctcagcagctcggcaccattagggactgaaccgctgtctactaaacaagtttaagaaagaaaacaagtttgagaaaattcttaatacatataaaggtcagattagttgtcctgcctgagatggaaacaacccttttcccctgtcagccacttaaacattcctacaagtttaaccggtgtaatcctgggacatcctggtctatccactgttactgtttgttatttttcctcttccctgcaggcttccctctgggctccacggtgcagtctgaaactaagggcatctggatgtggtgtgtgccccacctctctaagccaaaccacaccctggtccttctggacaccgagggcctgggcgatgtagaaaaggtaaggcagagaaacttcaccgctcatggttgacctctcatcttttaattttttcagctcccttcaacttctgtacatatctctgtaaactcaaatctaattatgaataatgaggctaaattctgtttcctcagacttccttattaatttcaagtattgaggcatatttaagagtagatcttcttatttttaacactggagtgaatgatataatttaataaatatgtattgaagagatgaattccagggctctgtactgagtactacagataaaacagtaaacaaggtaaaggccaagagcctagttgtgaagacaagaaatatggggtatgataagtacagggtttcacagatgcaaaaagtgagaagctagttcagtcattcgacttagagaaggcttgttggagaaagttgtaacccatgggaacaatgggatctactatttaaggcgtgtggggttggaggaggggaccatgaaaaaatagggttttagtgaaggaatctatttcagtagttttcagaaaagcattaattttatcactaacattttggttcaactctctgagctttggagattaattctccactgacttctttaatagcatgaattagacccacaaagaatattgtaagtgagataactttaggtattttgtcttaaagtgttaggtgcgatcagtccattcttcttatttgcattagtcttatgtctgaattgaaagtagcagcagtagatccttggcttccattattgaaaaaagggagttgagggaaggaagcaccaacttagcaattctgaactttaaatttcagtattaaaggtctgaattattctcttagtgtaatatcaaagtgaaacatttattcttaatatgttgtagttttcataaacttctttgtgtctaattacgtttgtcaagcgatcaaaacatatcaaaacataaactgatggcagcagcagaactactagctgaccttagaacttgtaatgtgatttggggaccatctaaatttttttaaaaaccctttcatgtcttgccatgaatcttgtttccagcctcctcttccacttcaccaacatgcatactcactgcttcaggcaaatgaaataactgtgtaatgcccttttatgaccatgctgtgacaattctgacttggcttctattgatctttccacctgctttatccgtccttcttcacaagtccacactctatcaactttttgaagtgcaactattttcaaactgctgccttcatatgcctgtcaaacataatcacttcttgctcctgaattcacagagtaactattcacatttatgtgcctccccctcccttctttttatttgttttatactttataactttgggttttcctcccccagcagtgattattattctgattgaatttgtatattgacatgtttatctgctgcaccagaaagccatcttcttgaaggcagggactgtcgtgaggaactttatatccacaaaaccaaatgcagggtctgcattttgtcagatacacaatgtaaagtttttgaacttaactgaatagcatttgtggccttaatatgccatgagtgagaacaaaattgcaatggaataattgcacgctgattacttggcacctattatgttctaggcactttattgaatgttactcacattgacaatgtcattcatttctgctaaatgaaccgatagcctgaaaaggattaatgtaaaaatctaaatatgaagtttgaattcagcattggcttcaaaatttgttatttaccctattattcaactatcatacagctgaaatagctaatgaacaaccaaatgaatgaatgaatgaatgaagagaatactcctaagtcttttgctttatatgctttctagagtaaccctaagaatgactcgtggatctttgccctggctgtgcttctaagcagcagctttgtctataacagcgtgagcaccatcaaccaccaggccctggagcagctgcagtatccttctgggaagtgaagagcaggttttatggggtttaggggaatgggaattgatactgtgtcttctttgctgtgactcagttgtcctggttgagtaagaaaagacagagtgcaaaagggaacgtgtataaaacttgtttctaagtgagatatggaaatgatggtgtagggtgctatccttccttagctgagatcccagctatgtgactgagctagcagagctaatcagggcaaaatcctgccccagacctgatgaagctgaggactccagcgagtttgcgagtttctttccagactttatttggactgttcgggattttaccctggagctaaagttagatggaaaccccatcacagaagatgagtacctggagaatgccttgaagctgattccaggtatcagagcatggcctggatgtgggaaggttcagtggggggtaggatcaactaagacctgctattcagcacctgacacaaatgtttacattagactggattgatttgaggcccatgctcatggtggttggtgattgacaagtgattatgatttttgtggttatttttacttgaaatttcccagaggctgaggttcaaattcattgaggaaatttaaaactcgaagttctatcaaatcattttagaccaataagtatcatgaaaaatatattgaggattacaattaatattatcacatcctaagactcatatatttgtgttacttattagcttcaaatgctcctcctattctatttggagaaattaactaataagcttggaagctggtaaacacagaatcacaagaagtcaaatgatctaactttggaagtatatttcaccctatctatttcattagcctggatagttacatcctttagagaaaaaggagatttatacagcaaacgatccaggaagttaaaaaaaaacacatatgcttccagtaagactgtcaaatccttcattttactattttcataacatcacctacttcattctacagcttcataaaatatgttgtcaatctattatacgtttgttaaacagactatatttagcagagtggatacctgttggcacctacaatcaatatccatctttgttcatttattcatcctttcaacaaacatttgttttgaataactgatatatgccacagaatccctctgcaagacaatgtgagacctaatgtaatctgacattgaaaggtggtgaggtctccaagttatatctgtattaactttactctggatttttcagataaaggaatctctaaacatatttatggtgtttataatttggggttctggttttgaaatactttttatttttattactgacttgggtatcattcaccttcatgatatttttctaagaaacatatttttcttatttctagcgttgctttaatttagggcccatgtttcacttctgacataggactgtaatatcagaaagtatttctgacaactgcttcatttaattaatcattcaaaaacatttaatacatagtctactggctagcatacaaaagccaaggaaaccagtcataagtttcttcattttgtggtagatgtcttcccttcctctccaagagttctttcctgactctcgctcctgtacaaaaatggattttccatgccttcattggattagcacaaggctgttttgtatgattgcataaaacaagatttacaaggcaggggagctgcagggatgcaaagatccctggaaaagtcctcagcccccttgcctgcaggctgtctcttcaatgagccctcttttttacaattccacaggcaagaatcccaaaattcaaaattcaaacatgcctagagagtgtatcaggcatttcttccgaaaacggaagtgctttgtctttgaccggcctacaaatgacaagcaatatttaaatcatatggacgaagtgccagaagaaaatctggaaaggcatttccttatgcaatcagacaacttctgttcttatatcttcacccatgcaaagaccaagaccctgagagagggaatcattgtcactggaaagcgtgagtctttttttgtcccaaagcatgtctgtctgtggtccaggatgtgttgaagctgtaatgactgcaagtttttcaataatattgtttgcttctgtataggaatgcagagaaggagatgttcattgcacacatagaaatgaatgtttcttaattaaagtttactcatgtgaaactttcttgaggcctaatatgtctcacaaaattaatacactaatggcataaacacaaactcctaaggagagaaatctgcatgatgaggaaaagtcctataggattagtgtttctcagtgaagatatataatatattttataaatttacattagtcaggaaatcaacatcaggccatgagttccatgcaagctcattgagagtttgagaaacaaatttaaatgtcatattaagtacggggctagcttcatggcatgcaacctgtgtagtcgtccactccctatggtgagatgggcctgtgcttggttcaatggtttatgttactgtcttcaaataaaaatttcttgtctccaaataaaaatgcaagttcccttgtaaagaataagaaatgaggggacttgcatttttatttggaagtaggactcacaaattatataacttactttccctgctaacaaactcatttatatggtatttaaatggaaatgtatttttccataaaacacaaaaacatattggttgcaatgggtaatttaattttgtaatgtgaatccaagagccataaaaaagagtgaataggaaaaatagggatgttattataaagagttgaattcatagaggaagatgaaaaaggaggaggaagagaataaaggagtgataagaaacttcaagataattagaatttttgtaatttttagaatgctgactcttaaaacttgtataaataatgagtaagaactgtaaattttccctaaatatatgtgattcagggctggggactctggtggtgacttatgtagatgccatcaacagtggagcagtaccttgtctggagaatgcagtgacagcactggcccagcttgagaacccagcggctgtgcagagggcagccgaccactatagccagcagatggcccagcaactgaggctccccacagacacgctccaggagctgctggacgtgcatgcagcctgtgagagggaagccattgcagtcttcatggagcactccttcaaggatgaaaaccatgaattccagaagaagcttgtggtacttttagcatttatccttcctgatttctgcccttccgaaatgatgcataaagtgtagctttttgaccccatggttcatctccttaccactgtggaaagaccatggtttcttgtgaataacagggctctatgggctataggtcacccttcttctagaggattgtcactttttttttctattgctgcaaaagaaattatcatgagtttagcagcttaaaacaacacacgttattagctcatagttatgtaggtcagaagtccttatcagggtgtctgggtactctgctcagtgtgccacaggctgaaaacaaggtgtcaaagaggcttagatttcatatagaggctctgggtaaacccatccatcttcaagtcagcaatgatgcatgaaatccttatgtttctaatttcactgaattcctcttctcacaccagctagagaaaaccacttttaaggggctcatgtgattaggtcatgcccaacagggcacactccatttctcaaagtcaacttgtgctacacaacataatctaatcacaggattagtatctatcatattcataggcccaggaactatgcaggtgtggataccaaggagtgagaaaccttatgggacatcttaaatctacttaccataggcatgtttactgaaagtttgtctttcagtctgtctcagactgacctaaaagtgacaataatctcttaattcatagtgataaaatgcaactggattgtaacttacaaatacaaacaaaagaaaattctgttcctgtatcctcacatatccaaactctcattgaagaaatacacagatggttcatttttctcatcagaatatgcttaattcattactgtgaagttgatttgccatatgtatattttttatacatagcaacctatgttttctggggaaattttgcttccagccagaattcaactttttactgctcattactggaggttggatccctattaatcatactatacctaaaagaaccatagagtttatgtcttctaaccacataaatttacagatattgagcctgacccctggggggttaaagggctttccacaggtcacacagatcacatagttgggaacaaaatcattcttgtgactcttggtctacaccatatcccagtccactctgaggccttcagactacttcttccaagaggatcacagttggaccttcccttctaacagcttctttctactgttttctctacatttttctggcaggacaccatagagaaaaagaagggagactttgtgctgcagaatgaagaggcatctgccaaatattgccaggctgagcttaagcggctttcagagcacctgacagaaagcattttgagaggaattttctctgttcctggaggacacaatctctacttagaagaaaagaaacaggttgagtgggactataagctagtgcccagaaaaggagttaaggtgaggaaaaggggaatgggggatggataacagaggatagtcagagggtttttgttgccccttctgaaaatctaagaatatagcaccatttgtggagaggaagcagaacatgatgctattttgagttttttagtatttaaatccacagttagttagacactcttaagaaatcagaaatatttcttctccaagaggatttaacatcatgaatccagatgaaacaacccatttattatatttattaattaatgggatagtttttgtgctaagtgcagaggataccttatgaagcaaacaactatgttttcagaagtgtattattttacctgagatggacaaattaatatttgactggatagggtacaattacggttatcgtactggtatgtactaatatgatgatgatgatgatgatgatcttgatgattcacttcctatatcagaggaagtgattttgttggattatcagtttgattctcggaataatgtaaattaggtaccactatcgtccacataggcagttgagaaatgtaatgcatggagaggttaataaagtgcctaagacaacacagccagcaagtggtggagctgatagggctgacctatgtacttgacagccattggaaactcagaatttttccttttgaggaaacttttgtcctgtgttccatgaggactgtaccaatttctgttcctacaaacagtttccaagaattcccttttctccatatctttgccaacacttgctatcttttgactattggataattatcattctaaaatgtgtgagataaaatgtcactgtggttttgatttgcatttccctgatgattagtgatgttgaccatgctttcacatacctgttggccaggtcttcttttgacgaaagtctatttagtttctttgctcattttttaatatatttattggttttttgagtgtttatttttgctatttagttatatgatttccttttgtattttagatattaacccagtatcagatttatggtgtgcaagtgttttcttccattctgtatggaagaaaattctttttcattttactgattattttctttgcagaaatttttagtttgatgtagtcccacttatttttgcacttgttgcctgtgcttttgatgtcaaatcaaaaactgagaatgtgtatttgtagaactgcccatttatgttgtcgggttgtctgcaccgggggtgggtggtgagcagcatccctgggagaggaggctggacaggcaggagggaggctggacaggcaggagggaggctgctgcacagggtttttatgacttaacaaagagcttggacttcttgtggctgtggaagaaaagaaaccactggatcttaagaattatgcaaagtttacagggttagatttgtgactttattgaacaataatttcgccatcataagatgagacctttgctgcctgacaggtctttgctctttcttggttcctcaggcaaacgaggtcctccagaacttcctgcagtcacaggtggttgtagaggaatccatcctgcagtcagacaaagccctcactgctggagagaaggccatagcaggtacaggggcagggctcagctatcagagggattgggagtttcctgcaatgccttcttgctgatcacactgaaagatattccagttaaaaggagcttcaaaagtcacaaacattgagttaaaatattaataagttctggataccaaatgtacagcacagcgactatagttaaaaaatatattgtatacttggaatttgctttctcttactatagaggagggagcttcctcccactatagaacatatactctgctaaatctcaaaatcgcaaggagattggggttgaacctccagccagtgccttcgcatcacattattcaacattctcttccagacatggctagtgagataattcagagattcccaatccctcacctttgtgcttttctccgagtcagtttgatctgagctcaggagggtagaactcaggaataactgtcattttcttccctctctaaaacctttgtggaatagcggagcgggccatgaaggaagcagctgagaaggaacaggagctgctaagagaaaaacagaaggagcagcagcaaatgatggaggctcaagagagaagcttccaggaatacatggcccaaatggagaagaagttggaggaggaaagggaaaaccttctcagagagcatgaaaggctgctaaaacacaagctgaaggtgagtctccgtgaagaatggcagtgcctgagggacaatgccctgcttctttaggaaaggaaggaccaaaattttaggcacagtcatgattccagaaggaaacacaaaagttgtatgtttcactaaaatctcaaatacatctaaattctactgaagcccgaaagtctacaagaatccaccatcttcttcttgttagactttggagagtacacatgacatctcccagggtcccaggctgctgtttgtggtgactacaggatggtctcactgtgccccaatgaaataggaccttagtccaccaatccttgcgatttttggcacaaccatctaaagtacctgaaatagatccatctggatgaaagtatcagatttggcttgatatgaaatgatactgaaagatcacaaattgctccatttgtttctgtatctgcctgattcatcctatacaactagagtaaaacatattccttgtcccaacctgaagcttgacaaccaatgttttatacagggtcagcagtcccccgttatttgctagatgagcatggccttgctacaccagtggaaattagaattaattagaattaaacctgcattccctctcgaagggcattctttgtgctggaacaaaatttctttctacctccagtgagatgttgcttagggaatgtcacaaaaggtaaaccatgtatactcccatgattcaggtccaatcatctggaaatgttacacaaattcatcaaagcgttttctaagataatagagaaatagacacatatgcttaaacgttgaattagttaaatacaaaactctgactcctgaagaaaattggagattttcaaaagtggactatttcccttttataggtacaagaagaaatgcttaaggaagaatttcaaaagaaatctgagcagttaaataaagagattaatcaactgaaagaaaaaattgaaagcactaaaaatgaacagttaaggctcttaaagatccttgacatggctagcaacataatgattgtcactctacctggggcttccaagctacttggagtagggacaaaatatcttggctcacgtatttaagagcctgaatattccaggtaagaaaatataaaatgaggtttattttattttaataacataacactgttgctcattttgtaagtatatgtgttatagcagtttcattcaagaaaagtttaaaattaaaaagtgattatcaaagaatatcagggcctgacatccacaaaaaacaaacttaattttgattgaactaataatttataaacatgggaaacaagtcagaagtagtgacattattcctagaaaagatttaaggaaagcaaaaagacaactggtaagattaagaagccattaaccatttgcaatttatattatagtcacagaaataatttcagttatgactagctcttgccgattaatgagaagagagcagctccacaatttttaatttttttaacttttattttagattcaggggtatatgtgcaggtttgttacataggtaaactgcatgtcatgggggtttggtgtgcagataattttatcacacaattattaatcataatacccaataggtttttttctgatcttctccctcctcccaacctacaccctcaagtagaccccagtgtctcttgttctcctctgagtatccatgtgttctctttgtttggcccccatttataagtgagaacatgtggtatttgggtttctgttcctgtgttagtttgcttatgataatggcttccagctccatccatattgctacagaggacatgatcttgttgttttttatggctgcatagtattccatggtgtttgtatataccacattttcattatccagcctattattaatgcacatttaggttgattccttatctttgctattgtgaacagtgctgcaatggacatacacgtgcatgtgcctttatggtacaatgatttatatttccttgggatatgcattcctttgggaataatgggattgctgagttgaatggtaattctgagttctttgaggaatcaccaacctgctttccacagtggctaaactaatttacactcccaccaacagtgtatgtgttccattttctccacaaccttgccagcatctgttatttattgactttctagtaacagccattctgactggtgtgagatggtatgcatttctgtagtgattagtgatgatgagtgatttttatatgctttttaaatgcatatatgtcttcttttgaaatgtgttcatgttctttgcccactttctttttaatggggttgcttgtttttcgcttgtaaattttttgaagcttcttatagattctggatattagatctttgttggatgcatagttggcaaatattttctaccattctgtaggttgtctgttactttgttaattgtttcattttgttttgtttttgttttttgaaacagggtctcactttgacacccaggctggagtgcagtagcacaaacatgggtcattgtagcctcaacctcccaggctcaagcagtcctttcacctcaaccccccacatagctgggactacaggtgcttacacccaagaccagttaattttttgtatttgtttgtagagatgtgtttttccatgttgcccaagctggtcttgaactactgagctcaagcaatctgcctgcttcagcctcccaaagtactgggatttaggcatgagccaccacatctggccaatagtttcttttgatgtgcagaagctctttaatttaattagatctcctttgtcagtttttgtttttgctgcaattgcttatgttatcttcatcatgaaattttagccaagtcttatgtccagaatggtatttcttaggttatttttcagagtttttatagtttaatgttttatatttaagtctttaatccttcttaagttgatttttgtatgcagagtaagctgggggcccagtttcaatcttctgcatatggctagccagtaatcccagcaccatttattaaatggggacttctttccccattgcttgtttttgtcagctttgtccaagatcagatgattgtaggtgtacagcattatttctggactctctgttatgttccatttatctgtgtgtctgtttttctactaataccatgctgttttggttactgtagctctgtagtatggtttgaggtttggtaacttgatgcctccccttttgttctttatgtttaggattgccttggctaggctcttttttggttccatatgaattttaaagtagtttctaattctgtgaagaatgtcattggtagtttgatagggatagcattgaactatttgctcaactcaacattttaggaatttatttctgctgtctagtgctcaaaacttgcagctagaattgagggaagagagagaccttcttatattgttttatattgtttgatactcagtacctgttttaagaaaaaacaacaaggaagtaaaaccaaagacaggcagcccagcgccaggcccaaaaccaggcctgggcctgcctggcctaaacccagtagttaaaaatcaactcattgcctgtaatcccagcactttgggaggccgagacgggtggatcacgaggtcaggagatcgagaccatcctggctaacacggtgaaaccccgtctctactaaaaatacaaaaattagccgggcatggtggcacgcgcctgtagtcccagctacacgggaggctgaggcaggagaatggcgtgaacccaggaggcggagcttgcagtgagtcgagatcgcgccactgcactccagcctgggcgacagagcgaaactccgtctcaaaaaaaaaaaaaaaaaatcaactcataacttagaaaccgatgttattcatagattccagacattgtatagaagaacatttggaaactcactgccttgttctgtttctctctgaccaccagtgcatgcagcccctgtcatgtaccgcctgtttgctcaaatcaatcatgaccctttcatgtgaaatctttagtgttgtgagcccttaaaagggacagaaattgtgcattcaaggagcttggattttaaggcagcagcttgctgatgccaccagctgaaaaaagcccttccttctccaactcggtgtctgagaagttttgtctgcagctcatcctgctacagaatgaactccttgtaattctacaagatatgccatgggccttttcacaggggacacaggcttcttaaaacaacccggcttcctcaccctatgtcctttatttacaaagctgtgctcctattcatgagcatggaatgtttttccatttgtttgtgacatctcttatttctttcaggggtatcttgtaattctcattatatatatcttttgcttccttggttagctgtatttttaggtattttagtcttcttgtggcaattgtgaatgggattgcattcctgatttggctcttggcttaatgttattaacgccacattttttaaatagacaaaaatatgagattaaaaatgttgaattttactaacaataaaagttgttcaaaggaaaactataaggttcttgtttcaactctgtcataggaagaacaggacagtgagctggcacagagttagggaaactgactgtgtctcatattggctagtgagagtgatctgttggaattgtatatcaaaattttaatgtacatacattttgtctagcaattctactattgggtatttatatagtacatataaatataaatgtatatgtttagtaaatatatacttatagttagtaaatatattttatatctatttagtaaatatactaaatgtcaggcctctgagcccaagctaagccatcatatcccctgtgacctgcatgtacatacgtccagatggcctgaagcaagtgaagaatcacaaaagaagtgaaaatggcctgttcctgccttaactgatgacattaccttgtgaaattccttctcctggctcatcctggctcaaaagctcccccactaagcaacttgtgacacccacctctgcccgccagagaacaaccccctttgactgtaattttcctttaccaacccaaatcctgtaaaatggtcccaaccctatctcccttcactgactgtcttttcggactcagccagcctgcacccaggtgattaaaaagctttattgctcaca

SEQ ID NO: 447 - DNA, 16550 bp, Homo sapiens
agtttctcttctcggccacctcctgcatagagggtaccattctgcgctgctgcaagttacggaatgaaaaattagaacaacagaaacatggtaagccacttctatttctttagcaaagctttccaacagaatatggggtttctgacccagaaatctgggttggtggcaaatggtgtgagcctagaaagtaataaatgggcaaataaggataaaaattaaagatcgaaacaactgtaaatgcaggtaaagcggcttgctatgatctttaatttgtgcacacgttagtataaaggaattagagagtaaattttgaaaatcaaatgcagtgatgatcttactaatttggacaggaaaataagaaaatttcaagttagaaattgaactggaaatattacttactggccctaccagagacaatatcctcttccagaacaacagggttggaagagaaggtgagggaaatattcttcctttgctatttctgtagaaaaggacaaactctcttccttcacatacataggtcaattgctagatcctagtgaagcctgagcttaacctactgttggaggcttaaagttcgacattaattgctacttttcttggtcagagttttaaataattaggttggtacaaaaaactgtgattacttttccaccaacctaataacatgctacaatttctgtaattattattttacactgtcaagacatagcaggtggtccgtttttgttattgtcaagaactgtcagactaaaaatgaactttacacttctttttaaatgatacattttctagaaaattcaatgaggtttaagagcaattgaaaagtctgatttcaagagagtctcatccaaaatgtactatatatttttccccaaagtccttggagttaattttgacaacaatttaaagtacacttaagtcttttgaagttaatgggtctgccacccaggttggagtgcagtggcgtgatctcagctcactgcaacctccgcctcccgggttcaagcgattctcctgcctcaacctcccaagtagctgggactacaggtgtgtgccaccacgcctggctaatttttgtatttttagtagagacggggtttctccatgttggccaggctggtctcgaactcctgacctcaggtgatccgcctgtctcagcctcccaaagtgctgggattacaggcatgagccaccgcgcccggcctgaagttaatttttatacccacctaatgttcattatggatcttgaaggtaaattaattctgcactaaaattttacaatgctttacaaaatgactgtaggtggcccatatggaattcggtcaactgggccaatgacacatatgggattgcagttgaaattatccaattcctacttgatatttgtaagctgctgtgatagccagtataattgtactgtaagaatgtggtaaatagccggggcccggtggctcacgcctataatcccagcactttgggaagccgacgtgggcggatcacttgaggtcagtaggtagagaccagcccggtcaacacggcaaaacctcgtctctactaaaaatacaaaaattagccaggtgtggtggtacgcacctgtagtcccagctactcaggaggctgaggcaggagaatcgcttgagcccatgaggtggatgttgcagtgagcaaagatcgcaccattgtactccagcctgggcaacggagtaagactctgtttcaaaacaacaacaacaacaacaacaacagattggtaaatagagtaataataaaatcaaattaaacttgcaaaaaatggccactttgctcccactggtggccaatggaggtcaaggacctggctgacctcctgcctaaaggcagaggttgttagccttcgcaatggactcaaatcagagggggagctttcaaaactcctgctgcccagactgaaccccagatcaatgaaaccaaaatctctggatacagggcttggcatttgtagcttttagagttcctaagtatctctactgtgcagccaaagttaagaatcagtgccttagaacatcaacagttttttggtccttttgttaaaaagcacagtccgtttttttaggtggctagaaatgctccaggaagagctgaaatgtatttaccagccaccttggtttgattttagaaagcaaaatagaagttctaagtatgctttctctgaaaagctgagactgcagataagagtgagggcagttgatggagttcattctcctctttcaatcactgcttctcatcctttcattataataatctaagaatctcagagattatgaaagagaaagcagtcttatggaagaccccagactcacagaatattagggtgtgtttcacagggaaggatgtcattacccacagttagtctttgaaacgcagttggacattatttgtaagtgcatcatagtgtcgcctccaggttccattgaggggaacgtcattccaatgcaacatctctgagttcatctgggttattaaatggggttgagggatttgttatttttaaattagtagccccaatttaggactactcaagaccataggacaagcctgtccaaccctcggcctgcgggctgcatatggccgaggacagctttgaatgcagcccaagacaaattcataaactttctgaaaatattatgcatttgttttttagcccatcagctactgttagtgttagtgtattttatgtgtggcccaagacaattcttcttcttccagtgtggcccagagaagctgaaagattggacacccctgctataagacacagtaatataaatacataacctgtggttctggattggcattagcagatacaggctgtgttgattttgcagaaagttacaaagagctgctagttggtgtgtatgtctaaaatcagtagatttcctgtggttctaaggaatgacaaagaatctggaagttctctgtggtagcctgctcagtgcagaaagggaacgtggaaaatccgccaccagcatttgagtcttggaggttccacatagggctatcaggtctctgctgatcactgaaaccagatcatggccaactagccccttggcttcagccctcccaattcattaactactcaggtaaatctagggtcactttcaactctaccacctaccatctgagtgaccttgaaaacattcatctctctgagcctcaggtcccatgtctgtaaagcaggggcctcatggacttctttgggtttttttgtttttgtttttgtttctgaggattaaacaaatgctccctaccctatttcccagcatccagtaacacagtttttcatatttttgtgtatgttaagtcaggacccatctctttaatgataagtgcacttaatgtggtcatgttttcttttgtcttccaaagctgttagtgaatccattgaatttgggatgggtaaaataaagtatctattattaattgtaaatttcatctaaagtgacaaatcctacctgcataaccatttcttaatttcctttcatcatgtatcagtggtcaacattgttaactgcgaatgaatcagaatccatcaaaaattagaactatttccagtctggcaaaaattcagctctggttgaatccaaacattgtgctgaagcagctaagtaattcaactgaggagattaattacatgttataatcaataggttctcttgacacttcagtgttagggaacatcagcaagacccatcccaggagaccttgaaggaagcctttgaaagggagaatgaaggagtcatctttgcaaaatagctcctgcagcctgggaaaggagactaaaaaggtaaaaagctgttaattccaggaagacagctttacgcccctcccagaccacctgcactgcacactacgtggaatttattttagtctcacatggcagcgtccctacctttgtgcccacacatctggtctccgccctggctgcagccctccccttcaggcgaattctgggtgtgtcctatctgctcattgcaactcccagcgaatgagttttcagcgaaggcagactttctgacctgttcttcaaactgcactggtcttttaaaaacgtgtttggtggccatcagcatccaatttcagaagaaagatttgggtgaggactgagagaggctgttgttgttgtgctgtctgtttccttcagaatctgcagaagaaaattggcaggtcatgtactgtggacctaaccaaaggacaaatgatgtatggaaaatagaaaaactgttgtgaaattgcttcctcattagcaataactgtatttggcagggagaggagaagttgggcacatttttttttcttttttttttcatgattcatacgttttctttaaagaagtgggttttgcttttcactgggtgctctaagacaaccccagtgaaagatctggaccacgaagacccagtcatcctcataagggtgttcattgcagcaagctcaagggcatgccaggcaaaggccttttttctggcagcttgaacttgtctcagcagagggtttcacagaacaactgtcatttacctgttctctgctcttacttgattcgtttcccaggactgctgaaacaaagtaccacaaacttggtggatcaaaacagcagaaatatatcctctcacagttctggaaaccacaagtcagaaaccaatgtgttgttggcagggttggttccttcttaaggggctagagggaaaatctgtttcatgctcctctcccagcttctggtggtagctagcaattcttgatgctctctggcttgccgctgcatctctctagccttcacctctcctcatgtgggtggccttctttcctgtgtgtctatttccaaattccccttttcttataaggggaccagttattggatcagggcccaccttaattcagtagatcccattttaacttgatgacatcagcaaagtccaaataaggttgtattcacaggtaccaggggttagaacttcaagttatctattaggggacacaattcaacctaaaaactccccttttttgattctctattctgccacttctactcaatccaggttcttcacttcatcagctcccaatctaatacttatcttatttctagtaagcatctcttccttatcttaactggtccctggggcctggcccgagccccattataccatcagctgttgacatcaagggtggacttctctttcggcacagaaggcacagggctgtaggcttcagccttctctgctttgctctgccccatctactgttcatccacctgctttccattttgctaaactttgtagaaaattcttgtcagctgttgtctcctcctacactttctttgatcttagaggattctattcttttactatggctttaatcggagcacccgactgttaggttcaaccaacagaagttggttgtgctctctcactctttctttctctctctctctctttctctctatttgcatagtggtattttttttttcctctattttattggcagaattgccatttctctaagttattgtagagttgctgtttctctattttatttgcatatttctcttctgccaggctggattgtttctattgattggttctgctgtaatgagggtgacttctcattagtatccttctcacttcatctgggaccagatgccctttgatatccttttggagccacaacttttggtagtcagaggcatgggtgtggctcaaaggaagaacttggctcagaaggtgcagctcttgctgggcctttggtctctgctctgtcttctgagatcagtggctgctgggacctggggttcccccatgccgggcatggtcacacagcactcctatggacttgagcagagcaccctgcaaagtgagcattagcaatccattccaactctgtgcagtcctgcacggaatatagaaggtggagcaatgacagtctccccaacttctctgcaagcaacctgctcaccatttcttgcccttcccatttatgtacttttcaaaatcaggttatttggaatttgtcgactcatgtttcttacttcagtacttttttgggagggcagcattagaaacctcaaactcttaactaaaaaatgtctttgggaatgttctggccattttcatggcccacaatttgctttaagctgctttagactctcccagaggctattttcatcccgaaagaacagagcagagctcaaaagactccagttttggtctctagcagcccctagaggatttccccctcaattcctctctgccttgtatgaaatagaattggatttgaaatcggatgttgaggccttacctccaggctagtgaggccacacaagatggatcctctggacccgcccaagtgtccacctaaacatgagttaccaactaacaatgttttgtttagcatgcaaagggagtggtctggaatctggccttgccctgacatattctccttgggcctttttaaaaaaataatttgtgttaatctgtagttaaaaattataataaggacctgacaaacactacctcagtcagatgatcaaggtacacataaatagtgaaagtcatgttgatagcatgcacccttcatatgatatggctagaatggccctgcacttctgtgatcttcctcccctagactcatcagctcgatctaatcataacaaaagcatcagataagtccccgcccagggacattctacataaccatttcccttcccagttatatttttctccacaatactttccaccatctaacattctatctttcaaaatgggcaagtattttagcctggtttgttcattgttttatctgcaactcaaatacagttcctgaaataaaatatctgcctaataaatatttaatgaatgaatgaatatagcattgccttatccgtttaattgccacatggtatttcattgtgtgaacataatatcgtttatttacccagactactactcataggcatttagattatttccggtcttttgctattgctaacagcctttgcaatgaacatccttgtatacagacatttgcatatatgagggtgtgtctttaggatctacttctagaattgaaattgccaactccaagtatatgtttccaattgtgatagatattacacattaccctccatcttagaggtggtgttaatttagattcctgccagcaaaatttaagagtgtttgtttccccatatcctcaactgcctaacagaatcagtgaaaaatggtatgacagtgtaatttttgagtgaggttgagtatcttttcctatgctttaagagcaatttatgtttcctttttatgtgaactgtctgttaatatattttttcaatttttctattgggttatttgtcttttcattaatgcatatacctgttacatatttataccaagtatgtattaaatactaacatattgatgaaacagagcaaaaagcctagaaatagatccaaataacagaagagttagtatgtgatacaggaagcctataaaatcagtgagcaaaagaccatccaattaataacgttagggtaaatgggtctccatttagaaaaaaataatgtgggtctacacctcacattttatacctaaacaattccagtgggataagaaaatgaaatcataaaaaattactaggaaaaagatgagaaaattgttcataaaactgaagtgtggaagatcctttatgccttacactgccctgagtgatctcattcatacccatggcttcaattgtcatgaatcccaaattcattcctctgtcagaactctcttctgagcttcagacccacatactcagctgcctactggacacctctacttgaatatcacaaactcaactcaaaagcaaacctgtcaaatttaattactagtagccctaccccaaacaatcttcctgctcagtgaatgacacccatccctccaggtgcacagaccaggaacctagaagtcactctgattgcatccctctccctcacaacctctacctccctttattcatccattgctatgtctctcaaatgtacctcccaaatatctcttgaacgcgttcttttctatctctattgccaccaccctagttcaaactcccatcatctcatgactgaagttctgtgccctcttgccagtgaacactgtagaatcaatctaaacatggtgccaccctgcttaaaaaccttcaaaggctcacatcacttctcagatgaagagattggggagacgttggtaataggacacaaaatttcagttaggcaggaggaaaaagttctattgaagaactctattgtacaatatggtgactatagttaataacaacatattatacacttgaaaatcactaagagagtccattttaagtgttctcatgaccaaaaaatgataagtatatgaggtaatgcatatgtgaattagcttgactgaggcattctacatgtatacatatttcgaaacatcatgttgtacatcataaatgcatacactttttagttgtcaatttaattaatattttttaaacctactctggcctttttttccttttttgagacgggtggtctctgtcccccatgctagagtgcagtgcgcaatcatggctcactgcagcctccacctcccagtctcaggcgattctccagtctcagcctcccaagtagctgggaccacaagcatgagccaccatgccccgctatttgtttttgtattttttgtagagatgggatctcgccacatggcccagtctggtgtccaactcctgagctccagtgatccacctgcctcagcttcccaaactgctgggattacaggcgtgagccactgtgcctggtccactctggtctttactcaagtccctggctttctctcagtctcttaaacttatgtgcttagtaagatgaggactgaaaaatgtccacagaacatagtgacatggagatactgagaacctcaacgacatctccattagccacttcctctgtgccattccagtcctctgggccccactgtggcaagcagtcctaccatggcaaacatgaaagctgatgtgccttgtcttagacccacaccatatctctctgaattcctgtcccagggcttctctggaggtacagcctgggaaactcacgggaatagacacagggcctttgcacatgctgctcccttttcctgaaaaattcctttgacatcttggttgtgccttacacatgcctactcaaccttaggattgcagttcaggtttcactccttttttttttttctttttgagacggagtttcactcttgttgcccaggctggagtgcaatggtgtgatcctggctcaccacaacctctgcctcctgggttcaagtgattctcctgcctcaacctcctgagtagctgggattatagtcatgcaccaccacgcccagctaattttgtatttttagtagagacagtgtttctctatgttggccaggctggtctcgaactcccgacctcaggtgatcggcccgcctcggcctaggttccacttctttatggaaatcttccccagttgccttgactaggccaaagtcccctcttcttaggctcttacagtgtcatgcacttcttttttatcacagtgtaaaccttgtaatgttgtgtttaagtcatatctgttgtacccatgagactgggagccaattcatatattgtgagtgtaatcgaacagacttcccaggccacccactagctaatcaaggcagggatgagtccggaaagtgactttgaaatctagcaatgttggaacttggaaatcacacaggctgagatctgctcaggtgcctgaacaaatatagcattgcctgtggcgtctccctcaaagtgccttgcatgtctgagccccgttgccccttcctttggtgtgcctgtgtctcccggtacagatgtgaagcctggagacctgtggctgcctctgcaggagctccatgttttcaagccataaatcatcttagaattcatagcatctagatatattagttttctattactgcagaacaaatcgctcccaaatgtagaggcttcaaagaatgcccattgattggccttaatttctgtaagttagaatctgggcaggtttgcctgagttctccactccaagtctcataaagccaagctgggctgtcatctggaggctctgagtaaaaatttgtttccaggttcatccagattgtcaggtgatttcagttccttgcagttgttgttcgactcactaccccaccaccaccccgaaaacctcatttccttgctagctgcctgcagagagccactctcagcttccacaggctgcttgcattccttgttgtggggccgctacctcctcaagccagaaatagggcatccagttcttctcatgcatcctacccctctgacttttccttctgccgataaccagaaaaaacgttccgccttcaaacgctcgtatgattagactaagcccatccagataaattcccatatgccatatactataatgtcatcacagcagtaatacccgggacaaaattcatgggggtcatcttaaaattctgcctatcacaccaggtatagtagaggcttgttttagtgcaagttaaacattaagcagcaacatcacgatagtgctgcatttgaaaataactactagcaactgaacatgtctgggagttctgctccactttaatttccatctcaaaaggagctgggttttccttggctgttacaaatgggcaataatgattgagcttaagaataatcaatgtccacataaaaatcttttataacatagtgagagtgtgacatataaaggtgttagttcaccggccctaaattttaggagaatttttaaaaaggcacttatctggtttaatccataataaagacatgagttgggctttagtgaaaaatctaggctggtttctgtgttcagtgaaagaagatttgagagttctcttaattacaacccttgatcaaacctaccacattaatctgtttattgcattgtatggttaccaaaagtgatatattcagccctctatttattaagaaacagttacagaaagtgaggcactctcctgtgttactgagggtgcataaaaatataaagcaccatgtgtcttccctagagaagtttcaaaactagcaagcaaatagctattaatgctaatgtttgtgtgatagggaacatatgagtagtaattattccacaaacaattttttgagtgctgtttacatttgaggcacagttcaggcacgaggatttcaaaaggagattgtgtagcatgatggcttgttaaaaatatgattttggaatcagatttgctcaagtcccagtgctacagcataccatccttcaaaaaggtacttaagtctctgagtttgttttctcatctgcaaaatataaataataagaggacctactgcgtcatgttcttgtgagcattaatgtgggtgatgaaatgtttatgaagcacttagcacaatacctgacattttgtttgttattattatcaacataaagtgcccactttccagtcatgcaagaagaaaacataatatatgtcaccatagaagtatagaacaattgtgggaaataccagtaagagagatatagctgtataaataaggtaaagatgactgcctagaagatctaggatgataccatattagaagttgcatctgaactctccttggggactggccaaagtttcatcaagtgtcatgtcagtaggttggtgctataaatatatagcttgcaaagctatagacttactataaaccatagctgtggtccagcttagactcattatggtggtggagtatcttgattaatggcctctgcagaagcttcccaggtcttctcatcatcataatctcagatagcttcatcttcaacttccttttttttgttgtttttgagacagggtctcactctgtcatccaggatggagtgcagtggcacaatcatggctcactgcagcctcgacctcaggagctcaagccatcctcccacttcagcctcccgagtagttgggactacaggcatgcaccactacgcccggctaattttttcatttttttgtagagtcagggtctccctatgctgcccagtctggtctcaaactcctgggctcaaaccatctttccacctcggcctcccaaaatgttgggattacaggtgtgagccaccacacacagcccatcttcaacttcttttagcaccatgaagctgaacatagtaaaaaagtaaaatcattctggacctaatctgatgcaatttatttaattgttaagtgaatgcacacatcaaaattcatacaagtatggggcagcgctgctaatttatttacaaaacacctggcaaatactgctactctaatactgtgcttccacttttgattttccttaggaaaacatgttccttcagtcgtcaatgctgacctgcattttcctgctaatatctggttcctgtgagttatgcgccgaagaaaatttttctagaagctatccttgtgatgagaaaaagcaaaatgactcagttattgcagagtgcagcaatcgtcgactacaggaagttccccaaacggtgggcaaatatgtgacagaactagacctgtctgataatttcatcacacacataacgaatgaatcatttcaagggctgcaaaatctcactaaaataaatctaaaccacaaccccaatgtacagcaccagaacggaaatcccggtatacaatcaaatggcttgaatatcacagacggggcattcctcaacctaaaaaacctaagggagttactgcttgaagacaaccagttaccccaaataccctctggtttgccagagtctttgacagaacttagtctaattcaaaacaatatatacaacataactaaagagggcatttcaagacttataaacttgaaaaatctctatttggcctggaactgctattttaacaaagtttgcgagaaaactaacatagaagatggagtatttgaaacgctgacaaatttggagttgctatcactatctttcaattctctttcacacgtgccacccaaactgccaagctccctacgcaaactttttctgagcaacacccagatcaaatacattagtgaagaagatttcaagggattgataaatttaacattactagatttaagcgggaactgtccgaggtgcttcaatgccccatttccatgcgtgccttgtgatggtggtgcttcaattaatatagatcgttttgcttttcaaaacttgacccaacttcgatacctaaacctctctagcacttccctcaggaagattaatgctgcctggtttaaaaatatgcctcatctgaaggtgctggatcttgaattcaactatttagtgggagaaatagcctctggggcatttttaacgatgctgccccgcttagaaatacttgacttgtcttttaactatataaaggggagttatccacagcatattaatatttccagaaacttctctaaacttttgtctctacgggcattgcatttaagaggttatgtgttccaggaactcagagaagatgatttccagcccctgatgcagcttccaaacttatcgactatcaacttgggtattaattttattaagcaaatcgatttcaaacttttccaaaatttctccaatctggaaattatttacttgtcagaaaacagaatatcaccgttggtaaaagatacccggcagagttatgcaaatagttcctcttttcaacgtcatatccggaaacgacgctcaacagattttgagtttgacccacattcgaacttttatcatttcacccgtcctttaataaagccacaatgtgctgcttatggaaaagccttagatttaagcctcaacagtattttcttcattgggccaaaccaatttgaaaatcttcctgacattgcctgtttaaatctgtctgcaaatagcaatgctcaagtgttaagtggaactgaattttcagccattcctcatgtcaaatatttggatttgacaaacaatagactagactttgataatgctagtgctcttactgaattgtccgacttggaagttctagatctcagctataattcacactatttcagaatagcaggcgtaacacatcatctagaatttattcaaaatttcacaaatctaaaagttttaaacttgagccacaacaacatttatactttaacagataagtataacctggaaagcaagtccctggtagaattagttttcagtggcaatcgccttgacattttgtggaatgatgatgacaacaggtatatctccattttcaaaggtctcaagaatctgacacgtctggatttatcccttaataggctgaagcacatcccaaatgaagcattccttaatttgccagcgagtctcactgaactacatataaatgataatatgttaaagttttttaactggacattactccagcagtttcctcgtctcgagttgcttgacttacgtggaaacaaactactctttttaactgatagcctatctgactttacatcttcccttcggacactgctgctgagtcataacaggatttcccacctaccctctggctttctttctgaagtcagtagtctgaagcacctcgatttaagttccaatctgctaaaaacaatcaacaaatccgcacttgaaactaagaccaccaccaaattatctatgttggaactacacggaaacccctttgaatgcacctgtgacattggagatttccgaagatggatggatgaacatctgaatgtcaaaattcccagactggtagatgtcatttgtgccagtcctggggatcaaagagggaagagtattgtgagtctggagctaacaacttgtgtttcagatgtcactgcagtgatattatttttcttcacgttctttatcaccaccatggttatgttggctgccctggctcaccatttgttttactgggatgtttggtttatatataatgtgtgtttagctaaggtaaaaggctacaggtctctttccacatcccaaactttctatgatgcttacatttcttatgacaccaaagatgcctctgttactgactgggtgataaatgagctgcgctaccaccttgaagagagccgagacaaaaacgttctcctttgtctagaggagagggattgggatccgggattggccatcatcgacaacctcatgcagagcatcaaccaaagcaagaaaacagtatttgttttaaccaaaaaatatgcaaaaagctggaactttaaaacagctttttacttggctttgcagaggctaatggatgagaacatggatgtgattatatttatcctgctggagccagtgttacagcattctcagtatttgaggctacggcagcggatctgtaagagctccatcctccagtggcctgacaacccgaaggcagaaggcttgttttggcaaactctgagaaatgtggtcttgactgaaaatgattcacggtataacaatatgtatgtcgattccattaagcaatactaactgacgttaagtcatgatttcgcgccataataaagatgcaaaggaatgacatttctgtattagttatctattgctatgtaacaaattatcccaaaacttagtggtttaaaacaacacatttgctggcccacagtttttgagggtcaggagtccaggcccagcataactgggtcctctgctcagggtgtctcagaggctgcaatgtaggtgttcaccagagacataggcatcactggggtcacactcatgtggttgttttctggattcaattcctcctgggctattggccaaaggctatactcatgtaagccatgcgagcctctcccacaaggcagcttgcttcatcagagctagcaaaaaagagaggttgctagcaagatgaagtcacaatcttttgtaatcgaatcaaaaaagtgatatctcatcactttggccatattctatttgttagaagtaaaccacaggtcccaccagctccatgggagtgaccacctcagtccagggaaaacagctgaagaccaagatggtgagctctgattgcttcagttggtcatcaactattttcccttgactgctgtcctgggatggcctgctatcttgatgatagattgtgaatatcaggaggcagggatcactgtggaccatcttagcagttgacctaacacatcttcttttcaatatctaagaacttttgccactgtgactaatggtcctaatattaagctgttgtttatatttatcatatatctatggctacatggttatattatgctgtggttgcgttcggttttatttacagttgcttttacaaatatttgctgtaacatttgacttctaaggtttagatgccatttaagaactgagatggatagcttttaaagcatcttttacttcttaccattttttaaaagtatgcagctaaattcgaagcttttggtctatattgttaattgccattgctgtaaatcttaaaatgaatgaataaaaatgtttcattttacaa

SEQ ID NO: 448 - DNA, 102515 bp, Homo sapiens
aggaaaccgaaactcccgccggatgcataaaagactggctgcggtggctcagagcgccgagtcctaggccaggtctggggtaacctggaacttccacctgggctctgcgctaggtctctgtttcactccctccccgcggggcgcgcagctcgcgggtctttggacaccaccggtcctgagtccgcggtgaggagccggggatgtcccttgggaagagcctggggcggagctgtctagcgggagttctaggtcttcttcaacggaccggacagggaggtggcccaggagtgctgggctcggggcgcgggaatctggggaacctcctgggatcgcaaggccgtggcgcacgggccccctgctggcccggaaggccgggcgtggggaggggcggaggaaagggacaaccgcgaaaggcctgaagtctgagacagagaggagtgcttagttaggcatttaaggagtccccgtcaaaggtgggagctgggtaatggaggttgaggagaaattaagggacatcatatctaagcacagccagtaaaacctgtacattgacagcagcaagaagcttccaccttcaatccctgctccagacttgtagaatcagaatctgcgtttattaataagattcccccaggtaatttctgtgcacccttaaatttcagtggcttaagacaatagaaatttatttcctactccagtaacttaatttattcctggtcaaggggcaggtatagtggcttaaaacattacaagtttattattttacaattgctgtggatcagaagcccaggcatgggtaaagtgagttctctgttcagcatctcatcgagctgaaatcaaggtgtcagagctgtggcctcatgggacaccatggatgctcattcaggttgttggaagaattcagtttcttgcagctaaaggactgaggttacctgctttcttgctggctgttggctgggggttcccatgtctttagatttcaccctgagatcttagctacagtggccttctcacaacaaggtggcttataccgttaaagaaggtatagggtacctttaaagaaggtataagcctctttgggggaatctcccgagtctactatgatgaagtcttacataatataaccgaatcattaaagagactatgccattaaattcacaggtcctgtccacactcaaggggagagggttataccgggtactggaagccattttaacccaccagctcttctccaggcagggtttcaggagcttgatgcctttcatcaagtagctccaccattctgttccaatacagaatccatgatttcctttcccttcccttgcccccatttttttcctctttacctcccctttgcgcctttcctcttccctccttttttctcttttccatttctcttcctcccttcttcttttcttcttcctttttaagattgtttgaatcagaatatggttctgacactactgtgattggaggataagccttataaggttcttgcaatttctttcatccccttttaatttattcgtttgtaagatttgtggtcttatgattgtttgtttttgtatgtgtgtgtcctgttgggtgtgtgtttatgtgtgtgtgtgtgtatgtgtcctaatccctgtggtgtcatttaacatattttgctggcctctaaatttcttgtaaattaatcattactactagcgttttgatcagattcaggttttcttttttttcttcttcttctttttttttttttttttttgagacggagtcttgctcttttgcccaggctggaatgcagtggcttgatctcagttcactgcaacctctgcctcccaggttcaagcgattcttctacctcagcctcccaagtagctgggattacaggtgactgtcaccatgcccagctaatgtttgcatttttagtagagatggggtttcaccatgttggccagtctggtctcgaactcccgacctcaggtgatctgcccgccttggcctcccaagttttgggtttcttttttttttggctgggagaactacaatacttcactgatggtgtggacacttgcctctatttttgttgtgctatcgtttaaaaataccaagatctgttaattcattaggagttgtaaaatggtgatattctaattctatcattccttctgtgtttattagctgcattatttctagaaatgaatcactcttgtatctactctttggtaatgcgatggtgcagtacttagaagaaaagcaggataatttcttgattccataaaccattattttttttcatatattgtcttcagatgctattgctggacatcctgctgtgaaagatgaagaatttagcattcatatttatttttctttcattcatccctttgtgaactgccaagttggttaattatattattattttcatactgtcaaggtttatcatattttacagcagtttgtgactttgattcttgtgatttgtttgtatgttgagtcaacagtaaaaaagaagtaaacagcagtgacaaaattatgagtatgtacacattactcagtgtagaagcaatctaggaattgctaggctaagacatgtagttctatgttgttaaaattactgtttgaaatagacttttgtaaattcgaagtaccatgggttctcttgtttttctttatagcttcctttaacttttctaaatcacacaaagtttcatggttttttgattgtcttcattcttgatgggttttccccaattttctgtattatctctttaaataaaattatcatttaagatatatagttggcattttggaagacagcgtggccattcctcaaggatctagaaccagaaatactattcgacccagcaatcccattactgggtatatacccaaaggattataaatcattctactgtaaagacacatgcacatgtatgttgattgcagcactatttacaatagcaaagacttggaaccaacccaaatacccattaatgataggctggataaagaaaatgtggcacatataccccatggaacactatgcagccataaaaaagaatgagttcgtgtcctttgcagggacatgaataaagctggaagccatcattctcagcaaactaacacaggaacagaaaaccaaacaccacatgttctcactcataagtgggagtggaacaatgagagcacatggacacagggaggggaacctcacacactggggcttgtcggagggttgggggcaaagggagggagagcattaggtcaaatacctaatgcatgaggtgcttaaaacctggatgacgggttgataggtgcagcaaaccaccatggcacatgtatatctatgtaacaaacctgcatgttctgcacatgtatttcagaacttaaaataaaaaaaggatatatggttggtgaaatttatgacttcttagaagtctaattacatctttttgcctcctccatgaattgaatcactatttagatgcagaattctaagttcaaattattttccctttagaaatctgaaagtgctttattttatcaaaacatccaggaatgttgcttattttaattaattctgtgtgccaggtattattttaatcaattcgtatccatcagttcatacatttaagtagcttgaaaacacaatcagaggtgagtaatattattgttccaattttatagataagtaaattgaaactcagagatggtaaataccttgtctaagcttatagaactatagtatatttcagaaccaagattaaaatgcaagtagtcggccaacagtgttcatttcttaaaccagttctcatatggcctgacttccatttctttgtaccttttctgtctttctctttattcttggagctctgcaattttaacaagttgtgcctaggcgtagttttctcttttgtcattatttctactcagtagttagagaaacatttcaatctaaacacattatgttgttctttagttctagtctaatattagtatattagtttaagtatatatctttgattatttttatccccactcattttggaatcttagttatctcctactagaaatattagtagggggagaaagagcttattgacttattcctggatattttagtatttttagaattttttcatctctttgtcttttacttttatcctttacaaaatttcctggactttaaccctacagatcactgactaaaaattccagcatgctcattttattgttctgcaatgactttcttccttgtaaaattatgttttaaatgtgtacgaatacttgcatgctttctttttctctttctctctctctagcagcctgttactattttatgagaaatatttttaattctttgaaagcagtaattagaaaattttgaaggtcttttctgtctctgcatcatgcttattcatctggtttcttatttttgctttttttgtgtgcctcaaatgtctattggtactaatttgtgtgtgtgtgtgtgtgtgtgagtgttcaatcattagttactacaggtggctggatctctagcatgtctctcccttaaatgacagagaagtggggataatgactgtgaattctgtttaggtgttagggcgtgcatgtgttggggcagaggttaatagggtagctctagtatagggtatataagaggaaagcctagggtgtgtaagcctactttagtatagggcatgtaagaggaaagcctattaggctttacacgcattgtcttgcataccctgtcctatgtcatgcagagcaacctgtaggatctcaaacttcccataggcaggctacggaatcccttgattgtcaaattaaggagggattgcccattaacgcagttttattttgtcaccatagctattgctgaaagtttcacagtgtttaacgggcactcacgtctcagtcatagttatatttcattataaaaactatattattccttttaatctatgtatattatttcttaaaacaatttctaagttgtcaggacataaatagttattaatttgtttgtatctaactacttaataaatgaaacggttagctattgattttgtcctaggagtggcataaaaaaattcctgagactctaagagcatcgtgaacatctgggaacctgtaaattaacttatttcatcttgtagaatctgatgctatcctttctgaagttttctgtaatatacttggggttaattctctcttgcctgttcagttctcactgacccatttttttccatttgagcttggtacaatttggagagttgaagaaagatagtatggccaatgcacagttagtgaggtggaggattgcatgaaatgggtgacagagagttttttgaaaatacctaatctcctgacctgggcacaagacccattatagtctggttctaacctacctttccaatgtcatctccaatgagtcaccctgtcctatgccatgtagaacaacccataggatctcaaacttgtcatgtagtttcacaactttatgcattaaactgatgctgattttgctacctgaaaagtaattctctatatctctcactttccccaacatgctttcataagtcttcatcatcttttcaacctgttcttgaaacctcagaacacaggaccctgatcccttcattctgatttaggaactccctctcaattctctaatggcttcctgtgccatttctgctagaacacagcaaattagatgtagtgtgtcacttagttatctttcaacttacactgggttgtacaaggagagaatcatgcttcatgcatatttgcatatgtttcagcaagtacaatgttttgtaaagtgtagatactctataatctttgaaataagatagtaactgagtgagtgagagaccatacttacgctcgtgtctccattaagggtccctaaactccccagcccacagtaattccatttttctttaaacttatttgtcattacagtcatatacttccttgcattattattgtaatatttaatatcagcatgtgcatcaccattatatgttccttactatcatggaataggaatctctctctctctatcatatctatctatctatctatctgtgtatccatcatctatatctatctatatcaatcaatctatctactatctatccataaatcatgtgtgtatctacctatctgtttcatagccctaacatattgaatggcaagtgtctcaatatttagtgtccatgacaaaatgctcaagtgcattttcatctacctctttagtattttcttctctattacctttgtggattcttcctcctctcttgatatattaagtattagtatcttcaaatgtgggtttttagtactcttctcccatgatgctgtctctccctgtccaagcaagctcatctacaccaatggcctcatttaccgttaatactcagatgacttacctcttcaaatctagtccagactttgtatttgtcctctagacttgtatattttactacttacatatcatggcttatggggaatcttgaaagcaagtcaaattcaggtggttcacaaatgccgccataatcttttcctgacacgtagccttgttctaaaattcccagcccagggaatggcctagtcatccatcctgttacttgagctagaaacttgtgtcatccttgacaaccccctttcctctcttgtccatccacatccagtccagttccaaattatgtcaagctcatctcctaaatgtccttcaagtgagtccacatctctccagctttattatctcagctaccatcaaactatattacatcaaattatcatcattactctcctgcacagtaactttctttctgctctactaagaagcttactcccatcctgtttattctctatattgtagctggactaatcttttcaaagtgcaaagccaatcacaataccacctgcttaaaatccatcagtggctaacttttcattctaggacgaaaagaaaattctataacatgacttcaaaggctctgcatgtccttctatttctcttgtcctctctagtcttttctttgatggtctccactccagccctactggcttctttctggaatcaatgtcacccacaacccttcacgccactgagcttttacacatggtattctggtatttcctctgccagaaatgctactttttctctttttgcctaattaattattgtttatttcttagaactcagctcaagcattatttctttagggaaacttcctctgacctcttgactttgtcgtttttgcaatgttccattgtttctatgattatctgattaataattatctttaagctctgtgagaactgtcagcaatgttgatttgttcattcttgtattccttgtgtctaatattttgctttacatatagtagtcattcaatacatgtttgttgaataaagactcattttcttttctttttttgcaggactgccattttcattaagaactgccacttagaggtaccaaaataaagggtatttgctacctttaatacttgccagttcaggttggaggcacaggcagcagcaagaatgggtaattttccacttaaaatatttatagattataaaacaatgttaccctgtaaactacatagatttaatggaattaaaataaccacattactgttttactttcttgaataataactaaatgatagctcctgtaaaaaggaccaattgaaaaataacccattctctttctctctttttttttaaatttagaaagaaatgttcttacaacattttcacaggaaatgtcccagttaattttgaatgaaatgccaaaagctgagtgagtattattatagtaataaagacgggaaatcatagctcatgttccctgtatgtctatttggccttatgctgatttatagacagttgaccattgaacaatgtaggggctaagggcactgaacaactatgcagttgagaatccatgtttaactttttaaaaattattgttaattaatttttatatattttttctaaattcatgccagccggataatgagataactttgtaacaaggattgagtagggcacatccaacacatacacatgaaaacccaatcatcacatttatgaactacaaaaggatggtgtttaactttttactcctccaaaacttaactgcaatagctttctctctgctctaccaagaagtttgcacccatcctatctattgtctatcttgtagctggactagtcttttccaaatgcaaagcccatcgtaatgccacctgcttaaaattcttcaatggctaatatttgattctgggatgaagagaaaatcccaaaacatgccttcaaaggcttgcctgccctcttgtttctctggtcttagtatagaaaattaagaaaatcataaggaagcaaaaatgtatttattaagtgggagtggatcataacaatagtgacatcttcaatggtgccatccccccagacttccatgatgttctgtctatcagggttctcttccatagcattgacaattctttccatagattactgtgtgtaatgagccttaaaggttcttatgacactctgatctaaaggctgaattaaagacattttgtttgggggcgagtagaccacttcagcatcgttgtgttgaactcatggagttctaggtggccagggacattgtccaatatcaaaagtactttgaaaagcagtctccctcactggcaaggtacttcctgatttcagggacaaagtatcaatttaactaattcggaaaatgtgtcctcattgtccaggactttttgttgtacatctgagagactggcagctggtgtttatcttttcccttcgagtctcaggagttggcagctttacagataaagacaggcctgaagataaaaccaacagcctttacacaatacagtagagttagcttatcccttcctgctctaaatcctggtgctcacttttgttttgtactaataaatattatttgtgactttttttccagaataatttcatttgcattaaaaacctattcaagcagatattctttcccctcaatgattttcttctgtctcttagctggctgaaactgcttctcttgttatcttgacatttttaaagccaaacttctttccaaaattatcaaaccatattgtgctggcattagattttccagttttagatatttcgtcttccttttgctttgtcatatactttgctttttcttgaatcatattagagtctataaatttgcctttttagataatcccacacccacataaaagctctattttcaatgtgagattaaaaaaaaagcctttcacaaaaaatgcaagatttttatgactgctgcaacaatgccttcactcatttctttaaaaaaatttttttacaatggtccttacgttaggtttatttatctggaagtggtgggcaactatagctgcaagcatcaatctatgacacacatcaggcaattcaactttttcttgtaatgtcatgactttctctgctttttgggaacacttctggcatcactaatggcacttcatatgggttccatggttttatttagggtttatgatattgcaataaacatgatggaaaaatacgcaagaaccatgagagatcactttttattgtgtttggagagcagtttactggagaggaactgctaacttaccaccatacaacaagaagtggctacaaagttattacagtagtacagtatgtactagagttaattttatgcagttatgatttaatagtgcagcataacatttgtttacacttctctcaactctgaaagctgccatgtgtagtctataagtgcgtgcataagtttagataatttttaacttttacaatagatctgtgtatattttatggcagtaaatgctaaaatagactacatatactttatgcattcgtgacataggtaacttaaaatttttttcatatttgtaggctgcacggtttgagagttttttcaaatagtcacaaattttcacaaatttttctaatatatttattgaatatatagtatacatttatcagtatatatctatgtatcagtatttatattggtgtgtatctatgtataatatatatacatatataatatatatctatatatagtatagaatattatatataacagtatatagaactatgtacactattatatatatgtatatatgattgttcaacacagcacttttagagctatatgacagtgaatggaaacagtttcctcttgcttaatttgtcaatagccatcagtgaatccacttgtaaggggctgaggttgattaagcataaaatatatataatttaggtttatatgcagggtacaagtactatattcatggtcctatcaggctgtgccacatggctttggatactttgctctctgagcctaagatgtgaataatcccgccttcctcctgtgaaggatagttgtgaatgtagatatgtttgaaaagccttagtgtagacactgccatgagacaactcagcaaatttagctattgatgataatgataatgagctaataagaacgatgcctttttggaacatgatttaatgcatatgtgatttttgttttaactgtttttcattttagatattccagtttattcaatgattttgttgaatctgaattttttttgattgatggggattcattacttatcacatgtatctgtgagatatcatttaagcctgggcagaacctccatttcttctatctggttgaacgctatcttgtggatcttattagcaaaggaggacaattcaccatagttttcttcaaggtaacatgatagttgagttcttttttataatatgagaactaaaactaaaatttcctaaattattatatatatatttttcttattacaaagtagattatatctataaaagttcagaaaattgaaaggaaagaagagaaaaaattacccacaatcccagtattcagaaatcaccacacttgagattatgttttatttgaatgaagagaactttattgtaaggacacacaggatcatgagagaggatgagaaagctcctcaatagcggcccagttgaactctggattccagttctcctgctctgagaactatttctgttttcaaaactcagcaggcaatttatatgagcccagaggaaaatatatctgagcctagggacagtcattaataatgctttgttggctgggcacggtggtgcatgcctgtaatcccagcacttcgggaggctgaggtgggaggattacttgagcccaggagtttgacactgcagtgagccatgatcacgccactgcacttcagcctgggtgacatagtgagacccagtctctaacaataataatcaatgttttatgatggtttgtttgaggtatttccaaaataatactatttttggtttgcttttttattatgaatataattaatataatttttaacaatttcaaataaagatatgcataaccactaccacccttcctaatcctatacctaaaggtaaagagctttggtgtgagtcttttcagtcattttgcagtctcaattattgttacatttctgaacatggctgaatgcttgccagccatgttttgtgtaaagagctaggcttccgatctaatgtttacaatctagttggttgccccaattttgttatgccgagacaatctcagttgcttaaggagggttgcagtaacctggagcaatcctctaaaacacaatggttcacctcagctttctgatgcagatgatttatatctaccacttgctttctgttctttttctttctgaaatgagattggagaggaaaagaattagaaaatgggaagggtaagcatgataagctccaagtattaagtgcctgcttaaaggagacacatgcatttaaatccaaactgtgatttttttcagcaaatatctgtaagatggtagtaaagtttaggggtctattccccgaccatcagacagaacaaaactgttggattttattccttcagtgcctttaatgatgtgttagccaactaaatgattaaatgataattttgaaataaaatgtacttcacctcctcctccacaggatgccgagtatgcgtatttcaacttccctgaacttctttctttgagaactgctttaattcttcatcttcagaagaataccaccattgatgttcgaacaacattttcgagatgcttatcaaaagagtggggaagtttcttggaagagagttacccatatttcctgatagttgcagacgaaggcctgaacgatctacaaacacagcttttcaactttttaatcattcattcttgggcaaggaaggtcaacgttgtactttcctcagggcaagaatctgatgttctttgcctttatgcataccttcttccaagcatgtacagacaccagattttttcctggaaggtaattcacatccaaaagacaatttcttctagaaattttcaaaatgttctaagttacttgactcagttttttctcctcctcctctaggaaattatcagaggcttaacagataggtataacaattaataatattaagtaaataatgataatgcaaatgcagtcatttatcaaacacttattgttataaaattgtgcttggtatttctcatgaataatttttatttaaccttaaaaccaatcttataaggtaggtgttaagtattgtctgtattttacagtgatgaaatagatactagaatcagtaatctgctcaccaaacacaccaaatgaatagtagaacatggatttgaaaagacacagttggactcaagcccctgtgtccttaactgctgcataatatgttgacctcaaggtattgaaggccagaaatgcatggaattaggcaaaaattacgcccctgttgctgagacatattgacaaaatgctattaatatggtagcctttaataagaaaacaatggagaaggtcaataaagaaggaaaataactgaaataagcttatttcttattattaagtaatcaataggagaattttcaaagttcttagagttcgaattccatgatgttattattttgatacattagtatatttgacaattattgtattgaaattttgggagtaaatatgcatacggatatatttataaattactatatgtataaaataaatgatagctataataatataatatataatagaaattataataaatttatttacataataaattataaataagacaatacggtaccatatagtaaattaataaaattagtacattaaataatatagctatttataaattactaaatttatttataaaattataaatacatccagtttctgcttatttttcactactgatggtgaattgtgaatatgagggccattctttaattcatcaaaatcatttttgagacaattaacatttgtcactgtttgagaattatgtcatactcctcatgtatttggaaatatccacatggttgccataaaataagctagtttgtattgctttagttagtacagtcatgcatcacatggatacattccaagaaatgcatcattagacgatttcactgttgtgtaaacatcgttagtgtacagacacaaagctagatggtatagcctatgacacccttaggctatctgatgtagcctactgttcctaggctaaacctatacagcatgttactgtattgagtactctaggtaattgtaacacaatgataattatttgtgtatctaagcatatctaaacatagaaaaggtacatttgaaaatggtataaaagattaaaaatgatacacttgtatagggtacttaccatgaatggagcttgcaggaccagaagttgccctgggtgagtcagtgagtgactgacgagtgaatgtgaaggcttaggacattactgtacaccactgtagatgttattaatatatacagtattcactttggctacattaaatttatttaaaaatacttttttatttaataccttaacattagcttactgtaattttttattttgtgaattttaattttcaaaatttttttgacagctgtacaaacacattatacaactgtacaaaaatattttccttctttatttttcttgagacagtgtcttcactctgtcactcaggctggagtgcagtgatgtgatcacagctcactgcagcttccacgtctcgggctcaagtgatcctgccgcctcagcctgtcgagtggctgggattacaggtgcgcaccaccatgcctagctaatttttgtattttttgtagagacaaggttttgccatgttgcccaggctggtctcaagctctggggctcaaccaatctgactgcctcagcctcccaaaatgctgagattacaagtgtgaatcactgtgcctggcctttctttctttttatcattattctgtcagctttttttctgttaaaatatgtactttttaagcttttttcttaaaagaaaaaaagatgcaaacacacacattagcctaggcatacacagggtcaggatcatcaacatcaactgtcttccacctccagatcttgtcccactggaaagtcttcaggggcagtaacacacatggagctgtcatcttctatgataacaatgccttcttctggaatagctccttaagggcctcctgaggctgtttggcagctgttttaaaaatacaagtgaaaagagtatactctgaaataataataaaaaattcgcatagtacagtaagtcataagtcagtagcagtcatttttatcatgatcaagtattatatactgtacataattgtatatgctgtactttttttattgttgtttttttggagacagagccttgctctgttgcccaggctggagtgctgtggtgcgatctcagctcaccacaacctctgcctcctgggtttgagcgattctcctgcctcagcctcccaagtagctgagactacaggcatgcaccaccatgctgggccaatttttgtgtttttagtagagacggggtttcactatgttggccagtctggtctcgaactcctgacctcatgatctgcccgtcttggcctcccaaagtgctgggattacagacgtgagccaccacgcccagcctatgctgtacttttatatgcctggcagcacagtaagtgtgtttacaccagcctcatgaacacttgagtagtgcattgcactgtggtgttatgacatcactatgacatcactaggcagtagaaatttttcagctccattataatcttatgggatcaccaacatataagtggtctgtggctgaaagaaacattgttatgtggctcttgactattattaaactattttcaattctggttgcctactctgagcaggaatagccctgggattcatttttatattggaaggaagtactgttattaattttctcattttactctgttagagcaatttctaaatctgagttttaacagtacctacacactgtcgaatctttccttaagagtatttttttttttttttggagacagagtctcgctctgtcgcccaggctggagtgcagtggtgtgatctcagctcactgcaagctccgcctcccgggttctcgccattctcctacctcagcctcctgagcagctgggactacaggcacctgccaccatgcccggctaattttttgcatttttagtagagatggggtttcaccgtgttagccaggatggtctcgatctcctgacctcgtgatctgcctgcctctgcctcccaaagtgctaggattacaggtgtgagccaccgagcccggctgaataatttttttaatgaaggattttatttttgttaaaatctatttcctaatttgttgaatattcaccttaaagaagttatgttattagtcaatttgaggattatgtgaaatacaattgaaaatacaatgcatatttaaaatggctgctgctgggtgataggtacctgaaaggggggttatgctatctttcattcatgtgtatgtttgaaatttgttaaaatatatggcattaaatggggatgacggtgttttggagggtgctggaagtgttctaaaattagattgtgatattggttccaaagttgataaatttactaacagccattgaattgtaacaaaatgaaggaattttatgttatgttaattatacttttatgaagctgttaaaaaacaaaatacgctatattcctaggcaaaaattaactttcaaagacaaaatagtgatgttcaatggggtttaaaacttacaattacattggcatatttttttccttagaaatatatcgtaacataattatatctaaaatatgtaattttctatagttggaaaataattacatattttatttataacaacttttctgatttttctttattttacagaataagcagaacattaaagatgcttatacaaccctgcttaaccagttggaaagatttaagctttcagcattagcacctctttttggaagtttaaaatggaataatattacggaagaggtaacaaaacattttaaaaagctttgtatttgaactaagtttttagttatagaaaagttgcaaaaatcatacagagttctcatgtacttctcatccagcttctcctaatgttaacatcttaaataaccacggaacatttatgaaaaccaggaaattaacattgtgtcaatcctattaactaaactttagaccttattccaattacactgacttttccactcatgtctctttgctatttcaggatccagtccaggataccacatccattcagttgtcagtcacacttttgagtgtcccccagtctgtaacagtttctcagtcttttcttgtctttcatgaccttgacatttttgaagactgcgaatcagtaatgaggttatacatctttggccagaatgtcactgaattaatcttgggtcctcagtacatcctaacaatatgtctgagcattagttaagttggtgcctgacagttttctctactgtgaagttactatcttccctttgtagttaataaatcttgaaggacatgctttgtgactatgcagatcctgtttcttctcaaactttagttgattcactttaatgtccacagtggatcttgtctgcaacaataattattgatgtttttgcctaatggtgacttttatttcactctttccttggaattccaccgtaagggacagctgtcctagtgctgccatttatttgtttatttatgtcagtatggataaatatatttattttatattacaggttaaaatccaacattataattatcttggagctcaaaatgttccaggtttgaacattagaagcccctttaggttggcgcttgtgttcttttacaagccctcatctttctgtactttctaactttctgaaatcacaagatggtccagtctcatcttgtattttccctgccccacccctgaaattaactactttgccaaggaagaaggcatttagaagttcagatctgaaaactttgttggtgaactgctactggggtgtcattgctactagggcttttcagcaaattgaactaggatccaaatccataatggtttattttacccctcccctttctttatttttaatttctctcttcaatcatgagaaatccagctttcgttatctacaatatattcacttttttgttcaatttttatatacacagaaagttattttattttatttattttgatttttatagattcagggaatacatatgcaggtttgttacatgaatatgttgcataatgttgaagtttggttttctagtgtacccatcacccaatgttgtactcagcaggtaactcttcaaccatcactccccctgactcaccctgttttggagcccccgtgactattatttccctccgtatagtaattttgtaattgctaaccatacctgtgagaaaaagtcaatgagattataagatttatgtgcagttcttttttaactgtagccatagaatatgttaatatactgtttccaaagttattcaggctagtgactttctcacccacctcctttggtgtggttatgttatcctttattatgtaatacagttacagtcattggttagtgtttgtatttcatcttggtccctcccacctatttcctggttgtttttaattacgttcattttgaaaggtatgtgaaaggtataggaaacacttccactacacacacacacacacacacacacacacattctggtgttaaacacatagatcgtagcttcttttttttttgagacagagtctcaattcgtcccccaggttggagtgcagtggcatgatctcggctcattgcaacatccacctcccaggttcaagcacttcttctgcctcagcctcccaagtaactggaactacaggtgcccgccaccatgcccggctaatttctgtatttttagtagagacagggtttcaccatgttggccaggctggtcttgaactactgaactcgtgatctgcccacctcgacctcccaaagtgttgggattacaggtgtgagccaccgcacccagccgtagcttctatttgcttgagtgtttttatcatgaatgcatgaatgtttactaaaattatggatataattacacaatttttcctcctcagttttattagtattgtattaatgattttccctgtattgaagcaactctatattactggaataaatccaacttagtcatagtttattacttcttaatatggtgttggattctgtttactaacattttgtttagaatttttgcatcagtatgcatgaatgatatttctgtaattttgtttctttgaattgcctttatctggttagatgtcagtgtggtatgttcttcataaaaaagattagaatgtcttctcctctttttcaatattgtgaaataatgtgtagatcattgggattatctagtctttgaagatttgatagaaatctcctgtgaagccatatagtcctggtgcttttttgtgaggtagtttcttaattttctgtatttcttccatggcaattgacttctttgggcttgttaactctaatggggtcaaatttagtaatttattcttctgtgaaaattatctatttcacttaagttttcaagtctatttgcatagaactttgtgaagtaggcttttgtgatttaatttatcttgtttcattaattactttcccttttagtttttattttgtgtatttgtgaattctcttggtttttttttatgatcaggttagctagtggtttgtctgtttttaagttatttaaaaccaagaattttgatttattaatgagatctgttgattttttaatttattttgtgctttctttcatcttacttttttggtttttatgttgttgtttcttttagatttttgggggggctgggaacttactcatttttaaaattcgtttatttttattgttaaacatatttagtgaaataaactttcctctgaatcactgctttaaatatagcccatagattatgctgtaaattttttgtcattaaaaaaataaattctgtaattttagtttgtatttcctttcacccaagtttgaccgaatagaaatgtttttaagttccagattaaagcacgtttgtgatttttttttttttttttttttttttttgagacagtctcgctctgtcgccaggccagagtgcagtggcacaatctcggttcactgcatcctccacctcctgggttcaagcaattctcctgcctcagccttccgagtagctgggactacaggctcatgccaccaagcccagctaatttttgtatttttagtagagacgggatttcaccaagttggccaggatggtttcaatctcttgacctcatgatctgccctccttggcctcccaacgtgctgggattacaggcatgagccaccgtgcccggctacgttcatgatttttaaaatttcttttttttttccactacctttattgtattatgaagatgttaacatatagttaatttttatggatgtgctggggacatttaagacaaatgaagattccctatcaccacaatgtagtttgattcataaggtctactctgttgattatggtggtttgtcttttatcccttaacttatttttttgtccagctgtctctcttgtgttttaaaatttgttactataggtgagtttctctatagagtttcttttatcttttgtcatttttgtttcacaaagttggttgccatgcatatgttggataatttttcataaggattatcttttcattatagattgtggcttttagaataaaagactgcttttctttttcacatgtaatgcttttgagtttgaattctacttagcccaatataaagatactaacttctgctctcttttagtttccatttacctgatagaattatgtccattcctttatttttagtatttctgaatcactttgttttagttgtgtgtcttatatatggaatgtggtgcaagttgaaattattttttcttttataggtaagtctcacatttactgttatgactgatacgtttggtcttgattctataatatattataggcatttgtattctggtgtgtttgttaagtttctttacgatatgtgtattctttgttattttatttaaacaattttaaactttgggctgttttacatgtttcgttatggtaattacgtttgtaattaccatgctgtaccatttttataaaaagaataatctcaattctctgtttccttattttacctttcactatttggtttctgaagttttaatttttctcagtatccattagcactcatttattgtgtatagtgggttttctaggattattattttaaaaatattaattttattattaaattatcattattactattattttattatttattatttttcattgagacagagtcttgttctattgcccaagctagagtgcagtgacacgatcacagcaacctccttgcctccctgattcaagcaattcttccccctcagcctcccaagtagctggaactacaggcctgtgccaccacacctggctaatttttattagaaatgagcttttgtcatgttttctaggctggtctcgaactcctggccccagcctcccaaagtgctgggattataggcatgagccaccgcacctggcccagttttgtttttgataagatgtgcaatgatacaaatatttttctgtctttcatttccactattatttttctgaccttttttggtttttattttatgtcatttggttgttttcctacctgtcttcattaaattttattgagattattctcctttgggcatcttgtaacttattctttatttctgcatagctttgcatttttctatgattattttgcggaattaattatttattgtctttctttctttctttctttctctttctttctttctttctttctttctttctttctttctttctttctttctttctttctttctttctttctttctttctttctttcgtctctctctctctttctttctttctttttctttctttctttccagccctgtttttggtttatcagttgctgaataaagatcattttttggctgggcgtggtggcttatgcctgtaatcccagcactttgggaggccaaggtaggtgaatcacaaggtcaagagattgagaccattctcaccatcatggtgaaaccccgtctctactaaaaatacaagaattagccgggcatggtggtgcatgcctgtagtcccagctactcgggaggctgaggcaggagaatcgcgtgaacctggagatggcagttgcagtgagctgagattgccgaacccaggaggtggaggttcctgtgggcccagatcatgccactgtactgcagcctggtgacagagtgagactccgcctcaaaaaaaaaaaaaaaaagatcactttttgtatgttcgaatgcttgtttgagtatatccatatttagaatgtagacttagagatttcttctgctttataattgctgatattattactacttttggagataatgatgagatttttcacacaatttgtgtgaattttttttcctgctattattttttgtaatagctctctatgtactttcttttcattttaatgataccgaggtttgttacaagatactttaattcgatttaatccaatccaattaatttaatataatttaatttaatgttatctttttctgccagcttgtcagaatccaggcatgttagtggggtttttgttagtttgtttatttatttgtttggtagtgggtgagtggttttgggtcttcaaattacctgcttttcttctgacttgcagagccctcaaattcttctttgtcttcttttactctttcgccacttaattgccaaaggatacttcttccttttttaaagcttccttttctttcccaaacctgttttcagaaaattgtccccttaggtagttccttttaaatagtttctattctttttaaaaattttaaattaaaaaaatatttttgattgacacatcataactatatatttatgaagtacaacgttttgttttgatatatgtatacaacgtgacatgattacatggagctaattaacatatccatcaccttgcttacctatcattttttattgtgagacatttgaaatttatgcacttattttgaaatatatgacattattattggttgtagtcatcctgctgtataatagatctcaaaacccattcctcttttttatctgaaagtttgtacccttgggtcagcaagtctccgtttctcccctcaccctctgaagagaagagtttctcttctctatttctatgagttcaacttcgttagattctacatataagtgagatcatttggtatttgtctctttgtcttggcttatttcacctagcataatatcctccagattcattcatgttgttgaaaatgacaggatttccccccgttttaaatgctcaatagtattccattgtgtatatatacctcattttcactgtccgttcatctgttgataaacacttaggttgatccacgtcttgattgttgtgaacaatgtgtcaatgaacatgggagtgcagatataccttcgaaatactgttaaaagaaaaacttcagctgaattaaatttaaaggagtttaattgagcaatgaacgattcacatatcaggcagcctccagaatcacagcagattcagagagactccaggggtgcctcatggtctgaacaaacttatagacaaaaaatgtaaagtgacatacaggaatcggaagtgaggtacagaatagctggattgggtacaactctgcatttgccttatttgaacacagtttgaacgctcagcagtgtatgagtgattgaagtaagggattggccaagacagcgactgttacaagaacatactcctaaactaggttttcaatcttgtctacctattaagttacattgcaattcatccagaaggattcaaatatagaagtacgaagtccttctccagccatatttagtttgctttaaccatactaatttcggttcctttggatacatacccagacatgggattactgggtcctatgatagttctaattgtagttttttgaggaagcttcatatcgttttacataatgcctgtactgatttacattcctaccaacaatgtattagagttctcttttctctgcttcctctctgacacttgttatctttcatctttttgataaaagcccttctgacagatgtgaggtgatatctcattgtagttttaatttgcatttgcctaattattggtataattattaacgctgagcatatctttcatgtacctattggccgttgggttttttgtttgtttgtgtgtttttagtaatgactgtccaggtcgtttgtctatttttaaatgggattatttgttttcttactattgagtttgagttgtttctatactttagatcttaactccttattaaatgtatagtttggctgggcgcggtggctcatacctgtaatcccagcactttgggaggcctaggtgggtggatcatttgaggtgattagtttgagaccagcctggccaacatggtgaaatcccatctctactaaaaatacaaaaattagcctggcagtagtggcacatgcctgtaatcctagctacttgggaggctgaggcaagagaatcgcttgagcctgggaggcagagattgcaatgagctgagattgggccactgcactccagtctgggtgatagagtgagaccctgtctctaaataaataaataaataaataaataaataaataaatgtatcgtttgcaaaatctgtggactgcctctttcatttgctgtgcagaagatgtttactttgatgccatcccatttggctatttttgcttttgttgcctgtgcttttgtggccgtatccaaaatatcattgcccagaccaatgttgtggagctttcctcctatgttttcttctagtagttttacactttcaagtcttgtatgtaagtctttaatccattttgagttgctttttgcatatggtgtgaggatctaatttcatttcattgtttctcttgttatacagtgagctcttttattctatgtacacaggtttcctttcgtctcagaaaaattttattatttcatttttttaactttaagttcaggggtatatgtgtaggttttttatggaggtaaacttgtgtcacgggggtttgttgtacagattattttgtcacacatgtattaagcctagtagtacccactagtaagatcacttacaaataaaaatatttttctaaatagcatgacacattacaatttttttctttgacaggcacacaagactgtatctctgcttacacaagtctggccagaaggatctgacattcggcgtgtcttttgtgttacttcatgctcattatctttgagaatgtaccatcgctttttaggaaacagagagccctcctctggtcaggaaactgagatccaacaggtgtggtttttataactttactgagaaatactatttctctccacatttgaaattttgttgatttgtatctttcatttcctctatttggtacttcatgtttttctcttatttatataaacttcagaaaataaaactgaaatttgtgtctatcaggaaacacttattgtgccattaaatgatttaatgttttactatgtgcatgtttcacttagtatatatttagtctaaatcatccaaaagaaaatgaaacaagacaggatattagcacttggtggaggcctaatatgctagtatgttttgggctttttgtatgcattgtgcccttaaatcctcacaacagcattgtgagaaaggcattagtattcccatttcacctatgagaacactgaagttcaaatagtccaggtaacatttttcaaaccaaacgtactaaatagcaaggtggattgaactccggtccatcttgtgcaagttccacaatatcaaagtgtcttttgaaagaaccttcctgctgtagtgtcttggcgtcatcctagctggagagatactaaagtttttaactttctttatggccagtagggtccattaagaatctgttggccagtctgttttccttcccccaatatacagttgtctctaagtatatgtgcttatgggtgtgcgtgtttacacatacacacacacacttacacactcagacgcatgtgtatacatactattctgtatacaatctacctactgggggattcttggctgaaggtttctattaaagagaaatgaagtttctgaacatttcagaaatattcagggctcattatcttttacttagcatccttataattgtttttccaattatcagattgaatatatttttagtgaaacatttcttcataactagacatagtattttaaatcattctcacaaaaatgatactaagtcaaatctgcctctctggaatttctaatgattagactctatttggccttctggaggtgccctgatgaaatcttacacttgctttgttgatagccctgcaaatgtttgaagatagctatgacgttcttgtcccatgatatcagatgtgtccacttctttacccgtgttctcacagggcaggtttttcagatatattaccatcctggtgtcctcgccctggtaattttcaatattatttaaaaatatgatgccttggatgggatagagcatttaatgtgtggctccatcagcgtagagtcctgtgaaattacgactttattagttgctcgatcagctcatgtagagtttggcttaactaaaaatcctgaaaaatgttttattttaaatgcgattaagccagcagcttcccattccacttacctcacatctgtataaatgcagtagagtttatgttataaagaaaaggaaagtcttaaaaaatgtagaatgaaaaatgtaataattcagctgggcatggtgtctcacacgagtaatcctagcactttgggaggccgaggcaggtgggttacctgaggtcaggagttcgagaccagcctggccatggtgaaacagtgcctctactaaaaatacaaaaattagctgggcatggtggcaggtatctataatcccagctactcgggaggctgaggcaggagaatcacttgaaccttgggttggaggttgctgtgagctgagattgggccacttcactccagcctgggtgaaagagcaaaactctgtctcaaaaaaaaaaaaaaaaagaaagaaagaaagaaagaaagaaaggaataattcatgattcctgaacagcaaaggtagctgtcagcttttgtggtcctagatgcttattatgcaatgtcacaccctgctgttctctggcttataccttctttattttattcaggtgaacagtaattgcttaaccctgcaggagatggaagatttgtgtaaactgcattgtctcactgtggtttttctactccatctgcctctttctcaaagagcttgtgctagagtcatcacttcccattgggctgaggacatgaagcctttattacaaatggtaaatgtactctttattagtttactatttttgtgttttgaatgtttgatagaaactacaataactttcaaaattctcttatgtgggactactattagccccttgggggctataaaagtttaatgggctacatcagtcactttccaatttcagcatctatgtttaggagaactaacaaatagcatgatatatatctaacctaaggaaaaagcctctctatttttcctttgttaaatctctgccaaggtcaggtttttgtgttatcaactgtagttgatggttggtgatcactgtggtctgctcttaagaggaactgaagaaatcagttttgtagtttattactttcaactcttatagagaatatttagagacaatttggatactttagagaaatagaagcaaaaacagaagaaaaacttccccggaggtctaccattttaatcaatagggataactgttaacattttggtttattctttttattttaaatgcatagatttttctgatgttttattgtttcttatattggaactctatatatacatatattttttcatgtttttctatttcctttcacaatattagtatcatttttaatggctactagttatcttttagtaccatggtttacttacccatttctctattatggaatattaagaagactttgatggttgtattatagatgttgttattctctttgtgtataagccttttcctttaatttggggttattgattttggcttgagagctagaaatgggattaaaggatcaattggcatgaactttttttaaggatcattatacatacagtgaaaatgttcaaggaaagtattttatgaccaattaactaggaagccagtccacaaacatttagtacattgtggtaatcactgggatagagtgagaaaaataaaaacatatttacccttcccactccaaccccttcatagacctacattttccacagaagacagatattaaattttaaaagtaattatgaagacggaatcatagaatgctttataatctgataataaaaagatccaacgtagtctgaaaacgatggtgtttcttaagaaatgaagacaggccggccgcggtggctcacacctgtaatcccagaactttcggaggccaaggcaggtggatcatgaggtcaggaggatcatgaggtcaggagatcaagaccatcctggctaacatggtgaaaccccgtctctactaaaaatataccaaaaaaaataaaaagtagccaggcatggtggtaggcacctgtagtcccagctgctcgggaggctgcggcgggagaatggtgtgaacccaggaggcggagcttgcagtgagccgagatcgcaccactgtactccagcctgggtgacagagcgaggctccgtctcaaaaaaaaaaaaaaaaaagaaaagaaaagaaaacagaaagaaatgaagagaagtgaagtgacccaagtcctggaggaatagaaggagttagcaggatgcagagaggatgaaactggattgtagggcgtgaagcagcatgtgtgattatcccgaggatggcataaccaaggaactgagatacatctatcacagcaggggtagcaaaaatatgggaaagtgatgaagctgaagaggcgggcaagagacaagtcacgtaggattctgtaggccctgttaagaaaatacagatgtaacttgatagaagcccaatgaggattcactgagtggtttcaaatggatgagtggcacttgcatttgcagaaactttccctggcttgcaatgcagagagtgcattgtagaggcaaaacaggggggacttggggaaattaggtggctattacctcagtcatgtaagtgttgatggtgccagggaccagtgagaggtaagtagggatgaatagcactgggcaattttaagagttatttaaggtgaagaatgacaagtttagtgattgaatatgggtaacgagggaaaggaaggagtcaaatagttcctagacccctggcttgagcatttgtggggatgccgtcattgtatgaagggcacgttagtggggaaggatcaatggtttcttttttggaaatactgagttttgagtgccaatgcaatgtccacatggagatatctagtaaacaatttgaaataatgttttggacttagaagggtggaatgggctggagataaaagtttaggaattgttaccctgtggatgttaattgatgctatgctaagagatgaaattattttggaagagagatatggtaagagagctgaggacagggagttcaaatattccaatattaaacacttaagtatgggttgagacagtggcaaaagatactgagaaggaactacttagatagatgggaataaaatcaaggagaatgggttgtcctgaaggtcaaaggaactgggcagttcaaaatgtggatgtggttaatagtatcagctgctatagaggattgtaataggttgaggactgaaaatacattggttttaatgaaacggagctcactgttgatcataattaagagactaaggtctaggttgtactttacctaatagaaaaccttagtctttaattagacataacaacgatcctcttatgtcctcattttgcaaaggaaaaacttggactcagctatgtggtccatgagcacagctaatgaatgatcaagttgagatctgacttcactctgtccagcttccaaatatatgccctatggagtaacagctgatcagcccatagtcagccaaccttcctgcctttcccatactccatgcctgatatttggtaacactctgtagcttgaagtgtaatttcaggtagcccctaatattttcaaaataaaagaaatttttgacatttcttgaggcctcttgagaaagcaactaagcaaatcgtagaagggatcattccatgaggtttactctgaatcttgaagcatggagaccagccaggtaggtggatgggaatcttaagagtttgaaggattcagcatcttctaggtccctgaacactcaaacacatttttttaaatgctcttttgacctgaaggttgaatctgaacatattaaaatctaaataaagaacagaggcacatttcaaagcagaagtatttctgtagctttggaattctatctgtgggtaacagtgtgagaaaaacactattttaagagtcaaatgcagatttccttgattcgggataaagaactatacagaatgcatttttggatcagtttttattttattttatgctttaattccttaaggtgtaaagcattcaccattacccagcctgaatgggcttgcctaaacaaggattggaatgatcctgcccactgcctttcagttcagaagcatatgaaccctatagtttattgctaatatgaatattgccaataacttggttttcttttcaattttcagaaaaagtggtgtgaatatttcatcttaagaaatatacatacttttgaattttggaatctgaatttaattcacctttctgacttaaatgatgagcttttgttgaagaatattgctttttactatgaaaatgaaaatgtaaaaggtaccatctcagtatattataatcatacttccatccacagataaactttataaggaatttaaaactacaaaataatttttctgtacttccaacatataacatagcaattattttcatctttgttcacatttgtatgtaatattttagttgcaattagagggaatgctgtattttaaaatatgtttttcacttaatattacattaaaagtatttcaggagaaaatatatgtttgcgtgtccagcattttcagttaatttcaaaagttgaacttttcatttaaatgcatgcataatatttcttcataaagtttaattaatttaattatttcactactattgagatatttagaaaatttatttttttccaaaagataaggctaatttatatatttttatatgtaatttgtttttctttctttaaaatcttttcttagggtaagatttctgatgtttcctaatagtaaaaccgaacaaaacaaaacaaaaacatatttggacagaactctaactgattgaacattattgaagctttgaccacagtgatgtggttccttcatgttgtaatcattgtaatgaattagctgcatataaacttaacaatcctttaccaattttctcatctctcaaaaactaaagtttttattctgttttgtttgttgtaaagttatgtgtggcataacatttttattaccttaaagagtagttaaatgttcacgatgcgtttgtgggttaatgtgcttacaaatttaatacttagttattaacaataaaaacaagataaactttacaatctgtatctcatagtcaacactagtgaccattttcatttatgtccagtgtggaactcactaaaaatttcactatgtggaaagtatttcagaattccatgaatttactcaaaatgtgactaatgattctttatgtgggagtggatggcttctagtatttagtgtttttaattgttatgtaggcctacatttgaatttgggagataccattatgaaagattatgaatatctctggaataccgtatcaaagttggtcagagactttgaggttggacagccatttcctctgagaacaacaaaagtttgttttcttgaaaagaaaccatcaccaatcaaaggtaataaatttctaaattaatctgaaatgaaagcattattcctctgaaagtgtttaggaaacaccactaattcagtgctgcaagtataaataattttctggcacttgaattttaataataaaaataaattacctttattcttatatccttggagtggtatgctgtgactataattatgaagatttacattttgcttataattaatattgtttcaattaaaaaacacagccagatatatatgacttccatttccagcaatatggcagttataggtccacagaaaaatctctttgtgtaaagcacttgagatgctgaataagagacaccaaacatctttttataacattatagctaagctcaaaacatcctaggggctgaaaaatttagggaaggccacatgggctctccacctcttttaggcagcaagttgcaggggcttaaataagaaaggatcccgacaaacgcaggcacagggagcactaggaggatcccaggcagagcaatggtggttaacctggaatcatgaaccagacattcaatagaataaaaagtcattcatttgtctattatcataatatacttgatatgtaatatctatctatctatctatctatctatctatctcgtgtggtgtgtgtgtgtgtgtgtgtgtgtgtgtataaaatcaaggaggactcaagagaatactgtaatcatatcaaataatttcattaccatctgtatttttccctacttcttttttatttcattttcatgaaagtctttgtatatgtgtatgtatatgtatatagatatataatctctgaggcttccatcgtcaaaatctttgtcttataataagggataataaaaggaattcacatttgaaaataaaaggcataggtatttttctttatcttccttcctttcttccttccttccttccttctttccttccttcctccctccctccctccctgtgtgcttgcttgcttgcttttctttctttctttctttttcttttttctttccttccttcctccctccatccttccttccctccctcctttctttctttctttctttctttctttctttcattctttcctttccctccctcccttcctcccttccttccttccttccttccttccttccttccttccttcctttcttccctccttcctttcttcttcccatctacctacctatctgatttatccatctgtcatctgtctacttacccatccatccatccacccatccatgcatacatccatccacccatccatgcatccattcacccacccatcccccatgcatatccacccacccatcccccatgcatatccacatatatgccaaaatgctgtctgattctttatactctactgtgttccaaagtgttttactgtgggaaatagctttatgagaagggctgaacttgatatatgtaaataagattaatataaaatgtttttaatatgaagttttagaaaataatatgtaatattcctgtctgaaagctttacatttgaccttgtctcaatttttttttgtttgtttacagacagctccaatgaaatggtgcccaatttgggttttattccaacgtcatcttttgtggttgataaatttgctggagatattttgaaagatttgccttttctaaagaggtataaggccaaaaactgtgcctcaataaatacttgtgtggaatacatgagttactcaacgaggattatttgaaatgcagacgattagagtacattacatgtagtatgtgtttgtaatacataatgaatttaaaatcaaaattttcaatgccttttggccattactatgtaaaaatctgtatagtttttaatcttagaataaatcactacagctgcatattttaaattaatgaattaatgaatgcctattagttgatattgatgggactgttagagacatggagtagattttgatttattaaacctctaataaactgctgtttggagtctaccacccacatcatattgcagaaagaagaaggggaactatgattttcaaaaacattataaaataaaatctgtgctgtgttatatttggaagtgtgcaatttaaaatatgcctttttttgtctcacagtgatgatcctattgttacttcactggttaaacaaaaggaatttgatgaacttgtgcactggcattctcataaacccctgagtgatgattatgacaggtccaggtgtcagtttgatggtaagctctgtgactccagtgatataaatttaaatctactttactctctgcctcttattttatagtggaaaattatcataagacacaaattaaatttttttgaatgaaaatagtctacaagatatttagatgtgcattgggaaagatggtaatgaaaaattctctctctctttattgacagtcgtacgtatgtagatatgtatgtgttttaggaggaagtgctagaagttgtttcaaggaaagatggtttgtagtttaagcaatgtatgtattccttggagtcatatatattgagaccatagtctttcaagcaattttaactgtttgataacacccgattggctgcatgtaacaagcaccagcattctatctgccttcatgctcagggtggttgaaactacagaaggaggcccatgaaaccactaacagtggatcaacagagactgaatttgggatcttgtcttcatctcaactttctgtatccctatgcttacccccagccccgttagagttgacaaaacttactctgagaataacctaggagtaggcatagcaagtatgctcctgtgaagtacctgggtatgtaaataatgaccaaggtgtggggggatactttagatgaaccattaacatgcttcggagtggtctggtgtgatatgtgtagttacagacatagaaaaattaatcagcttagttatttcattactgtgagtattacagtttttatggagataagggagtaaggcatatcttgactttgggggcatcttatgttattaaattttaccattttagctgccatgctctgggctctggctctatggctatggtccggagtaaggattttttctatccagtgatacaagaagtcagaatatcttagatggttgtcttcttcactctgcctctaccttcttcttaaactaattcacagggcacaggacataggtaatgaatggaatccgtcattttttttgttgcacctgatacctaatttaggaggtagaccatgaaagtgtgttttgtcacttccatcttttaaataagaaaaggaattattaacttgattttacgttctctctttaagaaagataatgagattaaattacttttccactaatttaactactggatgtggaataatatgaagaattgatgagaatgctattgaaaaactacaataaagttacattttaagtcttttctttttcagaaaaatctagagaccctcgtgttcttagatctgtgcaaaagtatcatgttttccaacggttttatgggaattcattagaaacagtctcttcgaaaatcatcgtgactcaaactattaagtcaaagaaggattttagtgggcccaagagcaaaaaggcacacgtaggttctataaattctatccaattaaaaaaattttccttttcttttatcaggttgatatgtgttatccctttggtggtttctttttatataatgccttttcttgatatttatatgcatatatttttgtatatgattacttattcttttacctcttgctgaaaaagcctaaccttcataaaaaagttgtaatgatattctatacataataacatatgtatctctttgaagaataattaagtgactaaagttttgagtttagaaattttaaactaacgttaaaaatatagttgttcattaatgacagtgaaaatctttttcatataggtagtaaaaatggatatgaaatgtttatctactttttttctaaattataaagagtgtttacacttttccaaagtatttaaatgattgattaatccaacacattttttgagtggaaggttagaactctccattccctctttctgtgtggcttgtactcctgcaaacttacctttttccttcttgggatgtcatttttctactcttttcctgggagacgtaactggggatggaatacaaggagtaaataaggaaagttccaatctatttctggaataataatactaatagtttatgatctaaaattatcagttgataattcctgaaacattaatgtctaagtacagatatttttattttaaaactgaattttctgattatctgactttagaggcaggtcataaatggtttccatcttaaacaaatggaaaactcatcaggctttagtatctttctgtggcctcaaagttggggttttggaaatggcattaattttcacaaaaaagtttctctcaagatgaaaggttttagtatattagagaaagtaccaacttaacaaaaccaatcacaaataaaggtatttgtcacatatccaccttaacaaattgaaataaacgtggtgaagttatcaggaatggaacatataaagacctcaaaaaatatttttattttcacttctgaataattacttttgcgaaaattttggcaagatcaggaaaatgtgcatctctttgtcaagccttcagtggacattttcagaactccgagagacagatagttcatcagttcaaggacttatcaaaaaagttcttgtattttctactcaggataacttcaaaaaataatcacaaattactctaaaaggttctcacatgttctgtgaagcctctattcttgaactgcttcaaaagtttaagcagttgggctgtcccatcttttgttttaagagccaaagagaagcctctctgagcccaactgtgtgatcgttgtttctctcctccttttcatttttatagccaattgtattgtcagtgagactacttaattaaacatttacttttttattatgggtgacaaaaggctactgcttttcagtttttttgttgttgttgttttgagagatgttatgaaatggtaaatttgcagaaattcttgttacataatacaatgtatgaaaatagaaaaatctacatggcaaagggtcaaaggtaacccttgtactattgaaacagaaccatgctaaattggcccaacacagcaaattaggaagactaaacactgggaaaactcaaatattattgattagaattatttgtttctaatttagagagtgatgacaactaaacttgacttcattataggcaggcatttacatattaatttcgtgactaaccagaagtgtggaaaatgtgttggaatcctcttgctaatacaacaattctctaatttgtctttgtagattaatgagtcaggttggtaaaagcatagtaaaagtgggtccatactatgtttaagttaattggaagtgcttattgaggaagagcaaatcagttgtatttgtgttgttcctcttatctactcctcttcttcctctttccttattcactcatcaaacattatggactaaatgctttgtgcttgagacatacagacaacaaaggcacattcctgtctcaaggatctcaatcaagagaggaggaatggcaaatgaaattacaactacagtttatgttaatgagtgcttcaataggtgtctgagcagaggaagaatacatgacttcgacttgggagagtcagggaaagcttcatggaggaaatatcataaacaagtagagaacagggaggtgatgtgggaagaatggaagaggacaggcgattccagagagagcagcagatatcatagcatggagaaatgaaaagagaggcagtctgttgtctctgattttgtgacattaacttttcttcttcttttttatttttctgagacagagtcctgctccatcgcccaggctggagtgcagtggcccaatctcggctcactgcaacctctgcctcccaggttcaagggattctcatgcctcagcctcccaagtagctgggactacaggagcgtgccaccatgcccagctaatttttgtatttttagtaggtaagaggtttcaccatgtgggccaggctggtctgaaactcctggcttcagatgatcctccagcctcagcctcccaaagtgctgggattacaggtgtcattcaccacgcccagcaacatttactgttttatttataaaccacaccactcagaaatctagaaaattatctacagagagcctttacactccctaaattaaattgtcttaagttataaattaacagaggcttaatttccaaaagaaaaaaagaaatttttcacatctactcaaaatgggatgatggtcaaagtcttcaatacacccataatattgtctcactcatgacctgttatcttggaatattttcaacttgtcttaagagatgttttttcctttggggcaggagaccaaggctgaaataattgctagagagaataagaaaaggttatttgccagggaagaacaaaaggaagagcaaaagtggaatgctttgtcattttctattgaagagcaattgaaagaaaatttacactctggaataaagagcctggaagattttttgaaatcctgtaaaagtagctgtgtgaaacttcaggttgaaatggtggggttaactgcttgcttgaaagcctggaaagaacattgccgaagtgaagaaggtatgtaattctgttttgttatttcggtgagttggagaattaatacaaatgtaatgatgatagttgccatttgttaactggaaatttgcattagaagacttacatgccctatcttactttatacattattacctttacaatagtttcccgctacctgccgggggtatgttctaagacccacaatggttgcctgaaactgtggatagtaccaaatgccatgtatattgttttttcctatgcatacatacctatgataaagtttaatttctttgaactcctgctcttgaactcctgactttgtgatccacctgccacggcctcccaaagtgctgggattacggacgtgagccattgcgcccagccactgttgtcactttttaactcatcaaagtgtctctgtgaaggttgccattcttttgtgattatatgggtgactttaatgctgtgttccatctgagaattgtattccatattttttcttttaatatccatgtaatttgaaacacttcagcaaattcaggttctgcttcaggttcttcatcttcctccctagatgactcaataagttcttccatttcctcatttgttaacatttcctaatgaacttcaatatgttgtttcacttctttatcaaacacgttggcaaatctctctctatcaatcagtcttgctgcatgaattattttcctaacttctccattgatccccaggaagtctcgaatatcactcaggactttactccataaattcttccagcaggcatttatagtttttgggtttaattaatccattgcatctttggtgagtgttattgcatcagcaatagtgaataatttccagcaccttatcatgtccagattagggtctgcatcaattgctgattgaatgtaatcaaacaccaggcaggtgtatgtggctttggcaaactgaatgatgccatagtcaaggcgctgaagcagtgagtttgtatttggaggtaaaaatacaatctcaatgttttcattttcaacaaaaacagatttgggatggctaggtgcattgtctagtattccaagctttcctctttcaagtattttttcacttctgggaagaagcattggtagaaccattccataaaaatgttggctgtcattcacactttctgattatgttgccagaacacaagaagataatttttgcttttgtttttgagagtgtatgtcttcttcagtctgtatgctatgcctgtctttattatatgcactgcagcattgccacctagtaccagggttactctgtccttccatgttttatgtcttggtgcctcctttggacttttatgaatgtgtaggttctattgggcatcttcttccagaagagcctggtttcatcacaattaaaaccttgctttggatggtatcctttctttctaaccaacttcttcaactctgccagaaatgtggcagcagcttcttcattggcagatggagcctcttcagtcagtagtttttttgttttgttctgtttttgagatggagcctcgctctgtcaccagactggagtgcagtggtgtgatcttgctcactgcaacctccgcctcctgggttcaagctattctgctgcctcagcctcctgagtatctgggactgcatgcacacaccaccatgcccagctaatttttgtatttttactagagatgggatttcaccatgttggcatgttggccaggatcatcgatctcttgacctcatgatctgcccaccttagcttttcaaattgctgggattacaggcgtgagccactgagcccggcccgcttcagtattttttatatttttcagtccaaacctattcctgaatttgtgtaaccatcctatatttgaagaaaatgggtcattgtcactcatttcagaggatgccttgttgaagtcttcatacagattcaatgctttcaggtgcaacatgtttccatcacctggaaaatattttctattcatgtcttccaccttctatcttaactaagcacttatcaaacactgtgtccaaaacttttgccatttgaggtgcaacagcaaaactagcacggatttcttttttcttcttcacaacttcatggataaaagattgtttctgactgtagatcttagcaacctcagcatatgagtttttcttcacttattaagtcaagaactttcatgttttcacttaaagaaagcactttatggcttctttttggcatatctgaattgccaacatcacttattttacagtttggggccactattaagtaaaagaagggttatttgaacaccaacactgaggcatcaatgcagtcaatctgatcatcaaggtggctactaagtaactaatgggaaggtggtgtctacagtgtgaacatgggggacaaaggaaggattcatgtcctgagcaggatgaagtgagatggtgcgagatttcatcacacgactcaaaatggtgtgcaatttaaaaacatatgatttatgtatttctggaattttcttttttttttttttctttttttttttttgagatggagtctcgctctttcgctcaggctgcagtgcagtggcactatctcggctcactgcaagctctgcctcctgggttcacgccattctcctccctcagcctcctgagtagctgggactacaggcgcccaccaccgcatccggctaattcaccatgttagccaggatggtctccatctcctgacgttgtgatctgcccgcctcggcctcccaaagtgctgggattacgggtgtgagccactgcgcccggcctggaattttcatttaatagttttgaaccacagtttagctcagatccctgacaccaccaataaaaggacaattttgtattttatcaatgagcaatgaaatctcagagagggtcccaagggcaaatatatagcacatccataagcaccttcaaagacgggtgcaaaaagaacaacttataaggttgtgggcgtggttaagggaaccaacaaaaacgatgaggcacccaggaagaatctgtcattcacctttgagaccaatgagtaaacatttcttttttgggtaacactgtattcatgcttccctggcacgctgagttcttccaaagctgctgtggataccatgtgctctactttataatttccatagcaggtagtaaaaaagaaaagaagaggcagaaagaggaagatacaggtgaaataggatcacatcaagatgtgtaaactcacggcaagtgaaatgatcttgttccataatacctccaaactgacagttcttctgagcaaacctagttgatctgtcagttttgagcatctccacactttgatccatttaacacatgacctccatgttctctccaacaccctgacctattgtttctctccagcaacctcctattgtttctgctgcttaattgggaatgatcaagtgttatgcattgtttttctaagtgaactgctcacctagaaaaacagtgcataacaatcagtatgaactgtattacatttcctttgtagcctcttactgtattcagtaggtgttagttaatattgttaaataggtgaaatataggtgattgattagaagaaaccctgacataataagtatgaaataattagcagagcagaggaacaaaaagggtatgtatgaatataaagcaatggagagagattagcaacatctagaatgtgacagttggaagaggtggattgaattgaagggctccaatgagtacaccaaatacttatctgtggtcaaccataggactcaataaatgttgctaaggttttaaccagatatttcaagtaataaagatatttttctttgaacatagtagagcacatatgaaaataaaagatggagaaaatatttgttattcttcctaaacttttacaaacttgagcttttttgatcttatttctattatgaactacaatttttttcccaacactgatatagctacatctcaacaatccacagagatgatgaagtgtggatagtggaacttcaattttactttatttggtcctttctactccaaaacctccactaatgccaagtgagatagtgaggccatctagatgattaatcttgggtaatcaaatgaattatttttgatggtctttataacaattttattgtttattgtttatcaaggtaaaaccacgaaagatttaagtatagctgttcaggtgatgaaaaggatccactccttgatggaaaaatactcagaacttttacaagaagatgatcggcaactcatagccagatgccttaagtatttaggatttgatgagttggcaagttctttacatccagcccaggtaatattatcagaatagctcaatttcaacagggtaattattaggtatacataaagtgttttgcaaagatagtcatctcttccagattttttttttttttttactgaaaatactattattagtagtaacccaactgcccaatcttgaagtaatacataatgagaaaatttgtacaaatgcttacctggacaaacagattaaatgccagataatctctgcagatcctttaaaactaaccctgcacttaattctagcaaaacatctcaaaactagtgtgattattcaattgtctttaaatatatcaggttgtagccacaaatatcatgacgtatatttgaaaatcttgatgtctactaattttacctagttaagacaatgatttaaaaaatttaaatttaaaaggtggtaaaatgcttttcacatagaaagtgctcagtaataaatgttttacttatttaaatgatattctaattcaatgtcattttcaaaatggacttttaaaataatgcaggatgcagaaaatgatgtaaaagtgaagaaaaggaataaatattcagttggcattgggccagctcggttccaactgcaatacatgggccattatttgatacgagatgagagaaaagacccagatcccagggtccaggattttattcccgacacatggcaggtaatactgcaaatgaaacaaaaattactgtattttcttattatatgtgatctcagaggtttctcattattgtggctgtacatgttatatttgatgttcatgtcatttaaagatactttgttattgaaaatgtcaaatgtggactattttttccccatttaaagaaagtgagattttcttttattatatagaccatttccttggaggtacattaatggagtcatatgtttagctctgatgttatctcagtgtcatccagctgtatcatcatggagcagcctccaggttttccgtgtgtcaataggatttcatatgtaaatatataaagtgcatagagaaatttggatagtttaaatagtagggacaattgtttagatatttacacattgcatctgtcaccatagtagctattctaaaaatgtatataaaattaatattgagggatataaaatttagaagaaaaggatgcatttctacatacattgaaccataccaacttgctgataaattgaacatgtttgcctacagaaatgcagttttatagcttcagtctaatagactgcccccttcagaatctttcttatgatggtggggtaggttaaaaaatgcatggtgccttttcatgaataggaagaccggttccttgcttcagtgcaggactagaggcactaatgctctccattaatttcattcacattgtaactcttctgatgcccaattcacgctgaggtgtggccgggagtggaccggttggggttttgagttgttttcccaccttctacctattacatagacttattatcattcttcggctagtcaacattcttcggctgaagggatggagctctctcatcctggcattcttctatgtagaaagtagaatatcagtagtaaaattaagaatgtttgatgtttcttctcctcagctattttcttcaccatcagtaatatacatattgtctctttcttagaacttagtttctcaaccgcacttagtaaatagcaaataattacaagatgttttctcaataataagatattttgttcagacatcctctccatttgtcacacataaaacccaccttacagatgttcaaaagcataaaaatgatctcttctgagagaatgacatgagaccttcagatgtacctacagatcctttgaggttcagaaaatcgtattggaagtctataaatactgtctttgttttggtaacatacggttcagtttcttgacatgaatggtactctgcaccctgcagcgagagctccttgatgttgtggataagaatgagtcagcagtgattgttgccccaacgtcctcaggcaaaacctatgcctcctactactgtatggagaaagtgctgaaggagagcgacgacggggtggtcgtgtacgttgcacccacaaaggtagtgctcaagtgactataatattctctttcattcctgaacctactatttaaaaataatgaacatggtcacatggtagatctagttcactttattttttaacctgcattttcttgtttcagtgtctgaagctaaaataatatacatatacatatacacatacatacacacacacacaaacatgtacataaaataacatatacatattcaaactttagacatcagaggaaagtcaccaaatataggagacacaattttttttctgatatataggcaacattttctgtttttccttctgatgaatactttttaaattccattttactttaggttgaggtttatcaatgagatttgtgtgctgagtcaactatctcaaagagaatatgttagtgtgtttagagtagtgggttgatgaaaggggttagtaagctttctgcactgaaagcaggacacacttttagacagttcttgttgtcctctgatatttcacctctctctattatgtgactaatggatctttttctttgtcaatcaggcccttgttaatcaagtggcagcaactgttcagaatcgttttacgaaaaatctgccaagtggtgaagttctctgtggtgttttcaccagggagtatcgtcatgatgccttaaactgtcaggtagggtattttaattaataagtgtgttatcaaattatataactgtacttgtatgtctctttgactagaaattcaacatcttcacaaggcttgtgaaaataatttatttgaatttatgaaagacaaaatacttttagaaaaaatgtaatattgttacatttcaaagagtgagaactagaactcatctttctctaaggacactgacctttggatttctgatttcattaatattttattgcattgtcttggtttgtaaagggattcagaatgatctgaagaatgctatgttatagaaaattaacaaatctcaattttaaatcaattactttttcttcataagtatctattaaggatactcatgatttagaaaatgttgtattatggatcgtatacctggtgttaaatcatagacagttttcacccttatgaactcacagatcaacaattaagactaaataagaatgaacacatgattatagaagattgcatggtagacatggagatgttctacccagattgcctttcaaagaaggacttgatgtggggagtgtggttaagatagatgccagccatcagctcccccagttctgcctccacagtctctaccctgcaactgagctaagtagaagtataagcagcgggctgctgtggcttgatgtggaacaactctgacagcagtccttactccagaactgcgagctaggttggctgaggctccatcaggcctgccttgcagttaggcttccccctctgctcattcctgcttccctgctcttttcacactagctgattcttaataaacatctttcaatctaaactctatgtcagtgtcaggttttaaagaatgaaacttgtgacaatgaataatttctatttttaaaccctgaatgttcataaacaaggatgtaaacttcaaatctgattttctaccatttttggcctaacaaaatttcagtttcatatggttccaatgaatatagcacagttttgatgaaaccctgaattctcagaagcaatgttatatgccaattatcagcaggtacattcaggactcataagtctatcttacatattcctgtaaatatgtcaacacatagtaagtgctcaaaatgttacttcacacaatattattctttgtaggtacttattacagtgcctgcctgctttgaaattctgctgcttgctcctcatcgccaaaactgggtgaaaaagatcagatatgttatatttgatgaggtaggtttggtgttctttctttgcttaattccctagtgcacacttgcatagcaatgaagatatttggtgtttcaggacatctatccccttggatggagttcagattgagaaggcctccgtttttttttcctgagtgatttttcaggaaaaatcacttttttggctcccttttcctgttgtgactcaatagggtaaaatgatgcaccctgcagagttctgtatgggagtggaatctttcattgacaactgtttcaggggaaatagaattcaaccatcctggtacaagtttccctggacagagatttcaatccaatctttgacctctaaagtaaataatttttggctctaacaatgatgtcaattacataagttttatcagtcatgatcccaacagataattaaatgacactcttgaaatgcaataattcaagaagtgtatttttcaaaggtgtatgtgagggaatccacaagggttagtgcagtaatatagagctagtagtttgccccttggcttaaaggggcagggcgtggaagcatttatggaaactcaaaaggagattccaattgagttggccatattgtgaggaacatagctgattcaaggtagctttgcaggaaaggagccaatggaaaaatgacctcagcctcagtctccccacttcttctgatctatggccaagacccttcataggccaaacgcagtggaaccagaaatcataagagtccttttgacgaagtgtctatgggtcagcttccctgggaagagagagcagaataaaaaacaatgtagatttgtagcgatttattggggcaaatggaagatacttagcaaagctatattgcagcattatttggaatatttattggtcaggtgcggtggctcacacctctaatcccaggactgtgggaagctgaggtgggcagattgcctgaggtcaggagtttgaggccagcctggccaacgtggtgaaaccccatctctactaaaaatacaaaaattagctgggtgtggtggcaggtgcctgtaatctcagctactcaggaggctgaggcaggagaaccacttgaacccaggaggtggaggttgcagtgagccaagatcgtaccactgcactccagcctgggtaccagagcgaaactccatctccaaaaaaaaaaaaaaaaaaagaaagaaagaaaaaaaagggggaatatttattaaaagagatttaaaacatgatagaaagatatattctttgactctgtggaattttacattcaaaggggaaaagtttaacaaatctctgtaacttaccttttccttgctgtaaacttggagctaccaaataggctgtgctttggatttgtttgatactgatttattatatttatttttggttaatctcatattgcatcatgaaggtcttgaatattatagttttcaaaaatccaacaactttgtctgtgcaatctagaactttgaattaaaatctgatctcaaaactctgaagtgctatgacgatatgactttggctatttcagtttttcaaattttgtgtaagggataaaaccaaaaggttttaaaggctaatgtctattctggcagaatcagggaacagtgctatctagtgcaaagcataaggtcaatatttgatggagtggtattttatctcaccagtacaagcccagatgggcagtgggtatgcatattctaataggtatataatttgactttgatagtaagtctttttcagttgcttgctaggtgtcatactttaatctcttaaatgaagaccacatttgagactcttttctgaatctagtttgatttgctcatccgttcatttactcagcagatatttaaggagtgcctcctcagtgctaggctttgtgtcagtggctaggaatagaatattcaggtctaaggttacagtttacttaatgccttatctattagacactggagctgacagcagtttaatcaagaaagaggaaataaacaagtgagctcacaaatgatgatgccagcccacgttggtacaaactgtgaagggagagaccaggctgtcatgactgcagtcctggcagagtgtcaggaggaggcaactctggaataggtggtcagaaaagtcttttttatggagtggcattgagctgaactctaccatttgaataatagagggtaagagtattttaagcagagggaataatatacgtgaaagctcttgggtagaaagggtgagttcaaggaacaaagaaaaggtcattctttctggaccatagtaaaggtggagacagtggattgagataaagccagagaggcagcagcggccaaatgatgccagacattatacatcccattaaggagtttatattttatttcacatgcaaagggaagatattaaagcaatttatttagtgacatgacttgatatagtttatctttttaaactttttttttttgagatggagtctcgctctgttgcccaggctggaacccagtggcgcgatctcagctcactgcaagctctgccttccgggttcacgccattctcctgcctcagcctccgaagtagctgggactacaggcacccaccaccacgcccggctaatttttttttgttttcttagtggagacggggtttcactgtgttagccaggatggcctcgatctcctgacctcgtgatccgccctcctcggcctcccaaagtgctgggattacaggcgtgagccaccgtgcccggccaacatttttattttggctgtgatgtgaagaatttaagggcagatagggaggctaagtacagtagtcaagtgggtattgtggtaacgctgctgagatatgagagtagctaggttggcagtagacatgaagagaaatgcattgagttgaaggaaatttttgaaagtaaagtaaagcagaactgttggtgcattggttgtgaggatttttaatatttctttaaacttggcatggtcacttaaaggcgatgggaaggcatgcatgacaatttcaagattccatgtcttaactttcatttgctatttttaaatcaacttttcagttgagatttttttttttttgtttaataggttcattgtcttggtggagaaattggagcagaaatctgggaacatctccttgtcatgatccgatgtccctttttggctctttcagctaccataagtaatcctgaacatctcaccgagtaggcattaagtttcaatttggacagagtgtttatctattttgaatatttgaatttcataatttctctgtggattctgaggagtttcataattttctagtgaatttaatagtttatttctgaatcttcaagaaactgcatctctctacacctcctggccgtagttgaggaaagccaccctgtataaattaaggacttccccacctagatctacaattgagtaggaaatttcccccatcccaaaaatgattcatcagaaaagatatatttttgtttctttttttgtccttcaccaagaaataaaaaataaaatgatataacaacacactcagccatgggtcctgtggtccattttcccactttacagagatgtttagaaagatagcaaattcttattagatgaaaaccccattttatcttgtcattgggcttgatttttgcctactactaataatttttttactttataataatagttatttatttactaataacaatcctataatacctcctatgtgcccagtactgttctaagtgctttacatgtattaatttattttaaatgcccagcaacccttatgatttaagcttacttccattactactattaaatagtcacagttccaatatgaataccatatttccattttaaaatgtggaaaactaggtacagaaagatgaagttattcaaccaagagacacagctattactaagaaggttgggatttaatttcaggtagtctggcttctgagtctattcccctaagtacactttataaggaagatgaaattgtctttacttaaactacttaatttcacaggaagtagttccatgttctgcctaaataatatgtacatttattttttaaggtggctacaatcggtaaaatggtactggaaacaagaagacaaaataattgaaaataataccgcttctaaaagacatgtgggtcgtcaggccggctttcccaaagactacttgcaagtaaaacaatcgtataaagttagacttggtatgtttgatatatttatataaagcttgccttttattttattatttttaaaaaatctgccattgccttgatcttgatgccgtttactttaaatttgtttcagtgattacatttccattgatgtggaaattcttgttcttcatttttagtgctctatggagagaggtataatgatctagagaagcatgtatgttcaataaaacatggtgacattcattttgatcattttcacccatgtgctgcactaacaacagatcatgtaggtaatattttagccatatttgttctaagtaatataaaatatttgtatatattataaataaatgctgcctaattgatatgtatcagaattatagaatagaattacagaattacagaaactgatactttaaccttaatttaaaaaataacaagagtattctttctaattctcattggttcttcaacaatgcctgaatacacaaagattaaaaaccactacaaatttaacctgaatttttagctaattttatttattctcggatgttttctttggcaatttttcttcctctcagctcccatgtctgtctgtctacccctctgacactaattcttctcatagtgcagccatacaattatatgtagacaatccctagtacatagaaaaatcaggtaaaagacattctcactaatgtagcaatcacgacatgatttttttggtggtgagccagtaaggtggaggtcttaggaagatttcagctgggacaccggggtgtgagtggggaaagattacttactttttcttgcatagttctcttcctctctcatcctagtcccatacatggcccatttaaacttcctttggctttcaaagtgatgattagtcaatagttttgtcttccttctaaaaccttaaatatattccaaattctgttatgttaaacataataagacatccatcataagattgttgtgatgattaaaggaggtaaaatatgtaaaatttttagagcacaaaagtcaacataatttgacacgaatataattaaatgtaactctcagctttctttgaagataattttgatctttccaagtctcttttgactttcttttggaaaaagctaaatgcatacctccttagcttgacaaccaaggtcatctatgacctggccccaatctcctttccattcattcactggggatatcttacctggcagccctcatgctatatattgctcttagaatatttcaaaccggatgccaaataccagtcattcagatactgttcatcttccataattcttcaaatgtgaaaccttttctgaattcttctctgactttcttagctagatgtaatctttcttctctcaataataccttgtctgtgtttctaatacgacaccagccatgatgagcttactgcttaagttgtttacatgcatatagtctttacttactagaataactctttgaagacaaattttgtgtccttcatttcctaacaaattgctatgtatataaaaggtactaagtgtatgttaaataagaacagctaacctaaattgagcacttacttcatgttctaaaaattctacgtttttaaacctcttttaaccattacaacaatcttatgatagatgtcttaatactattcccactttacaatgaggaaagtgaggcatagagaacttaactaactcagtgttgcatcattaagtaaatggtggggccaggatacaatctcaaacaagttggcttctaaaagcaagctggctgatggtaattttctaataggattttgttatgggaacttatctcttgtgtgacaatggcccaatccaaattctaaataaacctaaatatggacaaaattcttgtgacttaactcataccccaaatctagaatatggatgataacccacatataagaataaaaggcactttattctctcatttttctttctcccttcccttcccttcccttcccttcccttcccttcccttcccttcccttcccttcccttccttccctccttccctccttccctcccttctttcctttatgatatccaggagttatctgacattttcatcattatgtggcattttaaaaacagtatagtttttaaaaattattctgtgtaggatggttcaaggcagattatctttaagcagcaatgaatatagtggtttggagtacttgctgaaattgtcattttggtccaagtgcctttcctctattttcagtagctattaatggagtaactggaaagcaatagaactgctacagtgtgctgtgaccccagatgacttctgcaaaggtcatgctgttgtatgagtcttcttaagatgtctagacttttgtggcaggaatgcagaatgaacataaagacttaggtattagtaagtccgttttgacagctgcatggtatagcatgtgtttatataggacatatcctaaagaagcagtgataaaaaccaaagagacctttcaactgagtaaataattcctggtcttgtgtagtccatttttcagattaatatgaaaaaatggagtggcaagaaaaaaacataataaactatggcaacataagaacggccatccacctgggtcctttcctctatagttgtagtataaaaatgatttcaggagtgggggcaggaccagtgagctgatctgaatccaaccatggtgagggatcgccttcaatccatacatggcttgtttctggctaaggacagtgtctttggcttttggcccaattttcatgccacacaggaacagctgctgactcctggagagctatcagccccaggaagtccttgaaagaactgctatctatctgtttctgctcagcatagatcaatgcctaccgtcacctatgacattagggacaatgtggtttacaaaaatagcatcatggtataatactattgtgtttataaataaagaatggtacaaatctgtgaccttttatttctcttcattttctgcctagactcactcaacttttgcaggatcattagtcactgtgtagtggagaacaactgaattggatccccagtatttaggcataggactgttaaactgatttaaaagattaagaactataagggataattagtcaatcatattgatggctgtggcattaatcatatgccaggcattttactaagtctgttacatatgttatctaatataattctcataagaaatctatgtcacaggcagaattatcctccattttagaaatgaggaagctcagacctctctaaaaggctaagagacttaagaaatcataagcattctagctagcaaccaaaaacagaagatttatattttaaaattataataaatcttggatttattgtatgtttttattttagataggtcgaataagtaaccactttcaagtaatacctaacaagagagcaagatgccaacattacaaaataataggtgttttgttttatttagtatgttgatataatatagtccttagcatttagctatctttcagtactccaactgagatgttaaacgatgattccaggaattgttttacgttctatagttttaaaggtttgaagaacatatgttgattttgtctgctctcactgcagtctttagggtggaagtaaaaatattgtattttcattcctatattatggatgaggaactagcatttacaggtgcaattagaaccagatcttctgattcatactctcctgtactttccattctaccaaacatcatctccagtttttttcaactgtgttgtgtttggagtggcttttttagccccgaaatttgaagcctgaattttaaaacatattaatagctatttacgaaagcaagtgccctattgtcaaattattttggataaatttgcatgctatatttacttctttgaggtttaacatttccagtgagaaatcccaaagaatcctatttgatacaatatatatcatttctctctcttttttcttttttgaagaatactctcttagcccattcaacaggcttctgtaacaaaaatatcacaaattgagaggctttagaaacaaagatttatttttcagaattctggaggctgggaagtccaaggtcaaggccctgggagatttggtgtcttgtgggggcctgctttctggttcatagataagctgtcttcttgctgtgccctcacatggcagaagggacaggggagatctctgtggtctcttttataacagcattaatcccattcatgagggttcttccttcatgacctaatcatctcccagaggatttgcctccagataccatcacattggggattcggtttcaatatgtaagttttgggggaagacaaacattcagtctatactacattcctattaacatctcagagagtatgtttctacatgcaaatgatttgtagcagtagtgattgaaaccagtagaaaatactacagtgaaactttttgagaacaggaattttttatttccacttaaaaatatttgtggaaaaaatgaatggcatacattattaagaagacttaaagcagacctgtcagtgacctttgggagaaatttcttggagtcttgaaggtggtttaagagcctttatcttgaagttgacccagttcttatcttgaaacttaagcaaataagattttcccattttagcctggcttggtacacataaaagtaaagaatcacattcttaattacatcagttttggtgttagctgtaagatagaagttatgtattgtctaaactgagtccacaaatctttcagcttcccatcgctctgatttcaattatgaagtcagttcatagaaaattagcacaatgaaaaggtcttgggaagtaatattaaaattttttggtgggcttttggcttttttccctcttttgtgattcagggaactgtgttgatagaatttggtagcatttagcacctatcagcatttgaacattttagtttattgcctttcagtgtctttgggttatgatagtgactaagaggcaaaggatacgacataaaataaaataaagagtaaaaattttaattttattttaaacagattgaaaggtatggattccctcctgatcttaccctttcacctcgagaaagcatccagctgtatgatgccatgtttcaaatttggaaaagttggcctcgggcccaggtaaataataatgatgtaattaatcctattatagaggatgataatattgacaaactctcaccctttctaatcactggcatctaatcttttaaaattattagttgactcttcctacaataagagtgcctcttctcatatttctaacattatctgtttgttttttaatgggttttaatttgtattttatttaattcctgagaatatttcttcttttttttttttgaaatcttttcaacttctgcaacttctagaacactattatatttcagtcttcttacaccttagattcatatttctttttattacacttgcttcccttctaagtcccaattgctgtttgttttcatcttctactttgttttgctttgtatcctctcttttgaagagctcatccatcctagtaacgttatgcattagaagccatgtggagataaaaagtttaaccatctctgtgctcaagaaacttgtaaggctgttaatgaggcatataattgagaaatacttttggattttcttgcatgattgtgcctaattttgtaatatttgttttcaaggaactgtgcccagaaaacttcattcattttaacaataaattagtcattaaaaagatggatgctaggaaatatgaagagagtctaaaggcagaattaacaagttggattaaaaatggcaacgtagagcaggtaattttcatacgctttttggccaaactttatttttgttgttttcttgagttatatcattcagttaataccattttctgattttttttaatcctcaatttttattttagaaatttaagttgaacttgaagtctagtaattctgagatagaataaaaagagaaagtaaactggtctttgtcttatcctcagtgtcttctgaaccatgtgccagaggctactggttgcttctaaatggcatagcagataagaacagaaggttcactatccatagagatgatattgttgatactttggcagtagagaaactgaactcacagtaacagtctctgagaagattgttttactcctctgtcttttttgacttgcagtttattgtccttttcttcttcttatttcaagttgtaggaactatttgtgtattaaaactttacctggaattatataagttacagatatttgttttaataagttgatggtcttcatattttgaaatttgatttattggcacagattgaggaatgacatatattagacttttctcattggatttttttttgttgtaataccttaatctactcccattcaaaaacataatataattgagttacattttcttctagctattctgtcatttacagaccttgaaaatatatttggatgtgattttttgacataatgtagaaactgattcacacttgccctcctgtcatagtgaaaccagcatcatttgctgaaaaatccttctattcctgatttgtattgtcttaaaaattgcaggttaaattgcatatgtgtgtatatattactgccaaatttttgttctctagtgtatgggtttgtatgtttctttgatggttctttgcctcgttttataatgtactttcataggactattttaaaaaaacccaaaaacatatattagacaactatgaaaatattttagcaaaaagtagtaatttctttctttctcatgcagaacttaaaattgttttgtattcaccactacaggccagaatggtacttcagaatcttagtcctgaagcagatttgagtccagaaaacatgatcaccatgtttccacttctagttgaaaaactaaggaaaatggagaagttacctgcactattttttttgtaagttatttaatttaatttggttttgcttgtaattgtattagactcattcctttaaggcagaggtccccaacctccaggccacagaccatcactggcccagcccatggtctgttaggaattgtgccacagagcaggaggtgagtggtgggccagcgagcattgctgcctgagctccacttcctgtcagatcaaccctattgtgaactgcacatgtgagagatctaggttgcatgctccttatgagaatctaacgaatgtctggtgatctgaggtggggcagtttcatcctgaaaccatccccctcgatccttgtgcaccacttccccaccgccacccactgccaagttgtcttccatgaaaccagtccccggtgccacaaaggttggggactgctgctttaaggtgaggggtgttatacaaagttccctatcgtagtgcggtgttcattactatttctgggacccattggttatttgaatacatacgttttgtttaaaaaccgcatgttctcactcataggtgggaattgaacaatgagaacacttggacacaggaaggggaacatcacacaccggggcctgttgtggggtggtgggagaggggagggatagcattaggagatatacctaatgtaaatggtgagttaatgggtgcagcacaccaacatggcacatgtatacatgtgtaacaaacctgcacattgtgcacatgtaccctagaacttaaagtataattttaaaaaaagaaattaaagacgacatagaaaaaaatacaactttctagttcaattcttatatttgtatttgtgctattatgaattaccttctttatttagtttgctactctattttttgttttctttctactgtaaactattattttttatttagccttgttaatttttaatacataaaggttctttgcaaaacaaattgaatatatatgcacacaagtatcccacataaaattaaagtatcttcacaatatactacttattgacagtgtattttattatatttaatttatagtaatgagaactctgatccagatacactgatatcttgctaaattttatatattatagtatcaaatagcttaaaattgaacaaaatagtgcaatttcgttggacatcaaagtataatttattaaatggataacatactagatcctggattaactttggtaacatagtttgggactagaacacaatactctatttactttgggcaatttcaagctacacttaagccatggaagctgaagtaaataaatccagagtctttgttaggtggaaaagtttaatgaaacttgctcacatgtaaacagacatatagggatgaatcattgatgatatatttctgaaataacgatgatgggtgaatgtaagattgtgtttgcaaatttgggggattgcaataatattactccttttatctttgttgttgggataaggaaaatacatttctgcactgccaaggatttacaaagctcacccatttcactttcaagtgtggctatagactgtaattagaaacaaaagtaattctgtacctctgggatatttctgaaagcctcactgcaaaacagaaactgaaaaatatctgtttattattcataccttcatacaaatataggggaggcaaaattttacttctaccaccttaggcttttttacctgggcctcagaattagactgatataagacaaatcaatagaaaagcatgcacatgtatgtagtatgttttatatggtgcagaaggctccataaggagttgaaaacccaacgatgcagttagagttggacacttacatagtgaattggacaaagagtggtaaattgtgaaaaatgtgacaaagtaaaggggtgtaggctagggtaacttgggtgaagatgtgactaggaaggtaagagttagtttaacaaggttttttagtatagatttcccttgtcttcaagttcccatctttgaagataggagtgttactgtccttcgggtatgaaaacatatttttgtgggcatttaatctgctacttttaagaaaaagaaagaagatcagagtgatcttcttgaccctgctgttttttctagtgctttcaactcaaaatagttaatatgccagagtggtatattttgggagtagcatgttccaaaatccttcacatacttaaaatattttaaaactaaaatatttcagaaaacatcaaaagtttaattatacttgaagaattgaagcttggcatgtttatatgactcttgaattctctacaaaataaactgtgaacatccttggtattacacaatttgatcccagatcatcaagagatctgaggatttttctgggctcaagttttacctctaggagcttttcaaatagtagtgtacccttaagccttttgcagtctgatctcttaaaaaaaaaatacatggagcatattcagtgtttgatggcaatggcagtgtgtgcttaagggcacacacttcatggccagacccaaacttggatcccacctctgcccccatgaattgtgttatttctggacagctacttaatgactttaagccttaatttacttatttgcaaaatgagatgatcagaataatagtacaaaggattggagtgagaattaaataaacataagttatgaaagcacttagtacagtgctacaaaaatgttattgaataaggtctaatctctaggtcgcattcattcttgtataccaggatgatccctttttgtcagatccaaacagactggagctgagagagcatgaaggcgggttgttcatgcttgcatggctgagataaactgtctcaaggactttctaaaataatcccacaggcagttctttatttactgctgaagcaattcagataagatgcccttgaaagaacacccacccagtaatggcatctccaccgataaattgatgccagctctggttttgcgtctccaaaaccaaagaactgtgtttctaagcagcttatgtgaacttccccttttgccagtacaagcttccttttatcttcctcccttcagatacatatgtggcttgccatagctgtgcatcttgggttataattctcatttctaattccaaatatagtcaacatatttggagatattttttctttggttttgttttggttgacataaaatgtaggttatcagagagatttaagaggcaacattatttctaagtgatctttgaacaagagttttttaaaaatgaagtgctatgatgaaagtgacactattttaaaaagtaatatattcctaggccccagtaacttgcattaatgtaaaaagagaagcaacatatgtcagttaaaaacaggatttgagaacaggggcctgcaggccagactctgccacatataaactgtgggctcttgggcaggtcactgaatctggcaataaggatattaatagaaatattaatattaatagtgccttcttcataggattgttgtgagtactaaatgagttaacatactgaagtcactgagaataatgcctgacaactgtgtataattttttttttttgaagggcgatggagttttactctgtcgcccaggctggagttcagtggtgcaatctcagctcactgcaacctccacctcccaggttcaagcaattctcctgcctcagtctcccaagctgggattacaggcatgtgccaccacgcccagctcatttttgaattctgtgtcactgtgttgtccaggctggtctcgaactcctgacttcaggtgatctgcccacctcggcctcccaaagtgctgagattacaggcatgagccaccatgcccggccaactgtgtataacttgaattttactattaccattattttattgtctactatatgaaatttcttgccatgtggcatagactctcagttttaaaattcttacttcaccagtgtgccagtttatttactgtttagtagctaaacacatttccttttgatgttagctctataaaaactttagaaaggccctttgcttcacaacatagatttaaaaagctttattatacaaaccaaatctatgacttgctataataagctatggttaatatagtggcaatagctactggctacttgcagccacagcattttgccaccaagatgcagtggagaaataagacctccctgggcttttcagtgctcctgtaaaaagccctagcttcttgacacagggaaatgcatgtgaaataaacataggaaatgtttgcctttacttcctctagaaacattttacttttcatgtatcaggagaatttgatctgcagccatttgtctataaatgtctagcaatttgtagctaattgctcagatctgagaaagccaacctagaccaggttgctaggttgagccccagggtgccaggaagtatggatcactatattcctaggtatttacatttcaagaagtataaagcccagaccttggagacatttctgcattgcaaagtccagcaacaactagggtttattctttgggaaagaatcataggttctcaccttctaccaaaagaacaattttttgttgattaatcttttttttctcatttttagagaagggtggtgttggggatagctatctgtcttctgcatataaatggagataaacggagaaaaaccattgttctctgttccttgcttatggaatatttgactactcttagaggaaaaatttccacgagttctgattgcattgtcccaggggtaatgtctgggtggcggggtggggtgggggggagtggggagggagaaggggagggtaggcaacattatttactataaggtagttaataaggagtctgctgattcagaacacctggtgtgcacattctgggtaacatttataaaggtgggtattaaaaacccaacaggcagatgtcgggatgatagtagtagatggaaatatggttttgaattgtatttatgatgttattttcaaggcgcacattctttttatttccagattcaagttaggagctgtagaaaacgcagctgaaagtgtgagcactttcctaaagaaaaagcaggagacaaaaaggcctcccaaagctgataaagaagcccatgtcatggctaacaaacttcgaaaagttaaaaaatccatagagaaacaaaagatcatgtaagtagttaactaaacaaattgataagtagagggttaaaatactccccaagtcctagtaggaaacgtaaattgaatatgttctataaataagttctagttgtcgcttggacttatttctaaattgagtacatttgggtgagagaatgggataaagatgagtgaccataattgtacattcattccttaattgcatcaatcagcctcatttaggacttgggagaggtagaaccacagcctgtcagcctaggtagattttataacctgacataatcatcctacacaataagcacatctttgatacatatatgaactctggctatcacttagttctcagaaggtttaaatatagactacacactttgtctttggtcatgacaaagaagtctcactaatataacatcacagttttgtgagtgatcataaaaagaacttgagaatggatggaaatgctgatttgatgcctggaaagacttagctaatataacatctcttccttgctctcaatgtctaattctgtcaactctagggccaaaatgtttatcccctctctatgatcctctccatcttaagtaacttcctggcttagaagctcatcatatcttgcctggatgatcacagaggtgttttttttggacttgagagccttgaggttcaccactctccaatccagtcaacaaatgatcttgcacacatttgaattgattaaattatcccatgctcaatgttcttcctttgccctcgcttagctgatgaagtctaagcttctttaccattatgccaaaatgttttggtatttgccttaactcgatcagtctcacttcctaccactctcctctaccaatactcaatatttatgattctcctcacatgacttacttttctacctcttcctttccatgaactgacccatctgccttgagtgccctccttcctgattgctccctttttggtatctcatctctgaatctttccttgattcctgcagttagaatttctaccctctctcctatgttcttctacactttcaatagctagtagatcaattattgtaatgtattgttgtttatatgtatttctttttcctaaattttaagttccttttcaacaggaaccgtgtatttttcttcttgtgtctttagtgcttagcacattacctggcaggtaatattattccataaatatatttgaatgaatgaaagatatttctctccaagttgaaacagcttttagagcatttctgatttaggttttccaaattctagagcaaactagaatttgctgctgatccttctgcttatatttcctctacctatttttctgtttccttagaagcatgggaggtaaaaacccagggacagcataggaggtgtaagccttcttagtgacttcaagttataaaaataaagtgagggtgaggggaccctttagatagtcccactctggcctcttccatctgcatccattcccataaagcaaggggccagtggagctaaggagacatgcccacccggagctcattctcacccttgaattccaggttattatggagctatatttgtcaaggtaggtggatagaatttattttatttgacggtttattaccttgactaaaaacttacagtgaggcaataatatgtggagctttgccacatgctctgcaaattttagggccaggcccttccatagtcagagcgttctcccctgagttaaaggtaacgttacttaacacgtaatgatgacatacaagtgagcacatcttctcatatttagaattgtcttccgtgcacagctaagagaaaaatttaaaaaatcaaataagtgataagtgacttgggtgcatgttacattgaggggtgatggatggacaacacagtatgatgatacaatagtctaagccagggtttacggaggagtcttctaggtagattcctagtagcatacactgagatgaggatatctgtggaagggatttattgaaggtgtgtgctcatgagggacctatgagaaaatgaacgaagcaagaaagggaaggtgaagaaaagcaagaatgtggcttctgctagaatatagcctgattctaaccctactgggaatgccaggacaccagagaattgccccaccttgagtcaagggggctgatttttatacttcatgtcactcagacattgggtgtgggctatttcccatccccaggagaggtcgtaaccacccaggcatctccaagaggcctctgtcagtttagggcaattgtccagggaatggtgcagctgagagccttagcaacccaactcaaagcagctgtagcatccactacaaggagggaaggagaatgactagaattggcaatgtggagcaaggagaatgcctaccttacatccaagcccagggtcatgaaggccgaggaagagaaaatgatcatcactttaacaaggagaaacagagttatcttgggagaactgggtttggcaagactacagccagaaggaaaaggaacatcccagaaaatatcaatatgtgatagaattttctcatgatggatcataacatccagaggctgaaaaggaagggcattagaggaagactgagttattaaagatgcacagcaggccgggcacggtggctcatgcctgtaatcccagcactttgggaggccgaggcaggtggaccacgaggtcaggagttcaagacaagcctggccaacatggtgaaaccccgtctctactgaagatacaaaatttagccaggtgcggtggtggacacctgtaatcccagctactcgggaggctgaggcaggagaattgcttgaacccaggaagtggaggttgcagtgagctgagatcacgccattacactccagcctgggtgacagagaaagactccatcttgaaaataaaataaaataaaataaaataataaagatgcacagccgtggaagtctgggtgagaagactgacttgggaagtcttgggcatcctctggtggccaaatcaaattaattacttcattcattatttacaatttcattaattaaaattttatttttatgaacagagatgaaaagagccagaaaaaaaccagaaatgtggatcaaagcctaatacatgaagctgaacatgataatctagtgaagtgtctagagaagaacctggaaatcccacaggactgcacatatgctgatcaaaaagcagtggacactgaggtcagcacttacaacctgatcgttctccaaactatttcatttgtcagccatagcttgttagttgtagataatgcttaataagatatatgcataatataatacataattaatacaatccctaccaaaagagaactctcctttagctacatatcactcttgaatgctctgcagtgcatatctaaaaaggacataatagtctaagccagggttcatggaggagtctcctaggtcaaattccctagtagcacacactgagatacctgtgcaacagatttagcaattgtagattatttcttgcctgttaacagttcacctctgaaaatgtttgccgtttcgttatttgtttctattacattgtttccacagcctgaattctagacttcaatttcacatgctgcatttgaaaatttgggtgcatgtggtccaatacactttaagtaatattcacagaatttctcaaaatcaggggctttttacattatagctaaaacaccaaagaggcattggaatagctaaaactggtatgcagaaaccttttaaaatgcaaattactcatgcttatagtagacaaatttgaagatataaatatagtaataataaaatcaatgtcatcactcatagtactcactgcccttccagaccaaccttttatctcattttcctgtgactatacacatacaaacttacatacattttgcgtatgtgtgtacacatatatgtatcattctattgtgcaccttcttttgtaagcttcatggtgtcttattttttataaccatgtatttcgatcatcattttaatgaatacttgatattctgttgtgtgagtgaatacataattgaagtaaccactaaccagccttttgcttttggaagcgtttttttgtcgctcttccttcataagcagtgttcatctttgtccatgtatctctggacacaaccgtatttcttctttaagacctggatatttttaagtccatttgtgctcagtttcaatgggaagtaggcattcccggaccacatagggtaaggaacctcctctgccttcttggagaattctccctgttggggaaaactcctgaggctccaatagccaactgatatccctcaggcaagagcagtcatgcactcaccaccacttggtgttttatctgctactttgtcaaaattttctgccccagaagtggagtaagacagtttaagatggtctgtccaaagaagtgggaagatttttcttgtagttactgttgctgccataatgttctttgtattcatgtagagtcagtttcaaatagttgcctgtttagccaaattattacatagtatgcatgttattttcatttagacatttttaattataattaaaattaaatcataatccctaaatgtcttgcttcttttagactttgcagaaggtatttggtcgagtaaaatttgaaagaaaaggtgaagaattgaaagccttggcagaaaggggtattggatatcatcacagtgctatgagtttcaaagaaaaacaattagttgaaatcctctttagaaaaggatatcttagggtaggtgaattttcttcattctaaaaattgaaattgtgactgtttcaagctgaatgttcaggaaaagtaaagaatacaaccaccatttttctttttttctcatgtaattgtcttttaaaaaaataagttggccgggcgtgatgggtcatacctataataccagcactttgggaggccgagatggacggatcacctaggtcagaagttcgagaccagcctggccaacatggtgaaactctgcctctactaaaaatacaaaaattagccgggcgtggtggcaggtgcctgtaatcccagctattcaggaagttgaggcagaagaatcgcttgaacccgggaggtggaggttgcagtgagccgagatcatgccatcacactctagcctgggggacaagagcaagactttgtctcaaaaaaaaaaaaaaaaagtcatgatatcctctgtcttatttaattgaaaaggggattgaaatgtactactcagtttatctctttttgtttgtttgttgttgaacctcctgagtagctgggattacaggcatgtgccaccatgcccagctaattttgtatttttagtagagatggggtttctccatgctggtcaggctggtctcgaactcctgaccttaggtgatccgcctgcctcagcctcccaaagtgctgggattataggtgttagccactgcacaaggcctagtttatctctttttcatgagaataaaaatatttcctaaataaatactttggcaaatttttctaccatgaaatatatctatgttctctctcctatcagtgataatgaacaaaaggaatactaaaataactttcaaactgaagtcttgctatgttttgtgtagtgtgtcccatgacagtgcgcagggattttctggataaattcatgaaggagctttatatggtttgcttgtaaatttggatctttagtaatattcaaaaatagactgacttttaaaaattattcacattgaattttgtatgacatatattacattcacaaaagagagagaggaagaaagacaaagagattgagattgtttctgctactctaggtagcatcttttaaactaaatgttgaggaaaatctgacatcatagttaaaaatcctattccctgaaaaaaaaaataagatgtagcatttgcaactttgctatgcttttctcttaactaataacaaattatgtatctcttttaaaggctaataaccacgtacaatattttctacatgcttatgaattgatagaagagagaaacacctattttgatcagggtattctgtgtttaaaatagtacctgttaaatagtagttgctcaattactaataggttaatgagatcactccacaaaaggtactatgaaaatagtgacagctttgctatagagaacattttttaaaaaggtatttattctagttattttctaaatgtattattattttctacatttttgttcttatcaaaaaacttgagaaaaacaggtaataaatgatgtgttgcattttcgcagatatatagatttcagttacagaataattacagaaaatcactccgtatacttaaacattaatactaaccattggcatgtatgacaatcaatataaaaagaaagagaagatgattagaaatacccagcattatatgaaaagaggattatctaagtaaacttttaagtttgtcctgctccttttctgctcagttatgacaatttaggggggaaagacaactttttaaaattactgaggtatgctttttccataggcataatctcaacaaattttagtagacaaaataggtaattgtccaaaagtggatttgtaaaagtattattgccctatcataaaaaattttctttctagttattcatttaaaaatatttactgggcctggcgcagtggctcacgcctgtaatcccagcattttgggagggcaaagtgggtggatcagctgaggtcgggagttcaagaccagcctagccaacatggtgaaactctgtctctactaaaaatacaaaaattagccgaatgtagtggtgggtgcctgtaatcccagctacttgggaggttgaggcaggagaatcgactgaacctgggaggtggaggttgcagtgagccgagatcgtgccattgcactccagcttgggcgacaagagcgaaactccgtctcaaaaaaaaaaaaaaattactgaacacctatcagttgtcaggtactcttacggatgctgtggatacaataatgaatcttgcttggagtctggtataagacaagtgaacaaacaagtaatattattgaggtagtcattaatgctatgaagataaatcatgtgagacagagatagataatgatggtaggggtggttattttggatgtggtgagctacagattcctctgtgacatttgagtagacagctgaagaagccagagaaacgaatatttggggaagaatattctgtgcaaagcaaacagcgcatttgggaatgtacttgtggtgtttgtgaaatagcaagagtaccaatgtgtctagtttctctagctttcccattgtggcttaattgaagctcaaagagtttttcagcaactttatgacaggaaatacttgcattctattaaaatgctattttatgaagtaattgttttattctctttcaaggtggtgacagctactggaacacttgctttaggtgtcaacatgccttgtaaatctgtggtttttgctcaaaactcagtctatctggatgcgttgaattatagacaggtattgcaaaatgcataaacttgcttattgtattgctgaaatatggccatagcgtagtaaaacatgtgaacctttagtttacaaacatgccacaattcacagtagcataactggacattcatccttgcctggctttcagttttagttgtggtatagttgaaagcacctgcatttgggattgtgtgattaaccagatgtgtgacctcggatgagatatctgaactgcctgattctcattttctatctccaaaatatgggtaataattactctcccacggcatttgcaagaattaaataagtgatttgtatggaagatagacatcaaaggtgcttgataagcatttactcattcatttgctgtgcacaagattttgcactctagaattatctttaatgctgacctcatctttactcctgacaccaaatctgttaccaagcccacttcattactgtcccatagaggtatttgatttttgccttgcaatttctgtatccaccatctttcatcgtacgttcttagccttgtattattagtacaattcccctgattctccattctccttattctaccacgtcctgcagacaacgtggtttatcttcatacgacctccctgctcagagacatttgataattatttctgctcgcagaatcaaatttagatatgtcacccacatgcaggtttttatcaacgcgcttccctccctttatctctaaacactttttgttctccttataggccttgttcctacccaatataacattcttatatcatttcccagcatgttaacaacccctgctttttatttctattgctgctgccatactctgaatcaattcttctgactcatttttgggaatcttctcctttgggctcttgagctagggtgtttgatatgtgggatgacggacttgggaattgaaatgtcagggtttgagttctagatcttccactctgtggttgtttcagtatgggtacgtctcttacattcccagtgccttaccatagtctaagcacttaataaataagagttaacataagctctgtaaagagtttattcataacttgctttttcacaagtagcatttctgaattttatttcactcatgtatttattctgtttgtgcccatattttattttgtgatttgtaactcaacacacttgtgtgtgagagagggtagaaaagggatgagagatggggaagatgggccgggagagaaaattggtatattagagttcagctgtaagtgattttgacatcactgctttgccagtgttctttgtttcttcaatagatcattatttctttgatatatattacacaaatgcctactgcaattaatggcatgaaatacgtacgtaatgatgacagatgtctcagtttttagatctatctcagtcatggcaaatttcctaagcactatgtagttgcatgttagtgtccgttccttaatggttagacatatgcacaatttccatgctccaaaccagagtaaagggctcattcttacactatggcagtagaagcatttagggaagttttacattgtaattctattctcttttcagatgtctggccgtgctggaagaagaggtcaagacctgatgggagatgtatatttctttgatattccattccccaaaataggaaaactcataaaatccaatgttcctgagctgagaggacacttccctctcagcataaccctggtcctgcgactcatgctgctggcttccaagggagatgacccagaggatgccaaggcaaaggtaccgtgctggacactgcctgaggttcagtcttcatcactggcctgactttagtcaggtctgctgttcttttagaagtctgtagcaatcacccttgagtttcatcagtcttttaatgttttgtaatgtcttgaatcgtatagaattgggggtagctagggagaataacagttttgtttgtttccaccatcagacatggaatttgtggctggatgggcactgaaaattacccaggattactattttcaggtgtgaaatgcagtgtcctataatagttaagtgctggctatggatttaaaaagctctaggtgactaatagactcctttctaccatttagaaagaaaaaaatatttatttttatgattttgtaacaaaaaggtttaagtgtttcataaaaaaagtaactcaaacttaggagtatgtgggaaatgtagaacgttgaaataaggaaaaagtgcccctgttccactccccaaagacattcacattatcattttttttttcagccagttttctaggcatgggtgtgcatttgatttttaaacactgatatcgttgtatgtaactgaacttcaaaatatggttgtaaatgtgtcctgatgtgtgttgcccagataaaaattttgtatccaatccctcaatgacagacttacaattcataattacataatttgattctcatctttatggagatgcattgttaatgatacctgttctttctgtttttgtatagtgattaacatgcccagttaaatcagatactgttttctgaaggggggattcttctaggattcttttgatgagttggctgatcctacagagcagtcatacatcatttttaagaccaaaatttccccattcttgagttcttcatttttacctctctataaagaggagtacatcttctaataaggtttcttatttttttaaatggttatcagggtggttcattttctttgctttgcatatttgggaagacccacatgtaaacttctcacatatgggactcttaaaagtgggcataacattcttagaatattattatcttcattcatcaaatcaaactaagattgtttccgttgccttctggcatttaatgttttacatagaggagccatggcagtttctgttttcttgcagttaacttgatatttttttctgtttatgcaattatatgaatctttttctttattctatttcaaatgttttatttcctatgattttctattttatggatcctttaaaaattgatgttttagttattatatgagacctttcaatcttcatgctcaggtttttatttattgcggtgaaatgcatataaaatttaccatcttaaccattttaagtgtacagttcagtagtgttaagtacattcatattgctatgcaatgctcaggtattttttaaatgaagaagagatccttgaattgtatctttgttatttgcttctgttaattgttctgttgttttttcaggaaaagttataatttttaaattgaaacccacttttctgtttttcattgctatttttttttatgagaaaacataaaacttaccttccatatcactgatggtcttaagtgtcagttatggctcttcataatgcaaatgtggattttagttctgctactactggacttttgttttcctgaaattctttttttttctttcttttttcttttcttttttgagatagagtcttgctctatagcccaggctggagtgcggtggcatgatctcagctcactgcaacctccgcctcccaggttcaagcaattcccctgcctcagcttcctgagtagctgggactacaggtatgcgccaccacacctggctaattttttgtattttagtagagacagggtttgaccatgttgaccaggatggtctcgatctcctgaccttgtgatccacccaccttagcctcccaaagtactgggattacaggcgtgagccactgcacctggcccctgaaattctttactactccatccatcactcttttatatcataataatgtactttttaaatgtcaatttatattgtctctataccataggctgtagtgccagtgccttgtctcaaagaagtcatatcatttggcacccattaagtatgacaaataattttttctttttttccatcttcttatattattttattttaagttctgaggcacatgtgcaggatgtgcaggtttgttatgtaaacatgtgccatggtggtttgctgcacctatcaacccatcaccaaagtgttaagcgtagcatgcattagttatttttcctgatgctcttcctctccctgccccaacaggccctggtatgtgttgttcccctccctgggtccatgtgttctcatagttcacctcccacttataagtgagaacatgtggtgttttgttttctgtttctgcatttgttttctgaggatgatggcttccagctccatccatgtcccaacaaagcacatgatctcattcctttttatagctgcatagtattccatggtgtatatgtaccacactttctttatccagtctattgttaatgggcatttggagtgattccatgttttgctattgtgaatagtgttgcagtgaacatacacatgcatatatctttataatggaatgatttatatttctttaggcatatacccagcaatggaattgctgggtcaagtggtatttctacctctagttctttgaggaatctccacactctcttccacaatgcggttggactgatttacactcccagcaacagtgtaaaagcattcctgtttctctgcaacctcaccagcatctgttgtttcttgactttttaataattgccattctgattagtgcgagatggtatctcattgtggttttgatttgaatttctctaatgagtggtgatgttgagtttttttcatatgttggctgcatgtatgtctttttttgagaagtgtcctttcatgtcctttgcccactatttaatgggttgtttgtttttttcttataaatttgtttaagttccttgtagactctggatattagacatttgttggatggataattttctcccattctgtaggttgtttgttttctctgatgatcatttcttttgctgtgcagaagctctttagtttaattagatcccatttatcagtgtttgcttttgttgcaattgctttgggcattttcatcattgtattattccatgttcatgctgctgataaagacatacccaagactgggcaatttacaaaagaaagaggtttaatggacttacagttccacatggttggggaggcctcacaatcatggcagaaggcaaggaggagcaagtcatgttttacaatggatggcagcaggcaaagagagagagagcttgtgcaagggaactcctctttttaaaagcatcagatctcataatacttattcgttatcatgagaacagcatgggaaagacccgcccccatgtttcaattacctcacaccagtttcctctcacaacccatgggaattgtgggagttacaattcaagatgggatttgggtggggacacagccaaatcatataattccactcctggtccctcccaaatctcatatcctcacatttcaaaaccaatcatgcctttctaacagtctcccagagtcttaactcatttcagcattaactcaaaactccacagtccaaagtctcatctgagacaaggcaagtcccttttacctatgagctagtaaaatcaaaagcaagttagttacttcctagatatagtgggggtacaggcattgggtacatacagccattccaaatgggagaaatttgccaaatcaaaggcaccacaggccccatgcaagtccaaaatccagtgggaaagtcaaatcttaaagctcaaaaatgatatcctttgactccatgtctcacatccaggtcacactgatgcaagaggtgggctcccatggccttgggcagcttcacttcaatggctttgcagggtatagtgcccctcctggctgccttcataggctggcattgagtgtctgtggcttttccgggcacacagcgcaagctgtcagtggatgtgtcattctggggtctggagggtgggggtcctcttctcacagctccaataggcagtgccccaggagggactctgtgcaggttctccaaccccatattttccctttgcactgccctagcagaggttctccatgagggccccatctctgcagcaaacttctgcctggacatccgggaagtttcatacatcctctgaaattgaggcagaggttcccatacctcagttcttgacttctgtgcactgtcatgctcaacaccacgtgtaagctgccaaggcttggggcttccaccctctgaaacaatagcctgagctgtaccttgtccccttttagtcatagcgggagcagctgggatgcaaggcaccaggttcctagactttacacagcagacgaaccctgggcctggcccaggaaaccagttttttttcctaaatctctgggcctgtgatgaaaggggctgccacaaaggtctctgacatgccctggagacatcccattgtcttggtgattaatgtttggctccctattacctatgcaaatttatgcagccagcttgaatttctcctcagaaaatgggattttcatttctatcccattgtcagcctgcaaattttctgaacttttatgctctgcttcccttataaaacggaatgcctttaacagcacccatggcacctcttgaatgctttgctgcttagaaatttcttctgcaagataccctaaatcatctctctcaagttcgaagttccataaatctctcaggcagaggcaaaatgctgcccgtctttttgctaaaacataacgaaagtcacctttgctccagttcccaacaagttcctcatctccatctgagaccacctcagcctgaatttcattgtccatatcattatcagcattttggtcaaagccattcaagaagtctttagggagttccaaactttcccacatgttcctgtctgcttctgagccctccaaactgttccaatttctgcctagtacccaattccaaagtcacttccacattttcaggtatcttttcagcagcaccccactctactggtaccaacttactgtattagtctgttttcatgctgctgataaagacatacccaagagtgggaaatttacaaaagaaagagttttaatggacttacagttccacatggctgaggaggtctcataatcatggcagaatgcaaggaggagcaagtcatgtcttacaatggatggcagcaggcaaagagagaacaagcttgtgcaggggaattcctctttttaaaaccatcagatttcataagacatattcactattaggagaactgcatgggcaagatctgcccccatgattcaattacctcccactgggttccttctatgacatgcgggaattgtgagagtttcaattcaagatgagatttgggtgggtacacagccaaaccacatcaattatgaaatattgcccatgccgatgtcctgaatagtattgcctaggttatcttctagaatttttataattttggggtgtaccttaagtctttaatccaccttgagttaatttttgtataaggtgtaaggataggatccagttccattttctgcacatggctatccaggtcttctattaccatttattaaataggaaaccctttccccattgcttgtttttgttgaagatcagatggttgtaaatgtatagtcttgtttctgagttctctattctgttccaatggtctgtgtgtctgttttggttactgtagccttgtgttaaaggtagaagttgggtagcatgatgcctccagcttgttctttttgcttaggattgtcttggctgtatgggctcttttttggttccactatgaattttaaaatagtttttttctaaatctgtgtagaaagtcactggtagtttaatgggaatagcactgaatctataaattactctgggcagtatggccattttcacaatattgattctttctgtccatgagcatgaaatgttttttcatttgtttgtgtcctctctgatatccttgagcagtggtttgtagttctccttgaaaaggtccttcacttcccttattagctgtattcctaggtattatattctctttgtagcaattgtgaaggggagttcatttgtgatttggctctccgcttgtctgttgttggtttgtagtaaaatgcctgtgatttttgcacattgattttgtatgctgagattttgctgaagttgcttctcagaagcttttgggttgagatgatggggttttctagatataggatcatgtcatctgcaaacaaagacaatttgagttcctctcttcctctttgaatatcctttatttctttttcttgcctgattgccctggccagaactttcaatactgtattgaataagagtggtgagagagggcatataagtattttttcaaaacaactttttttttttgctgcatatagaaaacaattttcataggtcagatcttttctttagaggaaaagatgtccttgtcacagtctatgagatcctgtagaatatgatatcttaccagcttgtaaaactcacttcttcctctttcccatatggcctgctacctgcttcatgaacaccccaggcacattccagtctgaggaccatggctcttgctgtttcttctccttctaagatcgtccctgagacatatacatggcctcactctcttaccacattaaattctttgctctaacattacatagtgaagcctaccctcaccatgccttctaaattgtaaatgtttccctgtctgctgcattgacaatgttccttattcagttaaatagagttctcatcagttcctatatagcatcaaatctatctatgtatctatctacattgatctatctttctttatgtctatcatctatatttctatccatctacctacctctatctatctatctatctatctatctatctatctatcttccttctatcatctctctgctatctgctatctacctacctttctatcatgtatcattctatcatttatctttctatccatctatctacatctatcaatcatctatctacctatcatctatctttctatcttcctatctctatcatgtttttatatattttctctatattttccactagaatgtaagcactccaaggccaataatgtttgtttgtctgattttctgatgtagacattcagtaaatatttacagcatcaccataattttaggaagatgatcaatttttcttaagaagatttgatctattgtgtgtttttctattttatcactttggatacatctatccaaatctgatggtttgccaagcaataggatgtatgaaatttcttctggcttcactctatccacctaaatgctaatcaaataccctttcagagctgagctggatgaatagtttttggcccaaatatcagtgtttagcagatcttcatctatgtagttttctggactgaaaggtcgcgttctacttctgctagtcttattacacattgattatctggatgacattaatcacaataaactatagtatgcaatgctatcaggattcttataatcttagtatgactttaatatgaggtctgtacctctgtggttatagtgaaccaccatgaaaccctcaccctttactatgctgttttctgactattgccatctctgactatatgtggcatatgagagcgaagaggttgcaaaaaaggccagatatggtgccctcaaaaatatcatcccacagtaaggagatggaaagtgcactcccttcttctacgcttccactctttcttcctttctctcttcttccttttctctctcttcccttcctcttcctttctccccttcccttcccttcccttcccttcccttcccttcccttcccttcccttcccttcccttccctcccctctcctcccctcccctccctttcccttcccttccttatttttttccttcccttcctcctcctagtccattaaccttatagtaagtagagattctttctaggttctataaaccctcaggcctaaagacaggttaagtttcaattttggtgatgctgggtttttttttttttttttttttttggaatttcatagacattttaatgggaagttgaaagatacatgtactttaatgcagttttactctggaaaacaagcaatatttttataacattggtgaaatcaacctagttacattatttttgtaataatactgcagaacatgggataatatatctttttactcctagaacaacttaaaagctataaactcttgaactggaatggctttaataatcagactgtttggcaatacgtttcatttctgacaattcagtttatgtgctctattttgttaaagaagttgccatgtaacactataaaataatatgaaatcaaattttttctgatacatttctgatatctttgtggtataatagatattgatctatcatttattatcattttcaaacgtatttcgtaacacttaacattgtgtgtctaaaaatactcttttctttaaaggtgctatcagtgctaaagcattcattgctgtccttcaagcaacccagagtcatggacatgttaaaactttacttcctgttttctttgcagttcctggtgaaagaggtatgcattactgcacttttgttttgggaaatagcattactactatctagatttcttatcatgctgaacaaattgtagcttttagaaggttctatccaatgattgatattatttataaatggtataattataaaagttgggcccagtaatagttataaatatttcttatattggcattaaatactattttaaactggtacttaataagttacttattatgtggtgacttgagtcaaactaataaattgttttttgttctttagggctatttagatcaagaaggtaatcctatggggtttgctggacttgtatcacatttgcattatcatgaaccttctaatcttgtttttgtcagttttcttgtaaatggactcttccatgatctctgtcagccaaccaggaaaggtaagcttgagattttatatatatatgtagagagagagtccaaaaatagcaacagatttgtagaaaaacaacacttcaggaatatttttaataaagaaaatacaattaatatgtagataatttatagatcttcaattgataaagtaaatacctactaatatatattaaatgatagtcagccatgttttatgacatgtatttacaatgtcaacacctccaaaatattaacttcagtgattccttgcctccaggattaataacatattaaataatatacactttttagaaaatattttcttctaattaaatataatatatattcatcatagaaaaaggatatagtaaagcattaagttaaaaataaaaaattactcataattacactatccacagataatcactattaatgtttgtgaatattttcttccaatcatattttctttgaatattattgtatagtatacctaaatagctaatagtatattaatagtgtaatttagaatcatattttcccctaaaaatagcacaattttatccatattgagtaaatttttaaatacattttatttaatacatttttgattaaaatcctttgatttttacatttaaacactaaatctatatggtagttcttaaaatcactaagatagactaaagggaggaaaatctaggtaaggaaataaggcaatttgtgtgggatcattaggatctaaattagggtataggtagcaaggatgaaaaagaaggcacagataaaaactattagcggatatatggtaattcttcaattgctatgtttgtcataaatttttagtttccatgaaattaaatgtaatatgacattccatttaaacatgaaaaaatagaattataccctttcatatttacaagaagacactttgttttatataggctcaaaacatttttctcaagacgttatggaaaagctagtattagtattggcacatctctttggaagaagatattttccaccaaagttccaagatgcacacttcgagttttatcaatcaaaggtaaactgtgtgattctgataaaatttagtaatgtaaaaccactaaatagatcttacctaaaatgacttagcagctgtagaattttaattcaaagggcagttcatttgttttatagaataatttgttctttttgtaatcagtgtgatatttaatctgtaattgatgtctccctctgtaaatctaccaaaaagttaaagtctttgtgaaaaaaaagaggataaacattttattcatgtttttcatttgattgtatcaaattataatatcaggtgactaaagaaaagatatgctaattatacattaagtgaaacatctagctgtatcaccgaatatactgttcttttaggatccttttaccttaaggtagaactatggaagggaagtatatgttgtgaattataatgtcttcactgagaaaatatcagaatagtcatctaagaaatcattacttgactcacagagaccaaaatcagagaaacactttttcgattttatttgtaacatgcaacattttctttggttatgattctctaccatcaagtcaacatcaaatactattactattatacttccctagaataaaatgggatatgctggtttatacaagataaccttagtgaaaagttgctatggaacaaacaaaaagaattagtatatattttctaatcccacaatgctggattaaaaatctgtgctctcacagaatgccctctagagcagtgaacacaattttagtcattgacctatcatctttacacttttcaccactcatgcatttttgaaacaattatttaattgttctgtttatataaatttatatttaacatagaaaattcactatctctattttgaaaaaagaagctcatgataaaaatacactttactgcataacagacagatctgcgtgaaatgttggggtactacaccaaaaagctttaaaaaataggccagacatggtgactcaagcctgtaatcccactactttgggaggcagaggtgggaggattgcttgagcccaggagtttgagaccagcctggggaacagagagagaccccatctctaagaaaaagaaaaaattagataataattcctaaagtcccattatattaaataaaaactcactagagaaaaggatctgggtctgccttcataggtaggcttgtatccccctcaagacattttcgaagccatctaggactggaaaatttaacagcaggttaggaagtgctataggaaaaaggtggatctttagcagtcttttagatttgagaagacgaagactaactagccttattctcaaaatcttaagaaatccatgacctagaaagagagacaaagcataaatgaggcttactaaaactgtaaaacaatacccactgcagtctgtacttgtactgaggtgatcatactttcactctcttggccaaacacgaaaatgggggcattcgctcttgtgaaagataacatctaaagccgtaaagtcctttgaaaacagtttctggtgcaaaaccaataccaaaacaaaacctaaaatggtgagtaagcatgaacatatgaccaataagcaggaagaaaagaggtcggtaattgtagatccataaatcatccagacattagcattaacatataaggattataagtgtgattaatatgttcaagaaaataggaagagagacaaaattgataaaaagatggatatttttactagataattagaatgtataaaactaaattggacattttagaactgaaaatacaatatctgaccattagaatatgcatttcagaagtcatgatcagtaagttgacagcataatagaaagcatccaaggtatagcacagagattaaaaaaaattaaaaaatcagacagcgtaacaaacatgaatcacatggaaaaagtttaatgtatatataatgggagtcccagaaaaaaaaatggtggagaaaaatggctgaagagtattcaaaaagataatagctgggaattttccaaagctgattaaagataacacaccatagttttaaaaccgtagtcaacttcagggaggataaatgtagaaaaacattaagctaaactgctgaaaagcacaaagagaaaatcataaatcacctaggacagaaataaagtgacacatttccttctaagaagcaatgagaatgctagatttctttttaatcaaaataatggaagctagtggacaatggaacaatattttgttgttgattcagatattttacaggcaaatacatgcaatcattgatatatacatatataaactcttggtgttacataactagaatcatattagacatgctattgcttttttatacttatatcaaagatacttttccggatgaccacatatgaatttttttggtatttttttttatttcagtaggttttggagaaacagttggtgtttggttacatgtataagttctttagtagtgatttctgagattttggtgcacccatcacctaagcagtgtacactgcacccaatgtgtagtcttttattcctcacccctcacaccttttcctatgggtccccaaagtccattgtaccatttttatgactttgtgtcctcatagcttagctctcacttatgagtgggaagatttgatttttggttttcaattcctgagttatttcacttagaataatggtctccaactccatccaggttgcttgtgaatgctcttatttcatttctatttatggctgagtagtattccataatacatatgtaccacattttctttatccactcattgactgatgggcatttaggctggttccatatttttgtaattgcaaattgtgctgctgtaaacatgcatgtccaagtatcttttttgtgtaaagacttcttttcctctgggtaggtaccaagtagtgggattgctggatcaaatggtagatctacttttagtttgttaaggaatctccatactgttttccctggtggttgtactagtttacatttccaccagctttgtaaaagtgttcccttttcactacatccacgctaacatctattatttttgattttttgattatggccatccttacaggagtaaggtggcgttgcactgtggttttgatttgcatttccctgataattagtaatgttaagcatttttttcatatgtttgttggccatttatatattttcttttgagaattgtctattcatgtccttagctcactttttgaagggattgtttgtttttttgttgctgctttgtttgagttctttgtagattctgaatattgagtcctttgttggatggatagtttgtgattttctcccactctgtgggctgtctgtttactctgctgattatttcttttgctgtgcagaagcttttagtttaattaagtcccatctatttatctttgtttttgttgcatttgcttttgggttcttggtcgtgaagcctttgtctaagccaatgtctagaagggtttttataatattgtcttccagaatttttatgctttcaggtcttagaattaagtctttgatccatcttgtattgatttttgtataaggtgagagataaggattcagtttcattctgctacgtgtggcttgccaattatcccagcaccacgtgttgaatagggtgtcctttccccattttatgttttcatttggtttgtcaaagatcagttggctgtaaatatttgcctttatttctgttctttattctgttccattggtctatgtgtctatatttatgccaggaccttgtggttttggtgactataaccgtatagtatagtttgaagtcaggtagtatgatgcttccagatttgttctttttgcttagttttcctttgactatatgggcttttctttggttccatatgaattttaagattgttttttctagttctgtgaagaatgatgttggtattttgatgggaattgaatttgtagattgcttttggcagcctcatgattttcacagaatttattctactcatacatgagcatgatatgtgtttcaatctgcttgtgatatctattatttctttcagcagtgtgttgtagttttccttgcagaggtctttcacctcctggttaggcatatttctaagtattttattttactatttgcagctattgtaaaaggggctgagttcttgatttgattctcagcttggttgctgttggtgtatggcagagctactgatttgtgtacattaattttgtatcctgaaactttactgaattcatttatcagttctaggagctttttagacgagtctttaggcttttctaggtgttcagtcatatcattgggaaatggtgacagtttgacttcctttttactgatatggatgtcctttatttatttcttttgtttgattgctctggttaggacttctagtactatgttgagtaagagtggtgaaaatgggcatccttttcttattccagttctcagggagaatgctttctacttttccctgtaaagtataacgttgactgtgggattgtcttagatggcttttattaccttaagctatgtcctttctatgccaattttgctgagggttttaatcctaaagggatgctggattttgtcaaatgctttttctgcatctatttagatgatcagtgatttttgtttttaaatctgtttatgtagtatattacatttattcacttgcatatgataaaccatcccagcatccctagtatgaaactcacttgatcatggtagattatctttttgatctgctgttggattctgtttgctagtattttgttgagggtttttgcgtttatgttcatcagagatattggtctgtagttttctttctttttttttttgttatgtcatttcctggttttgacattaagatgatattggcttcatagaacaatttagggaggattccctctttctctatcttttgaaatagtgtcagtaggcttggtcccaaatcttctttgaatgcctgatagaattcagtcgtgaatccatatagttttggactttttttgttgacatttaaaaaatatataccatttcaatctcactgcttgttattggtctgttcagagtttctatttcttcttggtttaatctaggagatttgtatatttccaggaatttacccatctcctctaagttttccagtttgtgtgcgtaaaggtgttcatagtagccttgaataattttttttttcgtacttctgtggtattggttgtaatatcttctgtttcatttctttggatgaaacttatttggatctctcttcttttcttggctaatctcactaatggtctatttatcaatgttgtttattttttcaaagaaccagcttttagtttcatttatcttttgtattggttttgtttgtttgtttcaatttcatttagttctgctctgatctttgctatttcttttcttctgctgggtttgggtttggtttgttattgtttctctagttccttgaggggtgaccttagattgtctatttttgctctttcagactttttgatgtaggcatttaatgctatgaacttttctcttagcatcacttttgctctgtcccagaggttttaaatcagttgtgtcactaatactgttcaattcaaagactttttaagtttctatcctgatttcattgttgacccaataatcattcaggagcaggttatttaatttccatgtatttgcatggttttgaggatttcttttggagttgatttccaattttattccactgtgatctgagatcacttattgaggcttgttttgttgcctatcatatggtctttcttggagaatgttccatgtgctgatgaatagaatgtatattcttcaattgttgggtagaatgttctgtaaatatctgttaagtccatttgtcctagggtgtagtctaagtccattatttgttgactttctgtctttatgacctgtctagtgccgtcatggggtattgaagtcccccactattattgtgttgctatctttctcatttcttaggtatattagtaattgttttataaatttgagagctccagtattaggtgtatatatatttaggattgtgaagtgttcctgttggagtagtccttttatcattatatagtgtccatctgtctttttaaactatttttgctttaaatctgttttgtctgatataaaaatagctactcctgcttgcttttggtgtccatttccatggaatatgtttctccacccctttcccttaaatttatgtgagtccttatgtgttaggtgagtctcttgaagacagcagatacttggttggtgaattcttatccattttgctattccaaatcttctaagtggagcatttaggccatttacattcaattttagttttgaaatgtgaggtactattctatttatcatgctagttgttgcccaaataccttgttttttctttttccattgtgctattattttataggtcttgtgagatttatgctttaaggaggttctattttggtgtctttcagggatttgtttcaagagttagagctcctttcagcagttcttgtagtactgtcccccactccccaatagcgctgaatttatttccaggcaatctgtgagcagggctgaaaactttccccaggctacaagcctccccactgagaaagcaagcagggctcttgggtttcacacctccccacttgctgcagcctctgtgcttgtatctgcactccctgtttacccccctgccccaggttctgtccaggaaactttgtgtttggttgaaattgttacagagttcagctggaagtttccttctccatgtggtctttccccaattccattggcagccttcccaaggacccctgtgagacaaagtcagaaacggcttttctggggaccgaaagtgcccagagtgcttatcccactgcttcctctacacctatatttcacttggctctctaaatttgtctcaattccagatccttctcccatgatctggaacttcagtttccccattgatgatatgtgttaaggggtggatgttccccctttcacactttggacattcacagtttttcagcttgcctgaagaggcaagttacttctttgaaagggtctgtggattctcttggctttcctggtgtgttcctttggtagttcttggagcaaaagttcatggtgtgagtctccacatgctgatctgtctgtctgagtgggagctgcaagttagttctgcctcttgtctgccattttttatttttatttttattttggctctccagacaatggaacaatatttttaatgtgctcaattaaaataactcctatccctgaattctacacttgtaggaaatattcgtcaaaataaagataaaattaagatgttttcagatgtgaaatctgaggttattcattgctatcaagtctgcagtaaaataaatatatactttaggtacatagaaaaaatccaaaatttggaaacatgaaaatgcaggaaggaatgaatcacaatagaaagggttatgtgtgattacatataaaggaatacacattgtgtcaaaaaataattgtaacatataaaatttgaaataatacatagaactgaagtttatgaaaattataatgtaagagttcagaaggttaatacatttaaatgttttaaaattttggaagattaagaaatataaaattaaagctatatcttataatctctggggtaacagctaaaagactagtaaaatagtgtgcacatacatgttaacaaaaggaaaaactggtaaaaacaagaagggaagagaaaaaatatataatgagtggttcaaattcagacagaaaacaaatggcaaggtagaaaatagctatatcaatagttatattaaatgtaaatgtactaaatacactaagtaaaatacaaagattttcaggctatatcttaaaatatagacaactatagacatgtgccacacaatgacattttgatccacaacagactgcatacatgatggttgcataaatataatattgtatttttactgtacctttccttcattcaggtatatctggatacacaaaatacttaccattgtgttacagctgcctaaagtgttcaattcagtaacatgctgtacaggtttgtagcctaggaccaataggctgtaccataaagcctaggtaatgtgatctaggtttgtttaagtacactttgtgatgtttgcacaatgacaatatcacctaatgccacatttcttagaatatatccctgccattaagtgacatcagactatatatgctatttatacaagtcacactttaggtataaaaactgagaaagcttgaaagtaagatgattaaaaatatatgccaggtaaacactaaccagaagaatcagaagtatctcaattgcgtgaaaagttaaaaaattaatttataaatacacaaaggataaaaaagacataaaatggacatttaaaaatattttacattaaataaaaataaagcaaacataagaatgcttataagttggaatttattcagtgcttacagaggaatttgcagccttaaaaccataaattagaaaaaaatacaggctgaaaagtcaatgaattaaactttagcttaagaaaataacaaaacgaacaagaagatctaacctacagtaagtagaaggaaagaaataataaaatgagaacagatataaagtaaattaacaataattgtgtgaacaagaaatcaacaaagcctctaagttggttctttgtaaagaataataaaattgattaatgtctagcaaaactcattaagaataagggagtaaaagcacaagtatcagaaaagaaaatggggcagtactacaggctctattttagacatcgcaaagagcaaaggaagattttgtgaatgactttatagcaacgtatttgactatttagacaaatgggcaaattcctagaaaatacaactttccaaaactgagcaaggaagatataattaatctggttctgatatctagtaaagaaatttaatctattatttaaaaaaaaaaaaacattcccacaaagaaaacccaaggctcagatggcttcactggtgaattcttccaaactttgtaaggataacatcactatatatgtatattaaaacaccagtttgtatatcttaaatatgcatgatttttatcgtaaagagaataacaccaactttttacaaattttattttagtctgtttgggctgctataatgtagcaatgattggctggctaataaacaacagaaatttacttgtcacagtttcggaggctgagaagagaccagtctttctagctattttttggtacccattaaacattcacttctccgtcccccagctacccttcccagcctctgataaccatccttctactctatctgcataagttcaattgttttaacttttaggtcctacaaagtagtgagaacgtgtgaagtgtgtctttttgtgcctggctgatttcacttaacataatgacctccaattctttacatgttgttgcaaatgacaggatctcattcttttttatggctgaataactaaaagaatagaattgtattgtttgtaacacaaaggataaatgcttgaagtgatggataccccatttaccctgatgtgattattatgcattacatgcctgcatcgaaatatctcatataatccatgaatatacacacctgctatggacccacaaaaataaaaaattaataattaaaaggaagttctaaatcaaggtgtctggtgggggctgctttttggttcatagatggttgtctttatgctgtgttctcacatggtggaaggggcaagggagctctctggcgtctttttttatgggcactaattccagttatgaggactccaccctcatgacctaatcatctcccaaaggccctgcgtcctaatcccatcacattaagtgttcatattttaacatataaattttgagaaaatatgaaacattcagtccactacactcttctggataatacaaaaagagggaatatttactctttctaagggcaaaagttagctttaataccaaaacctgactagaacataatgaaaaggaaaattagagatacttctctttcatgaatgtaagtgaaaaaatagttaactaaatattagcaaaatgaatccagtgaggtttaaaaaaccctcaaaacaaaacgagatttactctaggcatgcaaatgtactttgtctcattgcttgctattcaaatgtgtcactagagtctttgaaattttcacaagtctaatgttatttgagggcatgcttctatttaaaagtggttttgattcagtatgtcaaaatacatttttaagggtaatgagtaaggtatttgttttcataattgcaaatagaaacaaaacatgaagttacctgaacttcaccagtgaaaaaatgaaacagtgacattattgaataaatattaatagataactatagaattatattgcaatgttctttacctttcttcttccaacgattcagttttgaaggaaggtaaatagatctatctctatgaaaattattcggcttctaggtgttccttgatgatctccctgaggattttagtgatgctttagatgaatataacatgaaaattatggaggactttaccactttcctacgaattgtttccaaactggctgatatgaatcaggaatatcaactcccattgtcaaaaatcagtaagtatattttacctccattgtggaacaatttgaagaataaataatcttgcctaagaatagtttattctggaagaagagtggaaccccagaaagtttattttgccctcaagtgaggagattccttttcctttctaaagaaaaaaattttgcttattagacattaaaagggcaaaagagacaaactaagtagggcaatttataaccatcttgttaaatgctgcttcagggtcaagcctggaaaactgagtaagggcatctatgagatgaagagaaactagagacgaattctgtcactctctcttgagaggaaatacgcttagttttcataaacacagattctgagcatattttctgggtccaaactctggttctgctacttattagctgtgagatcttgagcaagagactccatactcatgccttagttttctgaacagatatatgagaaagggaatagcattatctacgtagttttgatgagttttaaatgattaagttaacatatatgaaaatcttaaaatagtgttttgtacatggttaacactcttagcatttgcactttttttcatgagctaatagatggaagctttctaagggaaaatagatacaaaaaggtgaccatcacaggtggggtgagattggagtctgtgaatattatgcctcaattacaaattagagcccagtttgaatgtctgatctgggttttataagaatataaatggaaaatatatttattctcatgcactacttccaaacttactaattgaggctgcatggtttcaggaaagattctgaaggcaattctgagttcagtaagaaaaagtacaaaggtaataacaataattctctgataagagtatataatttaaatttagtctttcatttcttattgattaaggcaactaaaatataatacacatttttataatagtgatactaacattaatagccaactttcattgaatgtattctgtgccaagctgtgctactaaccttatgcgatataacttacgaaacatttcagtcttcattacatgaagctgaatggctccccttgtaacatggtctagagaaagtatctgaggtttgacaatttgactgagttcaaaacactaatctatccctaactattattgtcagaattcacaggtaaagaatgtgaagactctcaactcgtatctcatttgatgagctgcaaggaaggaagagtagcaatttcaccatttgtttgtctgtctgggaactttgatgatgatttgcttcgactagaaactccaaaccatgtaagtgaagagtggggtttattaataaaagctgtttaagaaagaatggatttatattgctaggcagcttagaaagaacttcgaatttcccagcttaaaaaggaaaaaaaaaatctgggtgtatcaacagatatattcaggaattggtgctcttgaagtcaatatgatttctgtttctcagagttggcctgaggaccctgctcagagagtttccaggcaccactacttttcttcaatctttgaaggctctactgatattgacacaggttttctgtggaagtagcacataaaactgtcttcagactttctcagtactgctataaatgctgtaaatactacttacagtctgcatcattgatgcctaaaatggaatgcaaagaactagacacatttggaagatcctggctaattcatttgaatgttgacacttggtgaaatttaatttatatcttaatacaaactttgagaaaaagtgttttattacatttgatattatggattgacattggtgtctcaactctattttattccaaaatcatagtcatgtatcacttaaaataattttgaaaactatatacatcttgtgcattttaaatgaacacatacatttttatcctaaatttaaatactttctaaaaatacagtttttagtttcaaataaatgttggtgtgttaaaaccaatgcatcattcttttaattgtataaaatggaatatcaacaagaaagtgttttcatacccatagtcagtaagttaagaacaagtcaggaaaactttttataaggatttataaatttgcagttcttttcctcttgaactcacattttctttccatattccctcacatttaccttacccaactcactttatacaaatttactttactagagtaagttataacctcttaaaattgttttgcttttattgtttattttaattaataaaattagttttacattttaatataatgctaagcgtacatacaaatatatcttttatagcatatagataagttctaaagcatcgaactaaatgaacaccatgtactaaggatctgtgtactcctcccacgtttcattttcttgtctcccgttttcccccaggccatcaacctttctaaactttgtgtttttcacttttctttttaaaaactacatattacaaaatccctttttatattaatttgcttttgaattttatgaaaagtgaaggaatagttactgcagtcacctgaaagtcacttttatttacattcagtgctatgccttaaggttcatccctgctgtaacgtcgaactctcttttatttttagtacttaataatattttgtagtgtgaatatcaaacagcctgttaatctgttctcctgtttcgaatagttgtgtttgtttcttgtctttgctattacacacagtgttgctatggatgtctcgtgcgtatgtgcaatagtttctcttaggtattgattttctgggttaaaataattttctgagtcatatagaataagaatattcaaatattaaacttttcaagctactaccaactcatttaaaaagtagctgtgccaaacaagtctcagcaggagtgaacgcagttgatatctgtcactcgaatggttacctgcaaattattaaattttaataatagagtcttgtttagatattgctgcagtttataatttgcatcactgatctgcatatagtacatggagtcaactcttattattcatagatatttatgtatgaattttcttagttgttaaaatttatttgtaactaccaaaaaaaaatagctgtgccaatttacactcataataacagtatgctagagttctattgatcctctacagtacagtttgcaaaaaatgagcagacatgggaaaactattcaccgccttctttttacttttcttctttttgttttccttcttcctcctttttattcaggtaattgggttcccaagattgttagagttgttcaattgaattcctttcttgtgatgtataatcctctagctcattaatattctgtttacaagtaaattcctttcaccaataaggagaatgaaatggtgttaggttttctttcctagtgagtgtttctatattctagtggatggatggttgaaagtgccattggtattttgtggaggcaataatcttcatggggtggagctgagccactctccactcttgcttaggatggtgctaccacaatgtgtggctaaggcaccctcttacttcacagtgaagagtgggctttaaaaatggtaactaaaggatgtatctacaaagcaccacataagaaattatcaactttctttatacataaataatacattaagaataatcgtattttttcaggttactctaggcacaatcggtgtcaatcgctctcaggctccagtgctgttgtcacagaaatttgataaccgaggaaggaaaatgtcgcttaatgcctatgcactggatttctacaaacatggttccttgataggattagtccaggataacaggtatgtcctctctgtctgtctctgtttctctgtcctcccatctccatctctaatgaattaatttaatgaattttaaggaagaaacctcattacagtttcaagtgcaggttaaatcatactaaacatactagattgattttttttagagactaatggcaagagagaataacaattcggtattatttttctttgtggttttccaacaaaatcttggcacttagcccagctcacatgacatcatgctgtgctctaacgatataaatatttgcacatgctcatagatatatttgtatttattactctcctgtttattcattattagatattttaaaactgaataacaaataatggcatgctctccagtatttgagaagagtagatagaggactgagtacatgacaattgttttagttctgtggcaggaaaaacattttcaaaaatagtagccaggggtaaacactgttggatttatccaggatgaagaaattgacttgggcactgagcacatagatttggggaggggcattctgtcacatcaaagcaggaaaccaattttgttttttacataaaatgttgagcagtccttatagaatgaaggtattaaaatatctgacactcttcaaagatgttgagcactgttttgaaaaaaagtgactcattgtgaataaagcagctgtgacattagtaaatgatacaactgtttcttcccttttgagtctctagttccaatttaccctcctgagctttattttcctgttttggttatctcctgagatggccagcctcctatttttattgcttatatatgattgtgaaatttcaactcttgaattcataatcaccattgccataggttagatcaatatctaggagtctgtggcagaaataatttttggaaagagatcttgacagacaaaagcaacctcttactgataaattcagcatttaaatataaaataggatgttctttaatgttttgtattattaattttcaaaatgttgttttctttaggatgaatgaaggagatgcttattatttgttgaaggattttgcactcaccattaaatctatcaggtgtgttatatatttaaatattgattttagattttttaataatttatttataatttgaaaaatgttgagctgttactataagccaggtacatgaaggtgccattaagcttcttctgtgctatgcatttcaactccccaaaggctctgcagaatgtctgttcaacacgtgttgtattatttctataacagaattaattccaatgtctagttgagatgaagtttcatccagactagagtctcagccccaggcatcatgcactgacaggcagcaatattcaaaagcttcattgactcctcgatcctggtattctcaattgccacaagcagtgtatgtcaaagacatgggacacgatatttcagagggctccttagggttccatccggtctctagtttatattcacttacatactttgaattttgtgttttctctgatgttttctccaggctccgtctgactctgatctttcatattggcctcctattttcacctttaacaaaacctagtggggtcccaagcaacaccaaactttatgtgggtaccccattcttaggcttcattgaccatctactgttgcttagttgcatgtccatctttctttttcttttcttttttttttgagacagaattttgcccttgttgcccaggctggagtgcaatggtatgatctcggctcaccacaacctctgcctcctgggttcaagcagttctcctgcctcaatctcctgagtagctgggattacaggcatgtgtcaccatgcccggctaatattgtatttttagtagcgagggggtttctccatgttggttagtgtggtctcgaactcctgacctcaggtgatctgcctgccttgccctcccaaagtgctgcggttacaggcattagctgccgctcctggcctaaatgtccatctttctaaagccttcaatctgcatgcaactcaatactttataggtgttgcttcgtcctatccctttttatatatttaatttgccacaactctctccattattaggttcttgctaatcaagtctctttttatatcttggatctgagcagaatcggcctgtttggactttttataacagagtaaaacttttgggagcagaaggaaactgctttgtccacttggaatatctctagatagggtattccttgagtggctcatagttactgaagttattatctccagagcagcccaagaaactccacagacttggaagctgtctcaaaaacttgggcaaggaaatcaatcaatcaatcattcacacattcatccaagaagtattgaagcattgttggtatgagacacacttcctaagcatttgagctataaaggttcataatttttttttttttttggagacggagagtcacgctctgtcacccaggctggagtgaagtgttgcgatctcggctcactgcaacctcacctcccaggttcaagcaattctcctgcctaagcctcccaggtagctgggactacaggtgtataccaccatgcctggctaatttttttttttttttggtattttagtacagatgggatttcaccatgctgcccaggctggtctcaaaattcctgagctcaggcaatccacccgccttggcctcccaaagtgctaggattacaggcaagaaccactgcgcctggccaaaggatcattaaattgatatacctgctttaaaaaaattcttacatgtgtagtgaaagaagctgacttatagaccttacaaacatggtcagagctatgatggcagataagggaatgactaatgtgacttgcattcaaagaaagagtctcaaatgaggtaattttttgactaagccttaaattatggggaagaagaaatagtattttcaaagtacagaaatgagaaagggcctgatgtgtcagggatagactccaagctcactatgtcaacatggagattatgggcatttgacagagatgggggaagatgctgggttgttgtaagagactttaaatggaatttggatctatatcaggaaaggtctttatgttaacattaagaagtttgggcttcatcttttgagcaacgtgtagacagtgcataagcctgaggggagcatgagcatgcggattatatatgtggcagaaatatgtaggtgcaaaggctgtaacagtcatgcaggtgaaaatgagtgaaggtctgaattaagggaattgaaatatgatgcagaagagtgatcagaaaaatatttacgaggtaaaattcaagaaattggtaaaaaaatttatgcagttggtaaagatgaccaaagttcctatttttgttaaggatgtataggaaacaaggatgagcatgacatttggggatgagaatgaaaaatagtgagctagaatttatacacatcacattatatctgggagatatcaatcaggaggaaatgttcagtagtcacaatgataagtctgtaactcagaaggaaatttggtgttgtagagacagaactgatcaatttttgtggtaggtcagtgatgacactcgaaaataactggaactctagtggaaacaaggtaggggcaaataataaaaggctgataagatgtcagatcatgacagttttcagcccttgatcagtccagctgtactgttcattcttggatttcttctctccttttttgttacctgtacattagtttcttaatgctgctgcaacaaattaccacaaacctagtggcttaaaccaacacaaatttattattttacaattctggaggtcagaagtccaaaatgtgtcttcttgggctcaatccagttgtcagcagggctgcatttctttgtaaaggctcttaagggacaatctacttttattgccttttccaacttttagaggctgccggcattccttggcttgtggctccctttcatctccaaagccagcaatggttcgtagactcacactgcatcattctgactctctcctgcctcactcttccacttacagggacctttgagatcacactgaacctgcccagataatccaggattattttcctatctcaaggtcagctgattcgcaactttaattcgcactgcagccataattcattcccctttgccatgtaacctgacctattcatcggtttctggggaatatatgatatggacatctttgcagggccattattctgcttaccatatcttgttgtccttatctttttacacatctaggtaaagaaagcaatattttcctcttcgtagatgtagctgcctgtgggtttcagtatacactggacactagcataaataacacaaaatgactccacaagagatatgtagaggaaagaaaaggaatttgcgttgcacttttgaagggagaagggatcaagttatgtggaatttgatggcttttcagactctcttggtaatagtcatggagaagaattgcatggggttgttttgttatcttttcttaaattttttatacaagattttttaggagaaatatgtttcttatcattattcctcatattttgctaacataatttcatcatctgatgggatttccttacttctgcctaaccaaggaaagcctttcttataatattcaatctcactaaagtggatcctatatttttttccccatttccagtgtttccttgcgtgagctatgtgaaaatgaagacgacaacgttgtcttagcctttgaacaactgagtacaactttttgggaaaagttaaacaaagtctaaaaacaaagtctatgcaaaccacttaaaaataattccatagtagtttttcaggtcacgtttttgattcttatgcttcttgccagaaatacattatgataaagtggaaatacattacgatgaagtggaaagagcaaacactttggaatcaaacagagttgcaatcaaacctgccatgttctgtcatgaatactcacaaattatttagtatacctgaatcttggtttctttttataactgagtaataatggttacatctcaggtagtttgaggattgactaaaaaaatgcgagaatgttgtatgtgactgaataacaatttttactctgcgaagccaaagtaaatataatattatcagtaactttatccccagtgtcagtatttataaaatgtttattaaggctagaaaaaatgaatacaatatcctgaaggtgaaatatattctcttcaattagcataaatatgatttacataagttagctatacagctattgagatagtactttctagtaaacttaaactactttttaaacatacattttgtgatgatttaacaaaaatatagagaatgatttgctttattgtaattgtatataagtgactggaaaagcacaaagaaataaagtgggttcgatctgtttac

SEQ ID NO: 449 - DNA, 66351 bp, Homo sapiens
aattctatctgacaacagcagcagagggacccactatcttgtggtttctgtcaagttcctgattttcatccgtagttgaagatgagcaagaactctgtaacagtgttaccttggagcctacaatgagaggtatttcaaaatgagtgaagcatgactctcacagatgaaggcctagacgcaggtaagaaaacagcttttccatgaaatgacttgcatgtatgtgaatggtgcatgggaacagaaaagatttctgagctgggcagcaacaaagctgaggaacactgaaccattgccactcacatttttctcagtaggttactttttgtttgacaactataattggtatattaatatatttccccatgctaatatggggatccaatactgaaatattatcatttatgatttaggatttccaatcgtggctgtcaaaatatatctgtgatgaagagatatcaaggaaaatgtttaaaaggtattcatccaggacaaacatttcaaaagctcgtaaatgtgtattaaaattgcttctcaaaactacaaaatcgattagcataatacttaggtcagtatgtctttgtttgcaattgcatatgtgtacagatatatagttgcatttacttgtacatacacttatataggtaaaagtttttatctttgtcattattaggataagttaaccccattaacacctactaaaataaaatgcctttaaattgtaaatcacagaaatatctgtcctaggcatagcaaatatttgagttcatatgctacttatttatagtctatgactaatcagctaaattacttacaattctttaaacattataaattaaattacattcaggagaattagcacagacccacaatgtcagcttattcaaccaagcccatgcaatccatcttgtctacatatactttgttaaccaaggacaatcaatcctacggagaaaatgaatcaaagatcacactagtaaaaaaataaatagtttgtatattcatctttctaaaacatacaaacttgataatcagttttagcactaaaaaaaaacctagccattaagttaaaaagaaaacaatgcactcggaaaataccaaaatggcatattttatgatttgtaaacatgcaatgaattttatatttcggtaaaatttatgaatactatatatacaaacatgcatacaattgtgtgcacacaattaacacattggtatatatgaatgaactctatattgtcatgtctggaaaaaaaaaaaacaaggaggccaggcatggtggctcacacctgtaatcccagcactttgtgaggccaaggtgagtggcctcaggagaggctggtcaggagttcaagaccagcctggccaacgtggtaaaacccctatctccactaaaaatacaaaaattagctgggtggtagtggtgcatgcctgtaatcccaggtactcaggaggctgaggcaggagaatcgcttgagtctgggagccagaggttgtggtgagctgagatcgggccactgcactccagtctgggcgagagagtgagaccctgtctcaaaaacaaaaacaaacaaaaataaaaccaaaagaacagtggggagattccaaggtactcaaagcatgaagacacaggggaagtgggccgggtgcagaggaagaagtataatttcctgaagtattacggtgcccacttcacagttgaagcaggtacagagggtgtgactatcctgagcaaggccacctatgatgcttctaaagtgctgaacagaagaagaacacggctccctagaagaacgttcactctataaagtgcttctgagtgaatttagatgttgaggcttccctaagcctaaggctctatgaactcagaagtcacaggtttattccatttggccccaggatatccttagaagttaggtcggtcacaagtgagctgtttcaacctcccagtgtgagcagtctctagaataccaaaaacagaccagtccaggaggtaggctgacaccaacacaagcatattctgccatcatcatgagcatcctcacctgcagaaggctgtctagtggaggatgatggacaataaggagtgtttcctttaattgaaaattatatcagtacaagagtgccaagtttgtttggatagagcagtggatctcaaagtgcagatactataccagctgaatcaacatcaccagtgagcttgtcagacatgcaaattattgaccccaaacctacagaatcagaaacaatgggggtggagcccagcaatctcttttaacaagccctccaggtaattctgttgcacattcagttttgggtgaccccatgtcctgggacagatccagttttcacctgttgtctgggcataattgaaaatagtgcctcctttctatctcaaaagtgtccttgattgtataataaattaattatgatcatcaatatgatcaccctgccagttcatactggatgctaagaaggcatttcattggccagatgctgtctactacttgggatttcaaattagcttcaagtctggtgctacacccatagcctccccaccatcaccccgcaatactaaaagatgcattgcctcctaaaagtctgagcagcacagctagataaatcaacttcagtaaaaatatcctatcttaatgagaaaaaatacctacaaccaaactatgtaaaatctattttaaattctcagcttcctaagtagcatgagaatcaggtctccaaaaccctctttactaaattttctggttcttctttacagggaattttcttttcctccctagcacccttaaaaaggataaatctagtaattaatgaatgctatttttatagtaatcatttggttacattaattcaccgaaacaccaagtttaccacagcaaagcttctcaatccacctgttctttaaagtcaaagtgaaatactggtcatatgcttttagatctgattagattcctttgaaatttttgtctttactcggtataaattaaattgctagctttttatttttcactgaaacctcccatctgttgtttttgaaaagcatcaaaggccttagatatcatgttctgacccctcatcattcaaataaaagaacagccagggacgggtgctggcttctacccaattatatgacatctgcttttgaggttaagataccaaagaaaagaggaaaagatcagttagttggcttctgaggttggcccaaagcgatctgtacacttgtggtgtgatcacttggggaaaaaaatctgatcctcgatactctccaggatcatacacacgcaattattttcatcacatcacttatagcctctagactctaggagccatttataccaagcagatgggaaatgtgccaccttctatagtgggagagacacctggctggaaagaactcacctgttgctgatgtgatcttcccagtgagtcgagccctaaggtcaaaggttggtaggagagctcacacaaggtttcatctaagaacatttccatcctgctacagatgatgaatgaaatccccttctcactctagggatattttggccatttattcattcaacactgattccttacaatgaggcagccaacattctaggaatggtagagatggtgtgatgaaaaggttctgggcctctggtggcttacattctaacagacatatccacaaaccttaacatcatcactcctaggaattgatagtcattcaattatgacaacaatctttggacatattataacttataagattacatttttatttccttaatggggatttggagacgattctaatctcatcagaagtcatttactgactagatccaaatccctaaccttaatccagctgggagctgatagccctgcatgtacagatgacaaaaacagaatatgaaaaatgatacttagttcagttaaatgtcctaggaggtggcctttagtgttgaatgttctttctctcctggcccccaaaactgcctacctatgtttctgcacaaggatttcactgcctctttccccactataaatatgcctataagcactacctttatagaagtgaaaaaaggaagagggaggatatggtctgagataaaaagaaaacctaagatgtcagaccagctgtccctgttatcactgagtttgatacacagcagctgtccttataactggtaccactgaggcaagttagttaaggaaaaatacaggttaaccaaaataacaggttaagtaggaattatttttagaaaccttaaatacattattttaatttgaaatacaaagtgcacattaattgcttaatcttttggttttgtggcagcgaggccttttttctgaatatgggttggttcatcagatatctgcaccaattttctttcatgagccacgactttagcacactgccagtcaaatccagtttctcagtttagttcaagtagtgtgagaactttaaaatgctttagaggccacacgatttaaaaaatccagacccagtcctagactttaaagtccctcaaaagaaaagactctgtcttagcctcataacacagtgaagttttcaataaatgttacatgaatggacaaaaatgagggtcttaaatatgatttgaaaacaacagtctgcatcaccaagttttatttaaatccactcctaccccaattaagaaatggtatatgccttgttctaaagaagacaaccagtccctatgtgtacaatgccaagtagtatagcataataatgaaaagtgggcattctagaatcagactttttggcttcaaatcttgactccaccacttattctaatacaaccttaataaagtcacttaacaactctatgcctcattttccttactgagttatggggattaaatgagttatatacataaattacccagaacagtaattggcataagaacacaatcaggccgggcgcagtggctcacgcctgtaatcccaacactttgggaggccgaggtgggcagatcacaaggtcagaagtttcagaccagcctggccaacatggtgaaactctgtctctactaaaaaaaaaaaaaaaaaaaatacaaaaattagccgggcatggtggtgtgtgcctgtaatcccagctactcaggaggctgaggcagaattgcttgaacccaggaggcagaggctgcagtgagctgagatcgcaccactgcaccacagcctgggtgacacagcaagactccatctcaaaaaaaaaaaaaaaaaaaaagaacacaacaatgtttattgctgtcattgccagcatcatcttctttcccaataacatagtgtggtgctctgatgactataagaacaatggaagccaaagagatacagaggttgaatattccttgatcatactgctttggaccaggagtgtttcagatttcagattttggaatatttgcattacacttagcagatgagaatccctaatctgaaatgctccaatgaacatttcttttgagagtcatgtcagccctcaaaaagtttcggatattgaagcacttcggacttcagattttgggattagggatactcaacttgtattcaaaattccagtgtgttccttaacctctccctgctcagttgactcatctgtagaaaacagaacaaaaataaccacctagaagaatggctgtaagagttatcatgcctggtacatagttgagagtcaaaacattatagccattaacactcatacaaggaagaaaatctacaactccacacttcaagccatatccacagatgtccccacctcctgcacatctgtcaacctctacccaccaaatcttaattaaccaggatttggttgtgtactcaatattttatacttggggcagaggacaaacaacctttcccgagtatgcactttgtaagaatatccacactgaaaaacaggatataatctaggaaaaattaaatggtgcttttaatttataagttagaaaatgggaatttgggaggaggaaataccactgtgtgctggtgcacctggagaacagaagaagcagaattaagatgagtcttgtaagagggacatgatacatatatatgggaaatgatagactgataactatgggaatgatatactgagtagaaaaacaacttcaatttatgtttatttgtccaaaaacatgtcctgttttatttttatcttgacctcttgacttgagaaaccttgaccctatttgagaaatcttatccccaagtcctaaaaacatttacctctttgcatcttcaaaacacagcacaaaccatctattgtccagaaagccttttctgtttatcctgccttttcctgcaagctcatgtggtacacactgtcacttctgccctctttcaagcaccctataccatttacacacacattacaatctgctctgtgtatgctcaacatctgtattgcttcaagagcaagttttgtgcctttgactttttcccctaatttatattggggtataaaccacatacaataaatgaaaattagattttaagtgtagagttcattgaggtttgacaccatataatcaccaccccaattaagataaatagtatttccatcacaaaaatttcatcattctcttttctaggcacagccatctacattcctaatttctctcattagagcttagttctaccagtattagaactacactgaaatggaatcacaaggtacatagtcgtttgtgtctgacttgttttgctcaacatgttttgagatttaacttgttttgctcagcatgttttgagatttacctatattgtgggcccgcatcatcctccggatcaccatatggtattctatgagtataccacaatttgtttacccattttaatctgttgatgagcatttgggttgttcccaacttttggctgttgtgaaaagagttgctatgaatattctaatataagtctttctatggacatacactttcacttctcctgggtaaacacctaggagtgaaattactaggtcacaaggaagcaacatgtttaacttgataagaagtgacccgttattcaaagtagatttactattttacactataaccaaaaatataccaaagtatcaattattctatttcctcgtcaattcttaacattgtcaagtttttttccattctaatgggtgaaagtactaccttattattttaatttgtatttccctgttgacaagtgaggctgagaatcttttcatgtgctccttgaccaaacagcttcctttgtgaattatttgtttgcatcttttcagcattttttttaagaaactgagtttgtctttttattatagagtaatgaaaattatttaaatagtctgagcctttaacagagatacttttgtgaatatttactccccaatctatggcttgccttcattttcttaatggtgtctacaaaaaaaatgaaagttttaaatttggggatttttttttttttggtttttgggtatgtgtacacatttagttttattctaacaaagcaacttgtacacttttaacatttaaaactaagtgtcatctttcctttccagtgaaataaaaagaaaattttaaaatagacaggtacaaaagtacaacagagaatgtgaattctaaataatatcctgcaggttctgtggattgtcccatcgagtggcagggcaagagtcatcactggagagaacttattttaaatgtgtcatgttaaactgcaaagatgcccattaaacatcacaattaaatatgccaaaggagaagccatgttgtcaaaatacacacttaacccacccaaacatctcaaactcaccctttgctgaccttacatagtcccattttttgttttgtctttttttaaacaagagaaagtagacagatacatgttggcaaatgctaactatccatattcacgcagagacacagtgttctgagcataatacacagagaaaggaagaaaagcgctaaaattctgtgcactaatacacaggggcttagcaccatgcaaattccagcagagcaaagggaggtttttcttttttccccagagagttcagtggtattaaatccatacagtttttgttcagacaagaagggataaaaatgaatttggaacagaaaggggtagagatccttttcccattgtattctgctcaagttattttccccccaaataagttgagagctgtggtgtagagaaaaaaagacctcaagaacaaggcagctgagcccaaaagaaaacacacacacacacacacacacacacacacacacacacacacacacgacagcttgctcccaggaactggagaaaatttttaaaaaggttggaacctatcagtgttctattagtcattttctccttcaccccctttctttcctccctttcatcatcatcttcatcttcttcatcttcatccttatcccctttctttatcaatatcttcccatccttcttcatcatttatctccttccctttcttcatcatccatattgaaaaccaagtagtactgtaatggatttgtccaagtattatctttgatgaactctcccaactcaacaacacctgcatcagaacggtcagtaaaccaggtaaagaagctctctggttcttcgtgctgcctcttcctgctgactttactctgcgtttgactggaacgttttcattatatcctttccagatttgcatttgacttcagtggactctaaaaatagatcaccactctcattcagatgaaattccttggagagaactttattttcaaactaaagattttcatcaaaataaaaatctttctgtaacctgatttaatacctccaaattctgtcacttcaactcgtcaaataatacagtgcctctttgtcttcctccccaagtaatgtagacacttgtggatggctgacaaatgctgttacccaaaaatttgaaatttgggcaatcaattttgacctcttccaaaaaatggttggcagaatttgttatacttctgttctgctttcacaatctccccactggcttgttcattaagtctctgaattttgtgtgtgtgtgtgtgtgtgtgtgtgtgtgtgtgtgtgtgtgtgatggagtttcactcttgttgcccaggctggagtgcaatggcacgatctcaggtcactgcaacctccacctcccaggttctagtgattctcctgcctcagcctcccaagtagctgggattacaggcatgcaccaccacacctggctaattttgtatttttagtagagatggggtttctgcatgttggtcaggctggtctcgaactcccgacctcaggtgatccacccaccttggcctcccagagtataggcataagccaccgcgcccagcctgtatttccttttgtacgtcgtcaatatattcaattgcttctttctgttctttttctcccttcttcagcaagcccagagaggccaatgtctcctccggtctcagagcaggaagtagtcttggttttgggggtcacaccgctaggaaagttcaagaaccagaccacaattcttctttctcgtcaggaagacgctcagaaaacttaattttttttgttttgtggctaaaaaattttgcatactaaaaccaaccgaaggttgggaaggtattttacattttcctctagaagctttgtggtcttagttttacctttaggtctatgatacatcttaaattgcttccttgattcctccatttcatctgttagtagctctctgcagagaacaagtgctttgtaaacactgctgactcacttataaatgccctataggttagaagaaatgtgttttcaaagcttactaaaggctctatgctcagcctcagtaacattctagatttaaaaaaccactaatgggaatgaactcacaaattagacaaaatttgaaacaaattaggcaaaatttgacaaaatgtctaactcacaaattagacaaaatggagaaacctggaagcttccatttagaactcatgttatggttctgcctaggacatgccttgactagggcagggataatccagtttcatttctgtacaaatagcagtttaactcagcacagaaaatggagagcagtatgctcaccatattttcttcctctttgtatatatgttagaaaattaccatgtcattagcatagactgaattctttttaacaaattaggccataaaacagtaattcacagcagctctgttgaaaactgacttatatatatatataagtaataaatgttacaagatattactctcaagagacattttctataccctaaaacactggcattattttataggatttaggtagctttaaaaaatgttttattaatgctttgtattgaaaacatgtaagctgaaaacataaaaagaagtattcccactgtttaaagactaccaccgatgcatattaaaacagagcatttccagctatttccttgagactttactaagaacgcataagactaaaaagagcaaaaattacccttgtccattttactggcatttggagaaattcataaattaggataatagcgcatttcttaagtacttagcaactgataaaatactctacgtacaaagaaattttaaaaagctattctcaaacactgtattttgacagctgtttccttgatattattcagccaaaacatgctccatgttttagcaaggttcctttcttattactctgccttagtgcctaagtttctacaccacaattaggcaattctttttaatgaattaggccataaaacagtaattcacagcagctctgttgaaaactgacttatatatataagtaatacatgttacaagatattactctcaagagacattttctatagcctgaaacactggcattattttataggatttaggtggctttaaaaaaatgttttaaattcataggaaaactatttacatctaagcaaggaccgaggctctcatttgtagcttgcacttttctgtttttaacaattacccagattcacaagctaacatttcagggataatcaatagtggcttagaatttagggtgaaaaaagagaaagtaacatataaccttgatattgtttctttctaaaaagaaaaggggatttgtgattagctacttaaatttgattacattatacacttaaattccttttctcatgaagtatttcaatgactaccatttccttaatagcacttcattattgttatgcctttctaaatgacaatgtacaatccttttcacagccaaaggtcaaaaagaataaagaaagcaaaaatctcccagtaaggaatactgtcataagtcacatcttccatgaagtgtttagttgatagttcctgtaaacagtcaaaataaacttcacttcaagaatgtaaggagttctaacacgcaagaaatgaactctagaatgagctgcccagacaattttaaattaggaaaaagtcttttgtactttacagtatagatgtaatttgtcaacactatgtataaagtaaatccaaacatcccataaaatccattttaaaccatactgaaaacactccaggacagaatggattgacttcatgtgaaggtgggggtttataaaagttacagactcctacaacatgctgggcatgacagcataccaattccttcccaggagaaggaagttttcccttcgtaggacatctacagcacttttttgctctgaccttagtctttcttcttaccaggcagctaactatttcctgcatgtatgctttatttttccctgtgccaagccaccaagtcccaaagctttcctcccatggctggagttcctttccactgatatgttcatatcacttgctcatccactccttcatttacttaaaatcttcaaggtactagaataggaaagaatgttcaaggaaaataagacagcaacccccatctcttatagctaacgctaaggtggaagtcaaaattgaaacgcgatttttaaaaaggactgcactattatacaactgcttctgtaaaaatataatttaaaaaatgtctagagtctaggcaacctgtgtttaatgttaagtccgttcgctcaacactaaactgctttctatctggatgatactgtaaatgtgatcctaaaagtctcttctgtttgagatttccagacacatgcagtgatagggttcaaatatttcacaaatttgttaacattttggctttgataagttcatgttctcattttaatagaagatgttgaataccttggaaattgaggtcatgaagggacatctacttatttaacagaaatcagatgagccttcctcaaaggcacagaggcagcagcatcattagcataaagttgccgtaacaacgttgtgctgcaaacaaaagcactaaggagaaaggggaactgaaaggggaaagatggcagcaaagccaagggcacctgtgcacactgccaagtcgaatctaagtcagtagctcagaaactcttgtaactgagcaacctgaaggcacagacaacaattaaatgcctctttgaaccagaactaatcagacttgcccagcgctgatgccctttgcctgccatcttcaattctcagggccgcaagactctgctccaagcctttccatgattccctgaaaaggaccaagagacccttccaatttcataggtgttctgactttaatttgcagggagaaatttttttatacaaacacaatcttaccaatacataagacagaaccagaaatactatactcttggtgaggctgagatggggacaccatccgtctccctggaaccccagaaggcctatgaggactgccagaagccagccaagaaacattttaaaacctactcagattcctccgtataaaaaggaatattcttatgatgagcctgctgtatactgcctattttcttagagagaaaccctgaatataactgaaaatctgtcatcagtgatttgagaggagatagggaggatgatggcagtgaccggcaagtgggcagttgagaataaagactcgaaaaggctctcatggtgtaagacacaaatataagagtaaagaagcagaagataatgatactcaaaaaagagaaatcagtctgtgaaacttctgctttttaaaaaattctcagaaattccacgtctgtgctgggaaaaataaactcaacagttttattttcctgatctctttaactttaaaagccaaaagatctactcagtttccatgatgactatttaaagtctcagaatagagcatcgtacattatattctatgagtagctcccctttgtttattccgtctttggctcaaccattattaactgaatacttccactgtgccagatactgctctaggtgctggcgacacacagcataacaagtggttctgcactgaagaataatctagcaggctggaggcaggacataatggcgagttctggaaaatagggtgagaggaagaaatcatcatgaagatgagagatcagaacagaaataagggagacaaagagggagaaagagcaaatggagaagatgggtgtgttatctttgaagtggaggagcaagagcaagaaggccagtgtggctacaagagaagggcaaggcagtggccacaggaggtacagtcagagaaccaggcagggccagctggtcatgtagagccatgcaggccatgaccaaactctggatgttttctaagtgtgatgagaccacacacacacatacacacacacgcactgggtgggcctgagcaagggagtagcaagacttaatttgtgtttttagagctccttcttgcagctggctggggtagggggcacaggctggaaggtcacaggaggctcctgctcccagcattgattatgacagagcagtttttaatacacaaattaaactgcaatttgagggaaacaatttcaggagaaagaaaccccatcaactataaatgagaaaactctccatactgggttatggttatcttagagatgtgcgctttacacaatcataaaccaactaataagctcaggtttgaatttctgagacaggccataaggcgttttcaataaaagctcttaagcagtttcttctttcctaactgacaaaatacactcctactgccctcgtgagaagagttcagttcttccatttaaaagatggcatgtccaataattacttaattttatgctaagtgagcacaaactctttttgatgtcacagcaaacaagtgcttacaaaataatgaaatcaattacagcagctgtactgaagaccaacctcaaaacacaaccttcaaagattttaggggaatgtgggagggaacaaggaaatacaagtacagagatctttaaacactgaacaatgaaataacccaaatgtccagtaacagaaaaatggttatgattcttttcttcagtgaaatgaagtagaactactcaaaagaaaaaggcagaactttaaaaactgaaatggaaaagtcaccatgatatactgttaagtgggtaggggagagggaaggagtggtggtaagagatctcagcctctgtccatcgttatctgcctttctacaattcctaacattaactgaaggctgtgccacactttaccctgcactgacttcaacactgctttgtattgtctcactcttaccacaaccctatggggtaaagagaattattaccatttaacagatgagttaggtattttaccaagagtcacagagctgataagtggggggggtggtacgggaatccaggaattccaaccctgtagcctgcattcttaatctctatattacattaatctcttagagatgagtccttattcactgaacatgttaaattaattttttcttggattgtttctttcaaataacacttaaaaaatttaaaactcccatttgatgttctgggaaataatttcaaggaaaattaaattaacgataaaacacgtaaagctcatgatattttggaaagttgatatgacccaagttggcattaaactcaaaatcaaagaacaaaacaactttacaaacaaatgttatttaaaggctcagtgacttatgataattctgtcagccttcactatgatagcaaattgtgaacaccacatttgtacatttccttctggttccacatgtttgtaataatgcaatgttatccagtttaaaatgaaacagatgctcacaagtttaagacactctggggaggtccactcagctggcattatttcagcagtttcacgtgctgatgacaaaggactggaagatagctgaaggtgaggctgattagccaaatcactaaagggtgctgggccatcctaaaagcacagggcctgtgcacactcctcagctgttgatccatctctgcacccacttcgcccatgcagacatgtcctaatcctcactcgtcaaccccatgtactcctacatgggtctcttccccaacgccaccccacgcgacagtcattcattgcagtgttttctcttcctcctaaagaccagcagagggtacatgttaagatgccctagagaactacggcttcccctgcctcaactcaaatccttaccagctacgtgtcttcaggcaaaatgcttaacctcaccaagccttactgccctctatcatttaactgaggagacgttaacaggacttactttatatagaagctatcaggttttaatgagttaatataaataaggaatttagaacagtatctggcatacaataaaaactcagtaagtcttaggtattattattattcctgttatcttcctagtgcattttaccatttgcaacaaaataactggttacccaagaataaatctgtcggtgattttaattttctgctttctacttttctgtattttctaatgtatttacattgcccatgcatcccttagtaaatttaaaaaacacatatacaaactaagcttttaacataggcctcaccaaatttccttcacagtggctggcacagggacctccaaaaggctgaactatgtaaagtctatggctgagcaagcaggcacccactgttgccagccaggtgtcagggccaccccataggtaccatgtttacattcaccacagggcccagcattaatgtctggagatatctcagtgtgcaaattcttcccacaaaaagttgggggcaaaccacagtccagggctactcatgctactggagatgaacaataatcaaattctcaaatccaaactatcactagtgtgacttaaaatctaatacttctgatgggatacatcctgaaaccaaaatgtttcctttataacaggggacttaatcaggagagttcatgaattccctgctagtgtataaaatgtgtctgtacatttttctagctatctaactttcaataaattctgaaaggtattcataacccaaagctattaaaaaatagtagttttaacagtgattctcaaactttaacatgtttgttaaaacatctaccccttcagctgagtgcagtggcacatacctgtaatcttagcacactgggaggccgaggcgggtcaatcacttgaggtcaggagttcaagaccagcctggccaacgtggtgaaaccccgtctctactaaaaatacaaaaaaattagccaggcatggtgacgaacgcctgtagtcccagctactcgggaggctgaggcacaagaatgtattgaacccaggaggtggaggttatagtgcgccaagatcataccactgcactgtggcctggatgacacagcaagactctgtctcaaaacacaacacaacaaaaacaaaacaaaacaaaacaaaacaaaacaaaacaaaacaccacgtaccactggacccctccccagaggctgagtttcaggaatggaggtgtctgggagtcttgggtaacttgcatttccagcaagttctcaggtcatgctgatccaggcccaggaaccacactttgagaaccaccagcttaaggagttatgtgggcatttttactttattctgaagataagcaaccaacctctctaacggaagtaatgtatgaaaactaatggctgtttctccattacttacccaggaattacctagcaagccatggccaccatccctcttaccctccacaattccaggtaggctacacttgactatcagttcaatcctgcaaatattatcatattccttatatcctattagattagaaaccagctttgatattaggataaaactgtggctgtgaatgtatctccacctctgccttttggggtttttttttggtctctccatcattcgttcatgcaaaatacctctctaatctgtctcattcatgggcatttccaaaagagaatggggaacagtataatttagtttataaaattgcaccccctcttatttcagaattaaatgcataaataaacatggccctgaaaatcaagatgcttcccctccaaaaaaacaaaagccgatgacattccattgttaaacacacagggatcctcaggccatgcttgccctgcaacacacagaaccaaagacaccatacacatccacaccatcaaggaaatcagtctggggagatggaaactggaaggccagaaaaatggatgtgacgccgtcaagataaagataaatgttgactttactggaaacgtctcagctttgagtataatttagtctgaatacaactaaggcaggaacagtattctgaagagaaaaaaaaagattacagttatttacaagaatacagttatttaccttttaaagactaggtccaaatacctacaaacctcagaaaagtgatcactgggaaacaaagccggtcagcattgagctgtacttatgtaaaatgtcattaaaaaccagctttagggccaggtgcagtggttcaggtctgtaattccagcatgttggtagactgtggcaggaggatcacttgagttcagaagttcgagaccgaccacggcaacattgtgagacccctatctctatgaaaaatataaaaattagctggacacagtggtacacgcctgcagtcccagctacttgggaggctaatatgggaggactgcttaaacccaggagtttaaggctgcagtgatccactatcatgccacctcactccagcctggacaacagagcaagaccctgtctcaaaaaacaaacaacaacaaaaactggcttttaaaagatattagtagacctagattaagaaggaaatgagaggttaacataagttcataatgcattttggctgtatcaactcttaacagaaagtccatacaatttaattaggctagataaggtgacgttgcggctcttttctttatttttaaacaccgtgtccattaagtttactagccctcattctttccacaactgaaacacactcatgatctgctaccctaagcccaccaatggtgtccccagtcccacccatcaccatatccccagcagtgagctgaatgctgtggttgacaaaaacaaaatacaaaataacccgagctccccacttcacaatgcctaccaatcttttatgtatcacatgaagaaaatatttaccacataccaaaaggggattggtttccaaacttagaattaaaatacaaggattacagaaaggacagaacaggatgaactaacacagtcagagacgtcatgaaggaatcagctttaaaatagaataaacagagtgaaaaaagaatgcactggggcaagaactataaaccaggactctaaacttttgtttggaaatgctatgagctcgtttaagtggaagaattctctgaaagattaacacagagtatttatacacagtagaagctcaataaatttgcacatagtagcattcactgcaaagagggacaaagtaaaacctacctatcttgaggctcattttcagatgtttatgaagacctgagcttgcaaaaaatttttagtatttgaaaagtttattctgattatccagtgtctacttattcttagggtgaacacataccccagtttgcctgagacagacccagttcactcctgctgtccccatgtaattaagtcctcttttcattctcaaaagtgtccaggttgactaataagttagaagaccaccctatccaaatcagtactggttaagcatttggtgaataaaatctcactgaaagtatttcctggggttctgtacctcagatcagaaaattcctccttaaatcttaaaggctttaagaaaaatatagcatagttcaaaaggagtgcctatttctgaaggaaagccagaggttgatagcacctcacagaaaccattgttctcagagagttgtgtggccgtaatcctacagcaggataactaatcaaacacaaagagttgaaatatgcagaggcaccaccttaggtgaacctttcagtccatgtgttaaaaaaggttctccttattccagtatatttaaagtatgtcatttcccaaatgcgtttaaaaattaaatttgatttattgctaatagtaaatacatacatattacatatgtgtgtgcagcaccacttatcagcaccatttcacaggtggcaaaggcgaagcctgcagaggctaacagcacacacaacctgaatccacagctcccatccacaaagcctcctctaccttagagtagggaaggacttttttttttttttttttttttgagacagaatcttgctctgtcgcccaggctggagtgcagtggcacgatctcagctcactgcaacctccacctcccaagttcaagcgattctcctgcctcagcctcccaagcagctgggactacaggcatgcaccaccacacctggctaatttttttgtatttttagtagagacggggtttcaccatgttgatcaggctggactcttaaaaagcccaaggatgtttatttgttgaggctagatctaaagtgaacaaaggtagaaaaggaaaatcctcaagttcctcaggatgcaccacagccctagagatttagcagtcattcaaaaaaacagctaagaatgtgaaaattctcattgttctgttgcaagggataccctggaatttaacccagggccagcctcagatagcatttcatgaatcagtctttttattttattcttcaagaaaataacagaaaattttcttcacctggtttatacacaatgaccacattagaaagtactaaaaattattttgtcagcaacaagacaacaaacagaattaaagaaagtgggaagaactagtgaaattatattagaaagcaacaattgtgagggtcaagagtacttgattatgcccgagctagttcccatctagcttccagatctttctaatccatctcacagtggtctcataccatatcggaactcccactttgggcctgtggaagaaaatgaatcccaggagtttgcctgtaaatgccttggagcaactcagggacccacagattggaatggtatagatactgggcttgcacctttactaatcaggaatatcaaaaataaatacagctttatgccagaaaaattgaacttgtggccaaaacaaattgtttcttatgttatctatttacaaaatgcctaaaagaagctagagagggaaggtggggaaggaagcagcaatattaattgccattcaaaggctgtagtagggagagagaaggaggaacttggaatataaaaatttgtgtgactctcatctaagccaagtggtccacatgacacttgaacaaaaggtggtctaaaatgtaagccagaggaaaattgttgtgagatatagctccataaataccatgtttacactgaatttcaaaagcatgttttctccaaaaaatcatctcttgaagatggtatgaaagcccacacaatgcaaatcttgaagctcctttcagttctccatatacgaaataatactgatgacagacaatatttatttttctcttctatgtgccaggcatacagaacaatattcctcacaacagtattctgaagtagatattataatcacttttgtacagattctcctaacgatgagggtgctgaagcacagagaggttaagtaatgtgccccatgacacaaagctaatgtgtaactcagccggtattctaactaaggcaatctattctggagacaatgctcttaatcattcagatatattgtttctcacataaacaatttaaaaaaacaggactacaggtcaacaaatgtttcaactgtctaagagattaatacgcagtggaaaggttctgaaaatatttaaactacaacatgccaactggcatacagtaaactgagaattacactgaagctgaagaataagtggtacagagaaagaaactacataaatatgctttccaggcgaggtcacttcaaaatcattccaaatggttctagaaaacttaacagctcaaaaatgtctaaaatctctcataagcatttctttttaaaactacaccatttcttgtatctcagaagcagctgtatcgtgctgcttttctgttgttttcaaatccatgtgcttctaatacagggttaagtatcctaactcctggcaaatcatacatacttcatatgtggacttgataagtgatatttgatttggcaaatggcaagagattatttagcaaattcaaacactattttccccatgacccatttaaaaaaaaaaacaacaaaaaaaaaacctctgtcatttcccaccaagaaaaaaaaaaaaacagactggattaataaccagtcagctgaactaacaaagtattaacaaaatgctctgcttgtatgagtttttgttctccttacctaagaaaaataaatgtttcctgcctttactattatttagcatctcttagatcttaaaatacgagaaactcatctttagtgtaataagcttttgtctttcctgtaggacagcagtctgttgtgatttctggcaatggagaggtactttaggaccacatgttttgcctacattaggaaaaaaatagcaaaaccctaatttctgtggttgacaagagggaagaaagatggagccatcctcattcacactccctgtggagacagggtgggactggcaatggggaccaagggaaagaccaccagctctggttgatcctggatgtgtctccatcccttccttactgagaccacagagtaaagcacagatgagaatatctcctattaccttaggcatgttgaggcaaaaatgtaaagctccgagaagcactccatcatgtgtgccccatccgtaatagtttgagtttaccagggtactgcatatgagatcttatttcctcttgtattagatttataatttgaaaatactttccatgagttatgtattgctatgtatctaaaagagccttcctataaccacagtggctgggtcaaagacctactcaaatttggctctttccataacaattaatattcattaaaaacacaaagcatagcactgtatttctatctagcatatgttgaaccatgcagttttgaaagcattgtaaaggaacaattagcctgtcatagtaaaaagagaccctaccatttactgaccttagagctaggcattatagtaagaaaatacaccttacgtgatttaaactttccaacaactttaatagtgcaggtagtactagactctttttgcagatggggaaacagattgagagagattacattaccagcctgaggtctcctggtttatacaaggcagtgctgctggcttgtatatccaaatttaactccatatgccacgttatgtagcattaactgcaaagaatcacaattaatctaatcctgactttgtctctatgctggagtaaacaagttcgctgtattttttcttcatttgtcctggataaaacactagcttaagatggccaaaggtttcatctcaggggccagttttgacaagactttctaagctccactatagaagggaagctgcaggaaaaatcgcgtgtgttcagttagagatgtctgaaaaggcccatagcagcacagaccctcctccccagccatggcagaaccaaagttggtgggcatttatacccaaaccgcctgcccgcacccccagccccctccccctggccttttctgctgagcaatttaactgccgtggactttccgtctactctactggatgctcattatctagaaactccctcccccaacttttgaactatggcaaaagctaaggtagatatttaagtcacactgcatgtcacacatgaagggtacccattagtataaatcccaaaacagcatttttacaaacaaatggaagtcactgtatccctctcacatcccctgttatatggctgatagttctatcctcagattgctccttcttacatgaaattggtctcccaacagcttcatcaattccataagtcaatcttcagcctgcctatttgtgactcgaaagttcctatcttttaagcgcttctctacatttttaaatgaatacaagcaaaggcctcgcttattatgagtataatactatatttatattgttaagtataatataaagtttctgggaaaactacaaaaaaaagagcagcaaggcaaagtatcagaatctgactcagacttttggtagcagacaagtctcaactattccgacaagaatgaaaaacacagttttggaagtgtgtatatatatcatgtatgtgacatttataagacagcaataattgcaacctgccaaaagcaaaaggcctaaaactggtaagctagaggtctctccggtgaaatgtaacacaaagttattaataacaagcacatttgtcaacacgaatctcctctgcctgttgagttgtaatgctaagaagcatctatgctgcgaaagttttatcatatgcataaacatgcacttggacttcacatttctctctaaatgcagctgttcacaaaagtacttttaagcttacacatacacgtatagctaagaactagattaaataaggtttggttcaaattataatattgaaataataacagctaacatttatatagcatgtttacatatctcaactaattataaatgggaaaatgggcaaatgggcaggcagaacccagagggaagcctgccctcattagaccaagacagcaaggtttcccctggtcactagatgaaattagggagttgcaatccttcaaacgtaaatgttaagcctctgctataaataatactcatatagctctagttacgtgaatgaaagatgctgatttatccaaaaattgtggacataattatctggtaaagggaaacgtgcacagtgagctaaatcctcatcttccacacaaggaagtcaacagacactatcaaaagccaagaacctccagttacataagaaatacaggcactaatacctaaaaatagataaaaggaaaaagaggtggctaccagggcataagaaaagggtatggacttctatttttttcattatatgtttttttaaattgtttcttaaagtacacaaatgcataactttgataaatcttaaaagtttaaattaacaaaaaaaaaaaacaagaaaaaatcaaaacaaaaagaaggtatatcaaatgtatccattccttggactagaagaagaaaaaaaaagtagtggaggtcctcactgattaaattaaatcaccttcttggatatgaaagacctttttcagtggagctaagtcttaggagtcaggtgtccatggattgctctcagcaaaaggacaatgtttcaagcccagaaagtaatcctggacagcctggcaatatggatgagagaggctgcaaaaaagtcacctgccccaccccattccccagacaagccaaatgactccatgaatgagactggggcaacatcagcaaaatacccacccaccccctcacaaaaaaagaaaaaatcagaagacacagccatcaccatctgtgatacagtacaaagcctgaggggtggcctaagtagaattaaattaagcactataggaattcagagagaggaaaaccattcattctcagtaagaacataaaggaaagctccactaaagttgaaatttaagagggcccatgccaggcttaggaaacggcccaacaaaggccagaggagggagaacagaaggtgtgtttggaaatgaacatgatctaagccatattaaaatgtgtatcttatgctgctgttgctccactctaaactggagtgaggggtaagagcggaaggcccctgggacagtcaatggtttccggcacagtgcaaaacttgagtgcagtatacgtgcctctcaattaactcatttataggaatatactctccatatttgttggcttttctcggaacaggctcttaaatctcagacactgacatttatatcactatacagggtgcctgtcatgaccccagatctccagaagtccttagctgcatgctagtggattctgttaatacattttccttacaatttcccaagagtgttgaactcaaaagacagggactttagtttaaggcaacataatttctccctttagctcacgacatgtaatatttattttaagggcaagttcccttaaaataaatattctcctaaatgtatacacattccctatgtcattttaatgtagtacatgctccttttaacactacagtcattgctttaaatcaataaaattggactaggtttgatccacacaaccccaaataccagttttggttaaaatacacacattttactcaaggttttctagataagttctagaacttatctagttagtagataagttagtagattacatatgaacaaacctactcctgcatagcaaactgaatatgtacaaaagacagtctatttgcatgcatcataagccttcaaaaataaaaatgaacatattaacttttacttttttactttcactctggcctttatgaacatgtttagaagtatcatttacgaaacacaagtataagtaaaacttgaaagagaaaattaaggaagcaacacatctttacttttatattcctttaattaaatgaataaaaatgtcaggtgccaaagatgcaaaattaagacactgccctggctctcaacagctcacccaatctagttgggagaaacaactggcagacaattaaaaatcagtatttatgccagaagttgcaattattttctatgaaaaatcagatcttagcgatgaccatgagcaataggatatgaataactcccatgagcttagtgtcccaataatggaacacaaggtataaacaagttaagcactactcctggttgtacctcccacagtatttaatacagaaggttactaataaattattagttgggtgactggataaacagatggatagaaagatgaatgaatggagatattaatagtactttttggtaacacaggaaggtgagtttatcctgcatagggagggaggggatgggtggtccaggaataacctcccataggaaagggtgggccaactgcatctgaaagtagtatgtttccacagggataaacacacaggttaaatagaactcagacaaattacacagttatgtaataatttcaaggtatgttaaaagaatcaaaatctgtgacttcaaagctatttttacttaggatgagggtaaacatttaatttttaaggtgattccatgtacataaatatcagatataaacagatcaggtggcatgtggatataataaagactgagaagcaagtacacaaatagctgaaattttttaaaatgcaattcaaattcagaataagccaggtgaaagaagagaaattattccagagagctgttctaggcagaggaaagatcttaagcccaagcaatggggcaagaaccacagatattcacagagagttcaaacaattgagtgttgctgtgatatacagaccaaggcaaatagtggtggaagaagaggtgtcaaatcacagagcactctactgaattaaacaccatgaacttatcttttaagtattagagacccacaaaagggacacagtgctgcttgtattttagagggattcctctcacgggtgagtggaggacacaccctgtgggtgggaggcagattgaaggcagggaacacagacaaaaaatgacctgaggtttggtgggaataacagtcaagaaatatttaagcataaaaaaaaaaatcaccaggctttggagattgactggctaggaatggatgagacagagtgtttaattgttgacagcttgggtaatgggtagatggtattatcacaaattgagagagacacattgagtaggaagaacccaagaagcatctgggtagaaaggtgcaaggaacaacagtgtacagaggtgcaaggtggtgagagatgctggcagagatgtcacaagtgctaacagggcagggcaagggcagagaaaggcaaaagcatggggctcaggatggaatccataaaacatcaacatttgagggcaagcccttaatcatggagggaacagtgtcagaaaggtacaagggcagtatgccaaagtaccacagagagaatcatcatcaaaagctgccttaatgcctcatacccattaagatggctactactagaaagaaagaacaaacacaacacacaaatggaaaacaagtgttagcaaggatgtggggaaagtgacacctttgtgcactgttggtgggaacgtaagatggttcattcagcctctatggaaaacagcaattcctttagaaaattaacataggattaccacatgatccagcaattttgcttctgggcacataaccaaaagaactgaaagtagggtcttaagcagatatttgtatacccactttcatagcagcattgttcacaatagccaaaaggtggatgctacccaaggactatggacagatgaataaacaaaatgtggtatatacatagagcggaatattattcagtcttaaaaagaaatgaattgtcacatgctacaaaatgcatgaaccttaaagacattatgctaagtgaattaagccagtcaaaaaaggacaaatactgtatgattccacttctatgagatagctagagtattcaacttcgtagagaagaacagtagttaccagggactaggggcaaggataaatggagaattattatttaatgggtacagaattttagttttgcaagatgaaaacagttctagagatgcatggtgatgatggttacacaacaatgtgaatgtaattaacgtcactgaacacttaaaaatagttaaggtggcaaatgttatgtgtatttcaccacaatcccaaaaaagctacctcaaagacaaaaaaaatctttcaaaatgtcaattggattgaggaatgtgcaatgaggaggtctttggcagttctagataagtgctgaggacagaaggcagagtggactagattacagagtgaatgggaaagtggagacagcaaacgcagaccatttccaacaagtttggataaggagataaaggtaccgactggatgattgctaataaagaggattcacatttaagggagagctttgagggttttcgctttattttatttgataatgataacaggcatgattgatcgtgagcatgcctctctaggacagaaggaaagaaactggtaaaatgggaaaagttgatgctataggccctaaactggatgaattcaagtagacggagtataggagactcaggcctttccttctgaaagatgtattatgactgtattaatccagagcataatttcagaaatccccaggaagaacttgttaaagaaggaaatatccaggcattgggatcaagtaacaacccaggacagaaacagaatgttgtgaaaccagatttaagtcaaggagtaatacgaagaatgattggagacccaaaagcccccattcaaggctggaaatgtgtcaggataacagatggagtagaagaggtactggcatgcatcaagtccatccctagaccaggataagtctagaggagcaaatcccccaagtcccagaggagatagcatagtcttggggtcctttcaatatctcttctcatttgacagttatcttgccctgcaccaatcaagacccccaagttaacacctacttaaacagctttcctgcctcctcccctggtactgaaagaaggaaacgtgcagatgttttactctcaaatattttttggttttccaactaatttcaaggaattagtttgaaaccatgtgaattacaacttaaaaatacttcccaataaatacagaagctattattacaacagcttcacaggaaaaggtcataaacaagcatgggaaagatctatcttcctgctggctggagctctcacttgctcagtctcccttttcacagctggtttcatactatttactatttggtcaagccgtgctaatctgtaaccctaagcaaatccaaatcaggtccaacttatgcaagcatatattagagctgggctccaaagaatactggacatctgtagtacctgacattcaagcatttggcgagatgtcaatatttcagagagcactttaaatgttttgatttgaaagctaatgcagtgtttcccactggtcaacacgagcagtccagcagagagcaaaatctatttccctcaacatcaaatgctacactcagttgctgatcctatcttgcctacagagaacctaaaagactggaaaaattggtaagtaagaaaattccatctaatgcagagtacagttaaataatatttgtgattacaatgtaaaatggctttgtgtggtgctgacatcctaaatttttttttaatggatggagtcacagagttataggctatgcaagacttttccaaattcaagtaataaaccaagtctagttaaattttccttgtaagtatccttttttaatttgataaggcatgatttcctttcatggggcttgtacattaggcattaggaaattcctattttaaaaatacttattatccagacagtcggatgggtatgtgggtagtgacaaaattagtatttggtatgataaagtggaccagtacagctgggttatgatatatataatctcagggcaaagacagtccaataaagaacgaatatactgaagaaagaaaacaaaaaccagacagtttggtttaaaagcacaaaatgctaaaactctacaaataatgaaaccaaaggtgaaatacttcatgcaaggcagctgtgatgtcttctctaaaatattaaatgcatgggtcactggtatggatttaatggtgagtcacaatttattttcaaaggaaagaaataggaattaaataggtctcatagttgctgttttattttttattagtgtcttaggttttaattttcctttccttggttcttctgattgcttcctctgagcgttaaacatttaaataacaaacattcatagcattttttgttttaacttgtggatggcaaggacaaggaatattattgtgtagtttttctataaattatgtagtaatttccaaaaatctagactaatagataatttagaaacttaatatacatgcttagaatctactccagattatttctcaggcaaaaaaaaaaaaaaaaaaaaaaagaagaagaagaagaaagaaagtaaacaaaagaaaatctttttaaaaggagccctgtcttctgaatacattataagaacactgcaactaagggaaggcagagcttttttaaaaactgtgactcttgtcaacaaatgactctctaaatggagaaaatgcaacttcttaagtcctaattcattttttttttgctttttttttttattatacattaagttttagggtacatgtgcacattgtgcaggttagttacatatgtatacatgtgccatgctggtgcactgcacccactaactcgtcatctagcattaggtacatctcccaatgctatccctcccccctccccgaccccacaacagtccccggagtgtgatattccccttcctgtgtccatgtgatctcattgttcaattcccacctatgagtgagaatatgcagtgtttggttttttgttcttgcgatagtttactgagaatgatgatttccaatttcatccatgtccctacaaaggacatgaactcatcatttttatggctgcatagtattccatggtgtacatgtgccacattttcttaatccagtctatcattgttggacatttggcttggttccaagtctttgctattgtgaataatgccacaataaacatacgtgtgcatgtgtctttatagcagcatgatttataatcctttgggtatatacccagtaatgggatggctgggtcaaatggtatttccagttctagatccctgaggaatcgccacactgacttccacaatggttgaactagtttacagtcccaccaacagtgtaaaagtgttcctatttctccacatcctctccagcacctgttgtttcctgactttttaattattgccaatctaactggtgtgagatggtatcttcttgtggttttggtttgcatttctctgatgccagtgaggattttttcatgtgttttttggctgcataaatgtcttcttttgagaagtgtctgttcgtgtcctttgcccactttttgatggggttgtttgtttttttcttgtaaatttgtttcagttcattgtagattctggacattaccctttgtcagatgagtaggttgcgaaaagtttctcccattttgtaggctgcctgttcactctgatggtagtatcttttgctgtgcagaagctctttagtttaattagatcccatttgtcaattttggcttttgtggccattgcttttggtgttttagacatgaagtccttcccatgcctatgtcctgaatggtaatgcctaggttttcttctagggtttttatggttgtaggtctaacgtttaagtctttaatccatcttgaattgatttttgtataaggtgtaagaaagggatccagtttcagctttctacatatggctagccagttttcccagcaccatttattaaatagggaatcctttccccattgcttgtttttctcaggtttgtcaaagatcagagagttgtagatatgcggcgttatttctgagggctctgttctgttccattgatctatatctctgttttggtaccagtaccatgctgttttggttactgtagccttgtagtatagtttgaagtcaggtagcgtgatgcctccagctttgttcttttggcttaggattgacttggcgatacgggctcttttttggttccatatgaactttaaagtagttttttccaattctgtgaagaaaggcattggtagcttgatggggatggcattgaatctataaattaccttgagcagtatggccattttcacgatatttattcttcctacccatgagcatggaatgttcttccatttgtttgtatcctcttttatttccttgagcagtggtttgtagttctccttgaagagttccttcacatcccttgtaagttggattcctaggtattttattctctttgaagcaattgtgaatgggagttcactcatgatttggctctctgtttgtctgttgctggtgtataagaatgcttgtgatttttgtacattgattttgtatcctgagactttgctgaagttgcttatcagcttaaggagattttgggctgaaacgatggggttttctagatatacaatcatgtcgtctgcaaacagggacaatttgacttcctcttttcctaattgaataccctttatttccttctcctgcctaattgccctggccagaacttccaacactatgttgaataggagtggtgagagagggcatccctgtcttgtgccagttttcaaagggaatgcttccagtttttgcccattcagtatgatattggctgtgggtttgtcatagatagctcttattattttgaaatacatcccatcaatacctaatttattgagagttttcagcatgaagggttgttgaattttgtcaaaggccttttctgcatctattgagataatcatgtggtttttgtctttggctctgtttatatgctggattacatttattgatttgtgtatattgaaccagccttgcatcccagggatgaagcccacttgatcatggtggataagctttttgatgtgctgctggattcagtttgccagtattttattgaggatttttgcatcaatgttcatcaaggatattggtctaaaattctctttgttggttgtgtctctgcccagctttggtatcagaatgatgctggcctcataaaatgagttagggaggattccctctttttctattgattggagtagtttcagaaggaatggtaccagttcctccttatacctctggtagaattcagctgtgaatccatctggtcctggactctttttggttgctaagctattggttattgccacaatttcagatgctgttattggtctattcagagattcaacttcttcctggtttagtcttgggagagtgtatgtgtcaaggaatttatccatttcttctagattttctagtttatttgcgtagaggtgtttgtagtattatctgatggtagtttgtatttctgtgggatcagtggtgatatcccctttatcattttttattgggtctattagattcttctctctttttttctttattagtcttgctagcggtctatcaattttgttgatcctttcaaaaaaaccagctcctggattcattaattttttgaagggttttttgtgactctatttccttgagttctgctccgattttagttatttcttgccttctgctagcttttgaatgtgtttgctcttgcttttctagttcttttaattgtgatgttagggtgtcaattttggatctttcctgctttctcttgtgggcatttagtgctataaatttccctctacacactgctttgaatgcgtcccagagattctggtatgttgtgtctttgttctcactggtttcaaagaacatctttatttctgccttcatttcgttatgtacccagtagtcattcaggagcaggttgttcagtttccatgtagttgagtggttttgagtgagattcttaatcctgagttctagtttgattgcactgtggtctgagagatagtttgttataatttctgttcttttacatttgctgaggagatctttacatccaagtatgtggtcaattttggaataggtgtggtgtggtgctgaaaaaaatgtatattctgttgatttggggtggagagttctgtagatgtctattaggtccgcttggtgcagagctgagttcaattcctgggtatccttgttgactttctgtctcgttgatctgtctaatgttgacagtgggatgttaaagtctcccattattaatgtgtgggagtctaagtctctttgtaggtcactcaggacttgctttatgaatcttggtgctcctgtattgggtgcatatatatttgggagagttagctcttcttgttgaattgatccctttaccattatgtaatggccttctttgtctcttttgatctttgttggtttaaagtctgttttatcagagactagtattgcaacccctgcctttttttgttttccatttgcttggtagatcttcctccatccttttattttgagcctatgtgtgtctctgcacgtgagatgggtttcctgaatacagcacactgatgggtcttgactctttatccaatttgccagtctgtgtcgtttaattggagcatttagtccatttacatttaaagttaatattgttatgtgtgaatttgatcctgtcatgatgatgttagctggttattttgctcgttagttgatgcagtttcttcctagtcttgatggtctttacattttggcatgattttgcagcggctggtaccagttgttcctttccatgtttagcgcttccttcaggagctcttttagggcaggcctggtggtgacaaaatctctcagtatttgcttgtctgtaaagtattttatttctccttcgcttatgaagcttagtttcgctggatatgaaattccaggttgaaaattcttgtctttaagaatgttgaatattggcccccactctcttctggcttgtagggtttctgccgagagatccgctgttagtctgatgggcttccctttgagggtaacccgacctttctctctggctgcccttaacattttttccttcatttcaactttggtgaatctgacaattatgtgtcttggagttgctcttctcgaggagtatctttgtggcgttctctgtacttcctgaatctgaacgttggcctgccttgctagattggggaagttctcctggataatatcctgcagagtgttttccaacttggttccattctccccatcactttcaggtacaccaagcagacatagatttggtcttttcacacagccccatatttcttggaggctttgctcatttctttttattcttttttctctaaacttcccttctcgcttcatttcattcatttcatcttccatcgctgataccctttcttccagttgatcgcatgggctcctgaggcttctgcattcttcacgtagttctcgagccttggttttcagctccatcagctcctttaagcacttctctgtattggttattctagttatacattcttctaaatttttttcaaagttttcaacttctttgcctttggtttgaatgtcctcccgtagctcagagtaatttgatcgtctgaagccttcttctctcagctcgtcaaagtcattctccatccagctttgttccgctgctggtgaggaactgcgttcctttggaggaggagaggcgctctctttttatagtttccagtttttctgttctgttttttccccatctttgtggttttatctacttttggtctttgatgatggtgatgtacagatgggtttttggtgtggatgtgttttctgtttgttagttttccttgtaacagacaggaccctcagctgcaggtctgttggaataccctgctgtgtgaggtgtcagtgtgcccctgctggggggtgcctcccagttaggctgctcaggggtcagggacccacttgaggaggcagtctgccggttctcagatctccagctgcgtgctgggagaaccactgctctcttcaaagctgtcagacagggacatttaagtctgcagaggttactgctgtctttttgtttgtctgtgccctgcccccagaggtggagcctagagaggcaggcaggcctccttgagctgtggtgggctccgcccagtttgagcttcccggctgctttgtttacctaatcaagcctgggcaatggcgggcgcccctcccccagccgtgttgctgccttgcagtttgatctcagactgctgtgctagcaatcagcgagactccatgggcgtaggaccctccgagccaggtgcgggatataatctcgtggtgccccgttttttaagcccgtcggaaaagcgcagtattcgggtgggagtgacccgattttccaggtgccgtccgtcacccctttctttgactcggaaagggaactccctgaccccttgtgcttcccaagtgaggcagtgcctcgccctgcttcggctcgcgcacccactgacctgcgcccactgtctggcactccctagtgagatgaacccggtacctcagatggaaatgcagaaatcaccgtcttctgcgtcgctcacgctgggagctgtagaccggagctgttcctattgggccatcttggctcctcccctaattcatttttatacctcccaactttcttgccagtattccacaaagaaagcattcacaagagaaaaatgaaaaaaaattatgtatgtgtgtatgtgtatatatgtgtgtatatacatatataaaatatcctactgtgtgtgtatatacacacacacatatatataacccactgtgaaagtgtgtgtgcatatgtattccagttaacataattaaaatgactagactagcatttgcatctctccacatcagtccatcagtcccatccattataggggaagatgcttcactgcctttagtgtttcttcaacacaaaacatttaataagtcgctagggatcaacacatggaattcaagatagcctgaggagaaaaaaatcaagagtaaaagtttgttttgaaaactacaataaaatctaggcttacttgccttttgccatactctttgatattgatacaaatacatatattttaacatttgtaattttactaataacctttggtattgccatttttgaaggtaaaaaattgtaaaatatcaacaatttgatcactcaaccaactaaagagatatagtctcaaaaggcaatcccagatgccaaagggcaaggagaaaaccactaatgatattttacataatttttatgtgatagtgagatctaagacttctaactaacacttccaagtacaagtactaaactcccatgagtatagtcccccgtttttaaagcctttacacagatactctcatctcactggatgtttttggcaaccaggagacactggaaaaggccttctattcttgcccctgtttcaccaattagcaaatagggttctagagaggttcagtgattcaggcaagatgacacagctaatcaagaccaagcatggtacttgaagaataaagtcatctggcttcaaatccactaccctttcacctatcactccttgtctctgacctaaggaaatgaccaggtccaataaaaaccatgattaatatataaatacaagttagatgcaagagtgcacaaaactggtcagtcccttgactggatatttacataacagcagcaataatcacactgtataaaatagtcaatattattgggactcagattttcatagaagcaatcttgcatggtagataaaggagatgcttaaagataaacaactagatttgaatctgccatgatcttgagctacaccttttgttttgttttttagctctttcacctctgtgaccctcttctgtcccacttcctattaaataaattttaaaacagataaagccaaacagctgctgagaaactaaacaagacatgctagtacctggcacgcagcagctattcaattaaaatggagtttccttcccatccctgctaataacttattaggataaaagtgtaaaatcccactggaaactgcttgagctgtaatctgagagtcagaggtccaaaaaagaaatcacagaaataaagggtaaggagtacctctcccaatttacctgccatcattcccacaaaaaactgggcgtcgtgtcagtacacaggtagtgaacatctattgacacaggcccattgactacctactaccttaagtaatctacactctaaaaaacggggccactccttcctggccagaacaatggtcctgacagttatggagcctggaattacaggtcaggggctgtgagacccacaggtggtggccatacacacacacacaaaaaaaaaaaaggtgggagaaagacatcaggattacttcctgtttgattcacacatctggtgggtagataaacaaccttaaaaatgctcaagaaaacaaagtgaaagatatgtgttctgtacaagttacaaaaatgaacttgggaagtttcatatatttttaaatttaattactcttcataaaatgtggtgtccttttttgatatttatagacagtccagtataatacatatatttaatagcttaagagctggagtgctaaaacaagcaaactaacaaccataacaaaatctcttatcagaaaatatagataaatgtattttagccaagaattctcaaatttttggtctcaggatcccttttactcttaaaaaattactgaggacctcaaagagcttttgtgtatacctatccatacttattattttagaaattaaaattgtgacagttataaaacttttaaatagcaggttaacacaagtaacatttttatgaaaaatattttcaaaaaaatttatgtcaacaagtcatgttattctacatttttgcaaatctctttaacatctggcctagagaagacagttggattctcatatccacttccatgtccaatctcttgcaaaatgtttaggttaaaagtatgttgaagaaaatccaatcccatacagataaataatggccttctggattttcttctttgacagcacaaaactcaacaggtggttttttaaagcatgattgcaatattggatctaaaaccatgtcaatgaatattttatactttgtaacactgaaatcttttggtcttgacctttaagtctatgtgttttacttatgcccaattttataacatcatacattggtcatgtagataaaatacattcatgcagaaatttgtaaatataaacacttttcattctacagtaccaaaaaatcatactaattaatattgcccctcctcacagtgtcaataccggaaagctacgaaactcacaacagcagacagaagctttccaaaattctgctttcagtttgaaagcttgaattttatcattgtcaaaaattgtctctcagttcattcagttttgagaaaatgtttgccaaacacccaagtacaattattagtttgtcattcgatcaagtaaaaatggtgttccatgaaaaatgcatctaattcagcttataactcaattatacaagtgttcattcctctagacaatcataagtagcaaatgtactttatacataattaatattttggcacacaaaatattaaaaagatatttttatggttgagatttaataaaaactagtattgctttattaagcaattggtaaaactgatttttcttttcttgtttaagattgtatgtcagtaaggtataaaatgcaatgaacagttgagtgcactgccttgatttgtgctaagacacctgaacattttacacatcatggcttttgcaccatcagtgcaaatttcagcacgatgaaaatagcaacatcttagtactcttataaagatggatttgatttcatagtgtctctgaaagggtgtcaggaacccctgtggttctgcagaccacattttaaaaaccactgttccaggctgggcgcggtggctcacgcctgtaatcccagcactttgggaggctgaggcgggtggatcacctgaggtcaggagttcgagaccagcctgaccaacaaggtgaaaccccgtctctactaaaaatgcaaaaattagccggccaaggtggcaggtgcctgtagtcccagctacttgggaggctgggacaggagaattgcttgaacctgggaggcggaggatgcagtgagccaagatagtgccactgcactccagcctgggtgacagagcgagactccatctcaagaaaaaagaaaaagaaaaagaaaaaagaaaaaatgtgcactgttctaaactttaggacagaaaagttttaagatacaaaaagcactagttagaaaagaaaaaaacgataatttgatccttaaaattggtaaattttgcttcttgaaatataactttaaaagtgaaaacagtaagtcacaatctagaaagcctatttatagtagagacaccaaacaaaatatcaacaatattcaaagaagtctacaaatcagtaacagcataaacaacccaacagaaaaataagcaaaaaatgtgactagacatttcatagaaataccagtgatcatatgaagagatgcccatatcatttgagatcactgtacaaatgaagactacaatataataacatttcataagaaaaaaatttttaatctgaaaagataaaacgtcagagaggactgatatccacaggatcactacacatcattggtaggaatataaactagtgtaacttctttggaaaacagtttggcggctgggcgcagtggctcacacctgtaatcccagcactttgggaggccgaggcgggcagatcacctgaggtcaggagttcgagaccagcctggccaacatggtgaaaccccatctccactaaaaatacaaaaaattagccaggcatggtggcgggcacctgtagtcccagctacttgggaggcggaggcaggagaatcgcttgaacccaggaggtggaggttgcagtgagccaagatcgtgccaccacactccagcttgggcgacaagagtaagactctgtctcaaaaaaaaaaaaaaaagaaaaaaaaaaaaagccaggcgtggtggctcacgcctgtaatcccagcactttgggaggctgaggcaggtggatcacaaggtcaggtgttcaagaccagcctggccaacacagtgaaaccccgtctctactaaaaatacaaaaaattagctgggcgtggtggcatgcacctgtagtcccagctactatggaggctgaggcagaatcgcttgaacctgggaaacggaggttgcagttagccgagactggtactccagcctgggcaacagagcgagattccgtctcaaaaaaaaaaaaaaaaaaaaagtttggcatcacttcctgaagtttaacattcatgctgtccttgactcagcaatttaactcctaggtttatatccacgagaaattttcaaatgtccatcaataggcaacaaagatatgcatctcggcatgactcacaatggcaaaaacctggaaataccccaaatacaagaaactgaattaactatgatatggtcacacagcagaatgctatacagtaaccaaaacaaaattaattatagcaatacttaataacatggatgtgtacgatatatatgaaatcaaattttatatatttatgtcagtaaaatatatagaaaaatcatgaagagattacatacagttttaaaatcataacttcattcacacacacttttaggaatacatatagatgttacaaaaatttgtaaaacaggaaaagtgaaagattgaagaacacatgactcaggtaatgtggaataaaagtatccagagagatggcatgggggtgggaggatggaccatttagacaagagcagctgcttactgtcaaggtcttggctttcgttttggttactgagtctgaaggagattattaacatcgttaagaataacaaaataaatctgtaaaaagtcatccttgcttgaatgctgcataacaagaatgcttcctgaatcaagaattatgattattctaattctgtgatccagagatttaaaaggatatctatatatgttaatctactatgcacattgaagtggcaattcaaaatataaaagtacattttaaaactctagaagtgctgaacaaactcatcatttgacagttaaggaaatccttaatttgaccaaagttgtataagtaagttcattctgaaattccataaatattcattgagcttctaactgtagagcaagctctattctgggacctcctaattttgccgttaacaagagaaataaattctggtctggcaaagcttacctttaagaagggctgtatgtaagaatagggggagaggagaataagttaaaaaatattagattggtgcaaaagtaattgcagtttttgccattgaaagtcatcacaaaaaccacaattacttttgcaccaacctaatattttaaacaacaaagggagacaagagaaaacaaacgtggtaagaggctagagaatgcgacatagggggaatggctatgttagatgccatgaacaggaaaggccttgctgagaaggtgacattttaacagagaccagcatgtggcagccacacaaaggtaccagagactgacaatcacaggcagaagccagctccaaggacctctgcccaagtgagttgcttttacttatttatttatttatttatttatttatttgagatggagtctagctctgttaccaggctggagtgcagtggcgcgacctcagctcactgcgacctctgcctcccaggttcaaggaattctcctgcctcagcctcccgcgtaactgggattacaggcacgcccagctaatttttgtatttttagtagagatggggtttcaccatgttagccatgatggtctcgatctcctgacctcatgatctgcccacctcagcctcccaaagtgttgagattacaagcatgagccaccatgccaggccatgagttgcttttagatcttttcagaatcaaacttcaaccccactatagggaatattcacattcacctgaacattcctgctactcttatgcagagcttgacaaaactcagctggtcatgcttgcagggccctgcccccatcagtttacaaaggtccagaaatctttcacaatttaatgagactgaggaaaacatgcacctgctcagagttctgccaggcattagatgaccaaaaagctcaagtgggtaggttaagcttttactttttattttgaatttttgttccactggaccaaaatacctaagtagcttaataatctacatctacaaggaatattggtttgcctgccaaaggcactaagtgtctgctaccctgctttcttcacaacctccaccgcatacaaaaaaacacgcctgagctttttctacaagttaaccacgtccatgacgtggttagaaatagaagagatagaagaaagttcgctggaacgtttgctgcttcaggctggacagattcttattataggtaaaagagtcacacagctgaggataggcttctgctacccaccaggagagtgatggtgacccctgactaaggaacttgacagcagggttaatgatagtccacattatatgggcatcacttatgccaggcttctcccagccatttactagaagagaggcatgcaaccaagttaagaacatacaggttggatattacagtaactgaggcttcgaatggttgggtcctagttgtaggggctctgattaccatatctgggaacttactcaacccattaagctcccttcatctttcttcctgtgtaaaataaggatatttttggtcattcatcagaaagtttatacagcacctactatgaaccatttgctgggttaactgaaaatacaaagctctctcccaacacagtaaaacagacaagctagtaaaaacaaatactttcagtaggatgcaatattttccattgattaaggctgtaaactggcaatgacctcgattcaaatctcagctctacaacgtaactatttgcaatacctagacagacaatttattcaagctctctaggctttgttatcctccagtataaaacaggattactcctatcttgtcaggaccacttgaagctttgaaagttactaactgtagttaattcagtctcactgctgcataaaatttcactaggcaaataatgggttttttacccattctcctgtcaataatcatctgggttatttccatatttttgctattacaaacagtgcttctatgagtgttcttggacatgcttcctggcatgcatctgcaggagttttctagggcatacacctaaaagttaaaatgctcagctacagagtgagtgaatgttcatcttcaccaagtatttccaattccctttccaaagtgatagactttttaaatttctctactcagcattatgttttaaagtcctaaaagattacatatagcatgaacaatttttacaaaggaatgtatgtacacatggactaaaatcattagttttaaaagggaggaaataaaaaacacacaattcaggacagagttaccacaaggcggagaaaggcggatggcagaggaggaacaggaacgatccaagaatgcctgtgggactctcgctctcaagtcggtgctgtgtttttgtttttgtttttttgagacggagtttcactcttgttgcccaggttggagtgcaatggcacgatctcggctcaccacaacctccgcctcccgggttcaagtgattctcctgcctcagcctcccgagtagctgggattacagacacctgccaccacgcccagctaattttgtatttttagtagagacagggtttctccatgttggtcaggctggtctcaaactccccacctcaggtgacccgccagcctcggcctcccaaagtgttgggattacaggcgggagccatcacgcccggcccagtgctatgttctttttgttgtgctttaacttatactacatgtagtcttttcaaagtatcaaacattccattgaaaagaaagactatatttaaaagcaattaacactgtctgtgtttggtaaaacacaaaactcaaaatgaatggtagctattgctacagaatgtgatgagaataagagatgacaagacagcgtagctcaaggtgaggcatgactaaactcagagggcacgagagtgctaccctgtggaggtgaggcagccgggctcgtcaacatccagagctgcaaatgacccagatctgcagaaactagagatgttcaggggaggaggggaaagaaatggggctgctcagatgccagaacagcaggctctgagctccaagagggcagggacaatgttggtgtttttttattgctttatcaccaatagcacatacactgtctggtaatagctgttagaagaatatttgaaaggtgaaaagaaaattttgttttacagatgatggttttaaacaatattaaaaaaaatttagtttcaagggtacatctgaaggttatataggtaaactcatgccacagggatttgttgcagatttttttgtcaggtactaagtctagtacccaatagttatctttctgctcctctccctcctcccaccctccatcctcaagtaagcctcagtgtctactgttccctttgtgtccatgagttctcatgatttagctcccacttataagtgagaacatgtggtatttggttttctgttcctttgttagtttactaaggataatggtttccagctccatccatattcccacaagacatgatctcattctttttttatggctgcatagtattccatggcatatatgtgccacattttctttatccaatctgtcactgatggacatttaagttgattccatgtctttgctattatgaaatagtgctgaaatgaacattcatgtgcatgtgtcttaatggtaggatgatttctattcctctgggtttatacccagtaatgggatggctgggtcaaatggtagttctgttttcacaccaatcagaatggctatcgttaaaaagtcaaaaaataacagatgctggcaaggttgcagagaaaagagaacacttccacacattggtgggagggtaaatgagttcaaccattgtggaaagcaacactgtgattgctcaaagagctacaaacaatgttttaagtaaagactactttggcatagaggagtatatagaaagagaaaagaaaatggccaagaatagaacaagaaacatcaattttaaggatgggcagaggagaccccacaggaaagtaagaaggaaaggtaagaaaaatagcagagacacccaggagactgttattaggcattcgttacctgtcaggcacggagcacaggacccttccctcaaaaccaacacacacacgtgtgtgtatacatgtatatgtgcatataggcatgcatatatcagcaaaaaaagcccatgaatacacaagtttatacaaacatacaaacataacactttgttttcttgtactgaagtactttcaaaataagttgcaggtaatcatgacccttcccttctaaatacttcaataagcatctctaaatactctctcgcttaaccacaccatcaatatttctgggaagattattactcagtaatattacctaatctagaatctgtattcagagttatacaactgtctcaaaacaatttgtatggctattccctccagccaacaatcaccactcattaacggtgttatttctctttggcctgttttaatctacgactgtccccttccagcccatcatgtttgtttctcgtggcattgatttttttaaagagtccaaggctggttgctttatcaaatgtttcatattctaaatttgtctgattgctcattgaagatttttgatacagtttattacaaaagtatgttgtgtacatctaactaaatcatatcaggaggcatacgatgccagattatctcacttttggtaagttggatcattcagtgaccaccagatctctctgcttcagaggtatactttttattactctaaatgatgggggagtatgttttcagactgaaagatactattctcccacacccattcacccagtggcttttggccacaattgaagcttattgcctgaatcagttatcacactgaggttgcaaaatggtgatgtcctaaattctacccttcttctacctttactagccagcattctcctgtaaacaagagctttctcatttgcatcctacctttttgtaatctgtacttttaatatcaccataaactcctgaatttgttttggttttcaatgtattttcacctgttgctatcattctcattaatgcccaaactgtcccagatctaggagtgccctcaagtcggcttctgtgtccttttttagcatttcctaatcggtctgagcacttccttgctttctgatcaaaagatgtcacaactcaacttatacttttcctgtacctgatcggaaatcagtaatttctcttaaggagccctgtttcctttcagtggctagtgagagttccaaacaagatgagctcactgacagtgggaagtcactacttctgcattggcaggggggtttcacttttgttatttaaaaatggcttgagcaagtttacagctattggggtgtcatgacttacagacatacagattttattacttttttttattaaggactttgagcaggtttaaagtttgaagggaagtagcccttagaaagagacgttgaaaatagaaaagagaaaagcaataacacatagagttcaaagaaacattagaaggaagtggaagtgcattcaaaaaaaaaaaaaaagcgtggagtaaaacaaaactagtcctggcacgtttcacagtccaaggatgtcaatgagcatcaaagtgtagtgtatagtataacgagaaaggagtgtttatcagaatttttttacatacaggtattatacctgaggcaataatgaaatggcatctaacagctcccctggggcagggcaagacataagactattttcttacactgtacttgactgacttctattgaaattcatgggaaaggtgaaatatcacaagtggaatgttctaaaacagacacgcatattcaagaacagatcccggccgggtgcggtggctcacgcctgtaatcccagcactttaggaggccgagacttgcggatcacaaggtcaggagatcaagacaatcctggctaacacggtgaaatcccgtctctactaaaaatgcaaaaacaaaaattagccaggcgtggtggcgggcacctgtagtcccagctacttgggaggcagaggcgggagaatggcgtgaacccagcaggcgaagcttgcagtgagctgagatcgcaccactgcactccagcctgggcaacagagcgagactccatatccaaaacaaaaacaaaaaacaaaaaaacagatcccaacatgtgagcctaggactcataaaaagtaaaggtctttgatttcaaatacaacttgaacaacatcttcaagctgcataaaagtgcatctttcacccttaagtcctactaagtttgcaactaatacagttgctccattgttgcatgctctagttaataaaacacaaattcgtttaagaattgctcagttcgcctggcgcagtggctcatgcctgtaatcccagcactttgggaggccgaggcaggcggatcacgaggtcaggagattgagaccacgatgaaaccccatctctactaaaaatacaaaaataagccaggcatggtggtgggcgcctgtagtcccagctactagggaggctgaggcaggaaaatggcatgaacccgggaggcggatcttgcagtgagccaagatcgtgccactgcactccagcctgggcgacaaagtgagactccgtctcaaaaaaaaaaaaaaaaaaaaaaattagccgggcatggtggcacgagcctgtagtcccagctactcgggaggctgacgcaggagaatcgcttgaacccgggaggcgaggttgcagtgagcggagatcacgaaactgccctccagcctgagcaacagagcaagactccatctcaaaaaaaaaaaaaaaaaaaagaattgctgaatttataagttattaccacagtatgttttattaaaatcaaagaaccctctaacagggattaatacacaaaacagggaggaaacatacaacactttgggttagagagtatatgggaatcacttctgtacagtatttctactcccacttaaaattctggatatttatattcttttcctttggctatataagcctgaatcttgaacaaacacacaagtggttgatattcagctaagcagttaaagctgttgttttctcacacatggaaatttgtcttcatcttcacagcaaaggataaccactaatggtctaacagccccatgatctgcagatctgagtactgcttgcctgagaaatgcaaataccatctcagtgaggcgaaaagaggtcatggattcatttccttgcctggccccagggaataggaccacatattccaaaacaatgctgcagaagaacaggctggaaaaaattcagtaattcaggcagctcaacctagttccaggagaaaaaagaattggttcccaaaaccctgaagccaggagtgatgcagagctttgtgccactctcatgaaagattagcattgtgtagggactggtaaattagaactgaaacactctggacttcatacatacactctgttgttgagtgccacttcctgtgactagaatagagggatcatcagaagcaaaacctctcccaatttgtcccttgttcaagcactgctgggccacatactggaggaagctcagagcactctgcaaagggtctactgtgcctcctgcagccctgaatttcagtgtagaagagcgtcaacttaaatcaacttaaagaagaggggaaactgtcaggagcctgatagtttattctgttatcagctgagtcactccctgtacgcgcaatgttcccactgagtcacagcctgcctcacaccaggtatttgattcttatgggaacaggaaccctagatgtagctgaggtagctactacttctcccctcattttagacatgtaaaaactgatacacaaaggcagttaataattatcgcaatattctagcgccatacatgtagccaaggcccactgtatcccacaagcatgcatgtaatcattatgctgcactgtctgtcctctgtccactattccaacagagcagtaaataaagcacacttcacattcctagaccttagcatacagattacttactgctgatgagttattcaattacagttaaggtctgaccccaacaagaaagctaaattctcttcctgtatcaaaatcatctgaaacatacctaccattaaggggtcattccagtggttctcaagaaaatttagaaatgtgtggggacgtggctggttgcacaaaccatggcgttctactgccacctagtggatacaggccagggatgcggctaaacacccaacaatacacaagacagcctacccacaaagaactgaaaccgaaaaaaacagttaacagtaccaaggctgagaaaccctggactattccaatcattataggcaaaaaattacaggtccatcctgactaccaagatgcagtccctagagtaaaggctaacagtgggtggccattttcctggcccccagtttgccattcgggaagactgcatgactatgtatccattggaggtcatgaggtgcctatgccacacctcaccctccactgacagctcccatgatccatttgcataatcacaaagtgaagacaggctggagttcttagacatgccaatatgctagacttgcagtctgccacaagctatgccaaaagtgttttgagggaagcgattagaatacaaagtaaagactatgtttggacgttatcagtttataaatccaacctaatccgtccccccttaccattctcacacataatcaagagttggatctgtttgtagcagaaattcagatttcttttatctttatgggttgtaaagactgtgaatacgaagatcaagagggaatcaagagagggccgaatttatgctttggtggaggaggaagttcttgggtatctgcaattcagcctaagaagaatatttagatatttctaatgtgaaaacttagcacagctcctcaatgaaagtatgtggccacaccattcagccaattttaagttacattaacacatgttggtcactgacctggattctaactgaaggtaaagtcgatgggtcacagcagcaggagttaggatcaagtgacctgatcttgagctcacatctcctgccagagaaaactggctgaaggtgacaaacagcagcaagcagagctctccttgtgccaggggccccaggggatctgcgtgtggcatccaaaccacatgcagcagatctgggtttctccctgcagaagagtttccaccatttataggttaacgttacctgttgtaatcaccattcatgatagtccgactctgtatctctctttggatatcaacgcaggagatagaaaactgagtcaaaaaatcagaaactcattttaaatacttttagaaactggcaaatcaaaaggaggttctctatgccgcagtatctggaagataactgaagaaactgaaggcatccacctcatgcaaaaccttaaaactcagatcaaaaacaaaaataatatatatactctcaaacatacacacatgcacattcctttcttgaaaaaaaaacactggctgacttctcaagatgcgactccagcaaaatgttgaagggcctgtgtaaaggatcacattcatataaaacatgctgcccccacattctttcaggagcaggggagccctggcttggaatcaatcagacattagtttgaatactgtctggctatgtgttaggtgccctttgatgaatcacttaaccattttaagcatcactgtcctcatttgtaacgtaaacgtttactcattggcaagattccatcatgttacccaagagcttaggccatccattttcccccactgtgacagcctctcgtgtcagtcttgatgcctgttcctatagctctctcaccccaaaactccttccttcttctttgcctagctaaagccaactcatttgtcaatcttcactatcacatgctccaggaaggctgccctgatgccaccatttctgaaactagatacgtgctcactgtgttcctgtgcttcctccttcaatgatgaccccatgtcataccttgaagtgtccctctgttcagcctccccctagactggaatcttcctgagagttccctgatgtgtttccatagggcatggcagcatgttctgacggctttatagtgagcaaatgaacaaaaggccttggcaaaggaagaaatatcaggggtacacaggagccaaaggttacaatgtactttataaacagcagatttcaacaaggggaaatcaatgatatcaaaaactgcaagcaaagaggtcaggaaatagaataactgagaaaaagacaacagacttagaaattaggtccctgacagcttctgagaagtgtggtgagtgtcaaacatcaaatgctgtgggtaatgaaaaaagatagggggtgggagagttccttcttctgggtgaaggagaaagtgagattctccttgactgagcctagacagggcacggacaagagtgccacaggaatgcagaacacggatgagacagctaccgataggatctgacagaaagctgctacggtttgagtgtccgtttcaaaattcatttgaaattgatttgccattgtgacggcattaagaggtggtacctttgagagatgattagatcatgatagcaaaggcctcgtgagcaaattaatggtattactgcagaagttggccctctttttctcttggtctcacatgctcacttgcccttccaccatgatgcagcaggaaggcctcaccagatgcatcccctccatcttgagcttcagagaatccagaaccatgagccaaattaatttcctttctttataaatgactcaatacgtagtattgttatagcagcagacaatagactaacacaggagctaagcagaagaaggatttctgagaaataaggggagtgtagccaattacagagagagaacagcaacttctgtgaagtcgagggcaccctggacaggtctatgacttagaaacataggacattgtttacccagccctaaggagtcacagtgctggggcagaaaggcaagcccaataggcagggtgaaagaagttctaaaatatccagctctgcttgggtaagaaaagctaggaggctgatgacagagagaattaaataacactagtaaataatataaaatattttaaagatgtaaaacgctgtaagttattttagtaacataaaatgtaataagcatgttctgatggctttagtgagcaaatgaacaaacggccttggcaaaggaagaaatatcaggggtacacaggaggcaaaggttacactatataaacagcagatttcaataaggggaaatcaatgatatcaaatgctgcaaagagggtcaggaaataggataactgagaaaaagacaacaggcttagaaattaggtccctgacagcttctgagaagtgtggtgagtgtcaaactttaaatgctctgggtgatgacaaaagatagggggtgggaggaggattccttcttctgggtgaagaagaaagtgagattctccttgactgagcctagagagggcacggacaagagtgccacaggaatgcagaacacagatgagacagttatttgtaaattattttagtaacataaaatgtaataacacaactataaatacacgacacataaatactatgaaaaccgcataggcgatcacattgacaccaaaaaaaaaaaaagtgttaaacattaaggcatgagagattaaagcagcaagaaaatggcttcagtaagtttaaaaatgtataaatgattacatacatctatactattttctattgatacagaatcagctagaaaacaagtatttatctcatagaaaaagatccagagcactgtgtattaaagcttttgatgtctggactgaaaggaaggaaaaaaaatatataaaagttgtacctttataagaactgaaaaaagaagaggaagaaaaatgcacgtcataagtgggtactgataaaagcattatttgaaggcaatccattctccatagatatttctattcctaattatgaaataatttaaatatacaaaaacagaagtgcagacactaatgttgataacaccaatgtaccagtcaccagtgttaataggcagtaatattaggcatatttgattcagaatttaagaaataaaatatcacagatacagcaaagtccaaccaccctaccacttataagctcccacttgtaagttaaaacacgaggtatttggttgggtgtaaggaggctggacttgctcctacttccctccccaggagtaggcaatgttcttttctttttttcttttaggttcaacagttacatgtgcaagtttgttacttgggtatattgtgtgacactgagcttttgggcttctagtgaacccatcacccaaatagtgaacacaaaacccaagagtaagtttttccaccatttccccgcttcctacctccccgtctttggagtctccagtgtctactgttcccatctttgtgtccatgtgtatccaatgtttagttcccacttataagtgaaaatatgtggtatttggttttctgtttctgtgttaattcacttaggataatggcctctagctacaaccatgttgctgcaaaggacatgatttcttttgtatggctgcatagtattccacagtgtatatgtaccatattttcttcatccaatccatcattgataggcacctaggctgattctatgcctttgctattgtgaatagtactacaataaacatgtgaatgaaggtgtctttttggtaaaacaatttgtttttctttgagtatatacctagtaatgggattgctgggtgaaatggtaattttatgtttagttctttgagaaatctctacactgctttcaatagggactgaactaatttacaatcccacaagagtacataagtgttctcttttttctgcaatctcactgacatctagtttttttttttttttggactttttaataaaagcctcaatgttgtaaagttagaatatatgatttacaaccagcacatgttccatactgccctaggccactgagattattactccatgcagaacttaacctctttctttccaaagagaatctcatgactttttaggaacattctaagtaaatataagatgatcacaatcgccacctctcaaataggtataaaataccaatttacatttccaagagaccataaagatgggaagattatgatgaaatgtaatgaataaacttgggcaaagatcctagatttcaggcctacttggaatataatttttcttgtctaaagtcccgactacaacaaaaatattttaccatcatcacctttattaaatgtctcctgggcacaggatctgggggaaaaaaatgatgctaactcaaagagtggtacatggaccagcagcatatcatgctttattagtccattttcacactgctgataaagacatatttgagaatgggcaatttacaaaagaaagaggtttactggacttatagtttcacatggctgaggaggcttcacaatcatggtggagcacatctcacatggtggcagacaagagaagagagcttgtgcagggcaactcccatttttaaaaccatcagatctcatgagacccatccactatcacaagaacagcacagaaagatctactcccataattcaatcatctaccaccaggtccctcccacaacacatggaaattaagggagccacaagatgagatttgggtggggacacagagccaaaccatatcattccacctctgaccgctcccaaatctcatatcttcacatttcaaaaccaatcatgtcttccaacagtcccccaagtctcaattcatttcagcattaactcagaagtccacagtccagagtctcatcccagacaaggcaagtcccttccgcctatgagcctgtaaaatctaaagcaagttagttacttcctagatacaatgcagtacaggcattgggtaaatgcagtcattccaaatgggaggaactggctgaaacaaaggggctacaggccccatccaagtccaaaatccagcaggacagtcaaatcgtaaacttcccaaacgatctcctttgactccatgtctcacacccaggtcacgcaatgcaagaggtgggttcccatggtcttgggcagctccacccctgtggctttgcagggtacagcctccctcctggcattgagtatctgcaacttttccagaccagcggtgcaagctgtcaggggatctactattctggagtgtggaggatgttggccctcctctcacagctccattagatggtgccccagtaggcactctgtgtgggggctccaatcccacatttcccttctatactgccctagcagaggttctccatgagagccctgcccctgcagcaaacttctgcctggacatccaggcatttccacacatattctgaaatctaggcggaggttcccaaaccccaattcttgacttctgtgcactcgcaggctccacaccaggtggaagctgccaaggcttgaggcttgcaccctctgaagccatgacctgagctctacaagggcccctttcagccacactagagtggctgggatgcagggcaccaattccccaggctgcacacagcacagagaccctgggctgggcccacgaaaccactttttccttctaggcctccaggcctgcgatgtgatgggcttgcagtaaagacctttgacatgccctggatacattttccccattttcttggtgattaacattcagctctttgttgcttatgcaaacttctgcagccggcttgaacttctcgtcagaagatgggattttcttttctattgcattgtcaggctgcaaattttctgaacttttaagctctgcttcccttataaaactgaatgcttttaacagcacccaagtcacctctttaatgctttgctgcttagaaatttcttcagctagataccctaaatcatctccctcaagttcaaagttccacgaatctctagggtaggggcaaaatgcctccagtctctttgctaaaacataacaagaatcacttttgctccatttcccaacaagttcctcatttccatctgagaccacctcaccctggactttatcgtccatatcactatcagcattttgggcaaaggcattcaacaagtctctaggaagttccaaacttacctacattttcctgtcttcttctgagccctccaaactgttccaatctctgcctgttgcccagttccaaagttgcttccacattttcagataccttttcagcaatgtgccactctactggcaccaatttactgtattagtccgttttcacactgctgataaaaatgtaccagaaacaggacagtttacaaaagaaagaggtttactggacttacagttccacatggtgggaggcctcacaatcatggcagaaggtgacaggcatgtctcacatggcagcagacaagagaagagagcttgtgcagggcaactctcgtttttaaaaccatcagatctcatgagacccattcactatcacaagaacagcacagaaagacccacccccataattcaatcatctcccactggctcccttccacaacatgtgggtattacgggagctacaagatgagattttggtggggacacagagccaaaccatatcacgtgccaaactccagacataatggaatctcagtcctcattttagcaagatcccaggtaatgtgtatgcacattaaagtttagggagcactcactggtttaaagaattcagaaatatgaaaacctagactaaggcagaaccaaatccaaccaccattttgctaaacctatcctcttcctatcagaccacatggctttcaggtgttatctctgcaaagtccacacattagtctcattacactggtggtaatcaaatgagggcaattttgtccctcagaggacatttggcaaagtctagaaacatttttgattaccgcaacttgggtagtgggttactggcatctagtaggcagaagtcagaactgctgctaaacatcttacaatgcataggacagctcccaaaaataaataattatctggcccaaaaggtcaataagacaaaggtttttaaaaaacaaaacaattaaaaaaatccacctgcaattagacttatgatttcatggctaagatgaattgttatattcagtcatttgataaattgattcgatcatccatatccaaggggggggggggggtaatataaaccaataaccaaaaccacttcatgcccaagctctcagagtttaagtttcccacaagaggctgcaaccaaatcaataatcaataatgacaacaaatagcaagtatagtgaaacaacaaatgcacatgttgaaatatttcacaattacacaagctgaatttaagaagtaagtacagacatattttcccaataaaaagtcaggtgctcacttaaatctttggttttttgttttgtgtaatgcaggatctttaatgaaaaaacacttgggccacttcaagacgacaaacgctcactgggcaaaacaccttcactgaaaagagacctcatattatgcaaaaaaaatcttaaaaggtaattttttaaatccctcaagtattatcaagagctttgttaatttcatcgaagtgctatgaagaaaaaattcttttcttcacagaaggaattacagctcacaattaggaaggtggaaggtgttctaatacaagaggaaaataggtcatggtatataattacacagatgagtaatgaactcagagctgactaagcctgcttttattaagatgaacgtatttctggagtgagcaatgctttgcacagccttgtatcaattaaattctgtccaaagagagaaccctgaggttatctgtaatacatgacaacttgaaaacacttcatgcagcacaatcctaagatattacactgcactaagggacaagtgcactcactatctaaatcagattgaatctttggcattgacattctttctacacaatgctcccactacactttaataactgtctttgggcctcataaatctcattctgccatgttctttaattatgttaccaaagtctccaaagtgacagtagacaatgtaggctaaaacatttcagaccacttcattctcatatatctggatttgtgaaacaaggcaaaatttcactgaagaaaatttcaagacttacactattacagtataccccccctctttttttttttttttttttttttttttttttgagactgagtcttgctctgtcacccaggctggagtgcaatggtgggatctcggctcactgcaacctccgcctcccaggttcaagcaattctcctgcctcagcctcccaagtaactaggattacaggtgtatgccaccacacctggctaatttttttatttttagtagaggcagggtttcatcatgttggccaggctggtctcaatctcctgacctcgtgatccacccacctcggcctcccaaagtgctgggattacaggcttgagccaccgtgcccggccacagtattcctttttaaaaagtttagctatatatatgaatctttcttaaatgtgatctctagaatttaggaagcattgtttatattcctaaagcctcaaggttaacataatgacaactttcacagcagaaattcagtgataataccagaagtaactatcaatgagcagggctccacaaacagacacctacacaaactggctcaccagactgcctgcttatccagtaatccagttaatcatcatccagaagtcctgttcatcttttaatttttttctgttgcctatctctcctctttaatggactggcatgagctggtaagaaacagtgaatcaactgagaagtgggcagggaagggagggttgctgagcacactaaaagcttcttttctgattcttttggttcttatttatttttacatttttgtataaaatcagcatgagaataaaacgatttccttcatttgtgaaagatttgaagtttctgtaggtccctgtatgaggacattaaatcatctcaatctgtactaaagataaggagaggagactgagtagatatcacgaggtccaaatgatgcatgtcttttttaatgattttgtcctgattttcatccaacacatattcctgccttttggtctcaatatataatttggtcttacttgccttaagagagcttcttttccacacatctctcagtctattactgctctgatctgccctacagaaaaggctgccatgctctaagacacttgaacccgtaagacagtatgttctcaccattaaccccactgcttttaaaaaaaaatcaatatttaagagttcaaaaattactaccaagagtatcttggaatttctctttagcttgttcctttagagtgttcctttaagatgaagaaatctgtcctggcatgagcctctgctgtatcaaaccagacagtggcacagggtagcagaggcacccaaccagcatgtctaaaacctcccaccctaaactggaggctcatctgcaattgcatcaaaactgccaaaatagcagtgtttggggaaagggcgcaggtaagctgtgtgcattcactccatttcaggaggcaaagctgctctagaagtttaccttggtcagtcagtcccttccatccaactcaaagtggtgggagcagtgaaggggaatggtgtatatcaccagggcatacacatgcagattcccagcaacctgaggaatctgagagcagagttctggacctgcagcattaggtcacatgcagaaatactgcagctcaaaaatacaaaagacacaagactctgagaaaataattttataagggtttctataagaaaaggaattatgtctctcattaaatcatttctgggattcactatttctataaatagtggcttctacaatatttctaaaaggaaaggaatttggctctcattaaattatttctgggaaattattcaatatttcaccatataactatatattacacagttattatttctgttttccaaaataacagctacagttttttatattttaaactcaagtgaatcccacaagtactcagtacctaccatgagtatgacaccacaatggccaggcgctggggggttgtgtggcttaggactgggaaaccaaattagacctgggaatacagcagcatgcattctctcaagctctgcaagactggcatttaaaccaaaatgcatctaactgtcaagagacagttaccagacaaattagttaccagccacagactcttagtcacagtagacagctaaaaatggaaaatgtgctccccctcccttatcttttaaaatatgaaacaggctcataaggagaaaggcgatagaagacctacaaagaagcaaatgagtacaaacccatcatgcccagagccaagcacacaaggctacagggaagaggaagaatagtgctagtgaaaggttttgtggaggaagtgatttggggtactcattccttctataggaagtccatagactggcaaaatcaagtctatcaatatttctagttttgccataaagcaaaaggaaagcatatgggaaaggaaaatacgcagaaacaagatattcttgtgtaggaagcagcacacaagtttacatggatgtactattttttatgtggaatgtgactgtatttcatattccatatttcaaaatatccctttgtcatgcttaaatgtatcaacctaacttgtcattcactgtgatatgcactgtgctggcaccacaaatacagatgaaaaagatgcattctctgacatcaaggtacccactgttcccacaatctttctttcccttgatccctgaataaatcttaagagcaaggattcatgccttgtattcccagagtgcatattcatttatttcacaaatattttaactatctaatgccctaaatattatgcaaagaattcaagagtaaaaaaatgacatgatctttctcctctgaaggagcttgtagtagtggaagagacaaacagctggagagaggagtgttgataggagaaagacacaggatgataagcacacactcaacccaccccaaaccaggctaggaaagttgaggtttcctaaggaaagtgacagctaagctgaggccttgaggataaagagaagttagccagccaagaaggtatggaaacagttttccacacaaatgaaagtctgtgcaaaggtccaggctgagagaaatcacagaacctaaaaggaggcagatgggcccaggacagcaggaactcagtgctgggggtggaggaagcaggaggcagaacaagaaaggacttcaacattacagacttagggcattctcctgagggcaaggacagactactaaagggttttaagcaggataattggtactgttcacatataagatgggcagtaaacatctgttccgatatatcaaataaccttttgaatttaattctagtcttccctctgccctaaatcaacacttccgacatcagtgaagaatatacaggattcctaaacaatagaagttctggataacacctagcacagcactgtgcaataaaaccataatgtgaaacacatatgtaatttaaaatttcctagtagccagagtcttaaaaagtaaaattaagttaaatttaagagtaataatatattttatttaatagagcatttgtagaatattacttcaacatgtgatcagtattaaaaatactgagatattttacattttttcattccaagtctgcaaagtctagtgtgcattttatacttaacagaacatctcaatctggactggccatatttcaagtgctcaatacccacacatggctagtggctaccatactgaatagtacagatgtagaatgtactttgggaagcatttctcagaatgcttaaagtactttttatcatttgtttgtatttgtattctaatttattaaaataatgcaaatcagtttttcaatgggaaaaaaaaaaagctcaatattgaaaaggtacccataatcccataccaaaaataccggttaacatttgaatgtatatgtttgttagacactgtcttcatgtccaacatatatgtagaatacacttttctaaaagtaaggtccgtctgaatagctcttaatatgtaaacatttataatgatttttatgaatccataaaaatttctcttttaggaaaaaacaatcacatttccaacataggttttaaaaaaatacattacacatgggattctgaataaaataaaacattaattctgcttttacagttactaccttttaagattatacctaaatgagtatttcctagaactctggagttttatagggaaccattattattttaggggcatgctggtctccgtattacctagaagttctcagagactgccctgctgctccagtttctctttactgccacctgtctgctccattcttcccttttcattgcccaaaaaaaaggaagaaggaagaggagggaaaagggagggggagaggggagaaggaagaaaggagtgggggttggtgggtaaagggggaaagagggagggaaaggagaaaaggaagaccaaaagaaagaaaaggaagaacagagggagggagggatgagtgtctaacttacacagagtaaaaaggtggcttcaaaaatttggtaggtttgactatattcattgccctttgccttattactcagcaaatgtcttggaggccataagtgccctatgagtgaccagttcacacctcttttcaggcctctgccttcagaagttacaagatgatcaattcaacctccacacagcctccagatgaatcctgctctcagaacctcctgatcactcagcagatcattcctgtgctgtactgtatggtcttcattgcaggaatcctactcaatggagtgtcaggatggatattcttttacgtgcccagctctaagagtttcatcatctatctcaagaacattgttattgctgactttgtgatgagcctgacttttcctttcaagatccttggtgactcaggccttggtccctggcagctgaacgtgtttgtgtgcagggtctctgccgtgctcttctacgtcaacatgtacgtcagcattgtgttctttgggctcatcagctttgacagatattataaaattgtaaagcctctttggacttctttcatccagtcagtgagttacagcaaacttctgtcagtgatagtatggatgctcatgctcctccttgctgttccaaatattattctcaccaaccagagtgttagggaggttacacaaataaaatgtatagaactgaaaagtgaactgggacggaagtggcacaaagcatcaaactacatcttcgtggccatcttctggattgtgtttcttttgttaatcgttttctatactgctatcacaaagaaaatctttaagtcccaccttaagtcaagtcggaattccacttcggtcaaaaagaaatctagccgcaacatattcagcatcgtgtttgtgttttttgtctgttttgtaccttaccatattgccagaatcccctacacaaagagtcagaccgaagctcattacagctgccagtcaaaagaaatcttgcggtatatgaaagaattcactctgctactatctgctgcaaatgtatgcttggaccctattatttatttctttctatgccagccgtttagggaaatcttatgtaagaaattgcacattccattaaaagctcagaatgacctagacatttccagaatcaaaagaggaaatacaacacttgaaagcacagatactttgtgagttcctaccctcttccaaagaaagaccacgtgtgcatgttgtcatcttcaattacataacagaaatcaataagatatgtgccctcatcataaatatcatctctagcactgccatccaatttagttcaataaaattcaaatataagtttccatgcttttttgtaacatcaaagaaaacatacccatcagtaatttctctaatactgacctttctattctctattaataaaaaattaatacatacaattattcaattctattatattaaaataagttaaagtttataaccactagtctggtcagttaatgtagaaatttaaatagtaaataaaacacaacataatcaaagacaactcactcaggcatcttctttctctaaataccagaatctagtatgtaattgttttcaacactgtccttaaagactaacttgaaagcaggcacagtttgatgaagggctagagagctgtttgcaataaaaagtcaggtttttttcctgatttgaagaagcaggaaaagctgacacccagacaatcacttaagaaaccccttattgatgtatttcatggcactgcaaaggaagaggaatattaattgtatacttagcaagaaaattttttttttctgatagcactttgaggatattagatacatgctaaatatgttttctacaaagacttacgtcatttaatgagcctggggttctggtgttagaatatttttaagtaggctttactgagagaaactaaatattggcatacgttatcagcaacttcccctgttcaatagtatgggaaaaataagatgactgggaaaaagacacacccacaccgtagaacatatattaatctactggcgaatgggaaaggagaccattttcttagaaagcaaataaacttgatttttttaaatctaaaatttacattaatgagtgcaaaataacacataaaatgaaaattcacacatcacatttttctggaaaacagacggattttacttctggagacatggcatacggttactgacttatgagctaccaaaactaaattctttctctgctattaactggctagaagacattcatctatttttcaaatgttctttcaaaacatttttataagtaatgtttgtatctatttcatgctttactgtctatatactaataaagaaatgttttaatactg

SEQ ID NO: 450 - DNA, 21729 bp, Homo sapiens
agatgtgagtcctcaatgagctataaccacagccataaatatctctcaaagatgaggaacattctcatgatgttgacactgcaattttttgacaatttcccaacactcttaagaaacattccccaatctcacacgaaaagtgggggttttaattttcttgttcaacttctaaagagaaattggagaagataaaactggacactggggagaccacaacttcatgctgcgtgggatctcccagctacctgcagtggccaccatgtcttgggtcctgctgcctgtactttggctcattgttcaaactcaaggtacgtaccatcacaccagcattttacataaaagtcaaattatttgatgaatgtttaaagtgccttttgaaaaaaaatggcatatgtttttatggtcgaaagaccattaccatttgcattttggtagattttctacctctctgcaaaagcgaactatatatacataagtatgtgtatctttttgagtgaggatattttaaaccactatatgaaacatggattctaaaatttgtcctatttcctccaattgttatatattttaacaaattttatgtttgcacaatattttccaaaatagaggaaaaaaaagctacatattgttccattcattatgtcttttctctactaaataaaattttattaacatcttcatgaatcatggctgtttaaaaaatctgcactttgggatatttccttgagaaaaattcttaaaagcagaatgacagggtcaaaatgactagttctggaaaaggaaccctttttgtctttgagattgattattgatattattgatagatgaaccattttgatgacacactatacacaccctacaaataattttcaagtcactggttattttactagtgatcacataataagcatgttaaaagccaagctgtaaacctacgtatttccatgtataaacacatttgtgctaaaccctatattgaaacaggtaaagtacatagctgaggagttatccaagctccccacaaaattcccacttgcctaaaagttgccgtgcaaaagctgcacacatacggctggctctagccttcatattcttttacatttcctcattgtgcatcaccaatactatacccaaaagaaggataaaatggagtaattattataccaataattatgcgatatatacacacagcttactgaagtcttcaaattcaattatttgatccatataaacatataaagacaggcttatagtcaacactttgtaatttgcataatgatttagtaaggatgtctctggaactgtatttcttatttaataactctactagatctattttcttttctaaaacacaccatcccaatgacaacacagaactaacttcctggccaaaaatcaaatccatgtatttaagacaacttccgaatcatagctctgctaggatgaaagacagagaagagtttaaaatagaatgagggctaaatcatatataactgcattattaaacaaaaatcagatgtaatacattataattgcattattaaacaaaagaaaacattaattgaccaactgaacaactgtgcctgtgctgtcggatgagaattaattgtacctaaagagaagtcaaacaacatgtaatgaaatagaacttgattgaaataaaaaaaaaaatctacatatcttttttccccccattcctcagaggtctcaaaatactcatagatacatttctagaaaagtgaaacttgtttctattaatattgttctcacaatattctgctgaaaaagtcactgaaatacttctgaatttgatgatagtctatgatgcccatagtgcccaagtagccctacatttttaaacattcctccctattactttagataacccaatagttaacaatgaaagctattattttggaagatattcattaggttgcagttaactatataattttatacctggtaatgttcttatgtttacccatacacaatcttatctggtaaattattcttctttcaatctcacaactttctggaacttccataaaatcttaccatcatttttaacagtgcatgaaacaatcattttcaaacaaacttgtactcactgaactgctaagcaaaatgaacttcagcattacatttgtattgctttatgtgtataaaaccacgccagaagtttctgggggaaatgggagggattgcaagaaggttttacttggcgttctgccatattcaccaatctactgctccttgtccctatatgatcagccttaccttctgctcctctatctgacctatctgtgctggcttaacacctccatttgtcttctagatcttatcccttctcatacaaggacattgacctaacattttccctccttcctactgtatctattccatattctctatggaatcattcccatcagcatataaaaattatcccaacttaaaatgaatatcctttttctttctcttctgccaattaacatcctaaattttctctctcctgccgggtctgtcccgcagaccctggctgaccgatgaagtgagtactcagacacaggtatgcagtgtaagagcagctagctagagctgcctggccctagtggccagagagcagctgttatgttttgccaggccaattgattctggttggcttgttgttcccacaactcatcatattctgttcaccagagggggtatttactggtctctaaagttgttttagctagcactgaccagtcccatggggtcatatggaagttgtctgctatggcctcagttaatcctttcataaatgggctagtggctctgttttctctaatgctttttcttatttctttagaagtgttgaaagcaatgagttcacgtacctgattgtcttgttgatcttgcatcactgggcaggtcaagagctcccttctaattccacttgactaagacagggtcccataacagtagtgtatcccttgtattttttccaatatattgggagagagggctcagggaaaatatttgtctcctctgtggcacctttactcggtaacggcggggctgagggagaaggaggaggtggtaaggtagatgatggttcttcctcccttccctttttaggctcttctgtgtagagtggggacaaagcagccctgactaaggcccataacgttaaagatgttactgggacccgttgcccttgtgcatgatgttaagatttctccccacttgttcccagagctctaggtttggcaagccttcttctgggaaccatgggttatagaaaacaacagtttgcataaggtcccttaattgcacctctgagacacaggctctgctagctttaagcagctgtttcaatacttttatatactgttgctgttgagctgttaactgttgtcccatgacaaaaccctagcttgaaaatcccctcaaacttggaaatccccagcaggcaccaattacttactgcgcagtcacttcactttcattctcgagggttttgtcacaatctgttgcagcattcctcacacagggcaccacctgctggctctgtcctgcagacgctggcagatggatgaaatgaccattcagacacaggtatgcactgtaagagcagctaggtgactgcctggctctggtgtccaaagagcagcccggagaagctggagctgcttgcttttattcagtgcaagcacaatgccaaaaacctggagcaaaaacaaactgtaggtaattaacatttattgttcccctttcagggaacgtcaggtgtgcggatgatcaaaggtcagttccaggtcaacataagtagatgagcctgtttaagataaattcccctacactccctggtacctacttcttgccctctgcctcagggttatagaatagctgccttcagttattcttccccgaggctctgcagaaccttgagaactttcagtaggtttgcgtcctttccctatagtttttcccaccactctgaccaatccccagcattcccttttgcataaaaaaatcttcaaacgtactgtctatacactttctctctagttagtctcatcccattctcttctatcctacttctacagagttttcatctccaacactccaccaagactgctcttacggcttcaaggatgttaaatccagtggtcattttgggggcatcatattctcatgtttttcctctctttctttctctgccttcctctctctttccttttccatggcatgaaacacaccatttcatttggtgaactcctacctcacactggcctcctttactggttcctcctcttctcaatttcctaatgttggaatagcccagggctcagtgcttgatactcttttcttttgtagcagcattcagttatttggtgatttatctaatctttagctttaagtaccatccacaagaggacaactcccatctttttgcttccacactaaaatgtacactttatttccaacaaatccacttagatgctgtttcatggtgggcaggtctacgcaaatctgccccaaagcccaaggaagctgagatgccaaagaaagaggctaaaagatccagtttcttagaaagcaagttttaataaggacttacaaagagaagccatgtctatgtcctgagtggtgacaagacaagacagatggtggatccctattccattactctccagatccagggcctttatactgtaggtgaggggtggttcagaagggatgtacgggacaattgaggtatgatagcattacagttgtttgacccaagggcaagatttatgagaagtacctgctcttacacaaggaaaaatggatacactggaaatcttagagggatcccagaacagggattaatcagaagccaacttgccagattagcatccaagatggagttgctttggcctctacagatgcctagtagacatctcaaaacaatatacccagaacctttcccacatatctgttcttccttcacctttcctcaagtctgtcaatggcaattctgtttgctcaaggcaaaaatatctagtcatccttgattcctctctttctctcatgttctatatccaatccttcaccaattctattgatttcaccttcaaaatatatccaatatttgaccacacctcactgcttccactgataccactttcatctaagtcaccaccacctctgtcttacattactgcaatatcctcctaaatgagctctctgattctacacttgcctctctgcaggatactcttgacagatcagacagggcaatcttattaaacaaaagtcagattatgttacttctctactccgaactctccagtggcccccatttcacacagagtaaaagccaaattttctatcaggtcttgcacaatctattcatttccataaccaacctacttgcatattctattattcactcttctcattccattccagctagatccctgtggtttcttaaatgcactctctatccaggatctcacattaaaaccttattactagctgtttcctctatccggaactctttgttcctaaagaacaatatggttcagtcccgcatcttcctgaagtcttggcttaaaagtgatcatcttgatgtgactatcattacttccctattgaaaattgcaacactcacctctaatccagcattcacaatctcctttactctgatatatttcatcaccatagtacttatcatcttccaacctgtaaataatttttcataatgtatgcttcatatgtataaacatacataatataatatcatttcccaatagaatgtaaattttataagagcatggatcaatgtctattctattattttatttaacctgacagcctcaaactgtgcgtggcctaaagtcagcattcaataaatatttgtgaaatgaatatttcagttttcacataaaagaaatatcagagaaggtaagttgcttactgtctagaaaagaatgtaatacgtttacattattttttcttctatgtgaaaaatcaaatgtagtgatttgagacatcatagttaaaataagagtataatattgacccaatgtctccatttttaaaatacatttttgagtattaagaggttgaaatttcactcaaccttgtttgactatcattttgatagtcattaaaaagacactgttgggatgggcacaatggctcatgcctgtaatcccagcactttaggaggctgacgcagtggatcacaagttcaggagttcgagaccagcctgaccaacatggtgaaatcctgtctctactaaaaatacaaaaattagccaggtgtggtggtacgcaactgtaatcccagctactcaggaggttgaggcaggagaatcgtttgaacctgggaggcagaggttgcagtgagtcaagatcgggccactgtactccagcctgggtgacagagcgagactctgtctcaaaacaaaacaaaacaaaacaaaacaaaacaacaataacaaaaacaacactgttggatttggttttattttttttttatttgttttttactttatatatcttgcgaaggtttttggctaaatcacattgtaatctactcttataaagtttccccaaagccaaataaggtagacagaacaagaagtgaggtaggaaaacagatattttgagggctcttccaaaattgcatgattagtgctaacgttgggactagacattattaaaattcattctcattccaagcgcatggctttttccactaatggactcatattctcttttaataaaagatcatttactcatacatttctagatttcctgttttagtatgtgatgaatccttctcaggacagcattacagcagaactttgggagctgactaggagggaattcttgctttgtaatttcctttcattttccgtatcagccaggtataaaatctcctgttttccctaagatcactctgtcatactgagtggaaaactgtctctaagcacagatacttatgtatgaaaatgtgagcattcagaaataagactgaccttgtatgaatgattgaataattaaaagaaaaaatagaaaaagtatgctgccatcttcctaatagggtactaaataattttatatattttatcttattcaagttttacactaacctataccttagataataatctggtacaaagctgaagttacttctacgaggttatttagctagggcataagaccacatcttttggctccaagataatttcttttctactatttgtaaacaatgaaaatctgtctatgcaatgtaatttcaagtacatcaagaacattgtgtccataaacaatcttcctacttcctctctgaggctttaaaactttcaaagagaggccaacaaaaactttatttctttgaaatctaaagtcttgggggaaaatgctgagaaaaagcatcatggcttattgacacactgaggaataaaattactgctagtagagtctttcctaaaagtaaatgattatacacaaatgaaaaactttatctttagagtatataatcaggggttgtgcttcagagggaaaagggtataaaaaagaaaaagtcttggagggcatagagagaaaaattcacaatttttaagaagactctaaagcaataaggaaatggattactacaggtagaattctaggctcacacaacccctgttcttaatccataacctgtcctttctgggcatggtggtccagagtttgcatacactgagagatcatctaaagaattgttttataatcttcatgtcttttcagaatagtgggagggagagcaaaaaaaaaaaatccttgtcatcaaagctgaagaacgacaattaacttgttattcataatgtttgctctctacataggaatgtagtcttcactgctctttcagcaacccaagaaatgaaaacaaaacacaacacgactaaaaccaaaacctttaaatcttttatgtgaatattatttctctttctctagcaatagccataaagcaaacacctgaattaacgctccatgaaatagtttgtcctaaaaaacttcacattttacacaaaagagagatcaagaacaaccagacagaaaagcatggcaaagaggtaagcaaggtgaatgaccgtggtagatgttacaatcatccaaagagacaataaaaagccttttcactaacagaagtgatgttacagttactatgtaatagtttcatattgaagcccatgtatacaactcccctttgttcaggagacagctcacaatttctcagaatgctgctatggttaagcagcagagagtcaacagcctcacttgataagaaaggataaagctgcttagacatttctcttaagtttgagagtgaggagagaagcccgggaaggtcggccatctttaacggagatgttgttcctggcaagcctcaccaccccttttctccagtgaattgtctttttcctcagccattttgtcaatagtgaaaaattaaattttatatcagtagttaacataatattttattactgattaaagataccaattctttgactattacattgttgcaagtatttccctcattttgtaattgttacctaattcttagtgggttgagaggttttttttttttttttttttttttttagtatttaatttaatgtatttagtttggttttaaagtaagaaaaatacacaccttgttttgattccctggctgatcctgagacagtatactgtacattagggcaaatgagaagtccctatctcacatattaaagctagtttaatctataagtgttattatcacataattgtactttttggaagtccatgttagtgcataatttgttttgtcttacatattttaaaaacacaaaagaattgcttttatcctatatgcatttgtaattgttcttctaatacatactacatatataattattttagttatgctcagaaatataaattgcttgatgtaattaaatgttttcaggaaaggtatgaacctgaagttcaatatcagatgatcttaaatggagaagaaatcattctctccctacaaaaaaccaagtaagttgtacctcctaaaagtctaatcactggattaggttatgaaattggggagcaatctttttgaggctccatttagtgtggtttgacatagaagacatgaggcattttgagctttagatgatactagtttgtgctaaaaaggctgatttcctaggaaattatatacaaaatgtaaaacaaaaggaatggcatatataaatgactttcttccttgacctgggaacttagtgaacttctttttctactcagataaactcaagactttgatgcagctttccattcttttatgagaatatgtgtccaaggctgattcaaaatgcatggcctagagatagattccaggggatggggttcctcctagttctatagcagttaataaacttctccctgaatgcaatgggcctataagcatatttgtgacccagcacccttcaaaggttctgtggaggttgtgtccttggtgcaagaaatctcaaaattactaatttgaagatagggatctgcagatgggaagaagatgaggggacttcctccctcggatttaataggaagaaccaactctctgatttgcttcagcaacagagctccaatgttggaagaggattagtaggtcagaaccttagctatttatcattgtagacactatcactattttagtgctgaagttcaggaagttctgcctttcttaccatcctgagtggtccatgcagctctctgctctctacaggcacctcctggggccagactacactgaaacattgtactcacccagaggagaggaaattaccacgaaacctgagaacatggtagggtccgaatactttgtgggtctcttttgagttttagatgttattagtttgtgctaatgttaactaagatctccaaagggctcaattattttataaaattcataggtccatgaacagcttcaaaaaataatcaaaggacttgaaagcaagttgcttatctatgatcaatgagacaacagtttggaaaatcacattcagcttttaaaacataggagcagcagaaagcttccaagtgtcacatttttggaagcaaccaaaagtccacttctccctagaccattttatccataggttagaaaagttcttctctatacgtacttaaaacctcttgtcactatttactattttttggagatacatgcatttatcctgaggtcagcaatgaaatatcaataattaatatttttatatctgattaaatcatcatcccgtagacaataccagggccaaatgtcagacattaagaatcatggcatagaatatcatgaagagaatacaataaatctcaatcaagagatgttcatgttcccaggctaagacagcttctcagagccatcctacaaggtaccctaaacctgcatttctctatataaaaaaaaagacttctgccacagaatggttctttgttccccatgctcattaaaacttatttcatgaacatctgaatttttgctaacactatcttcagcggacagtgtctgataaattaatttatgctcaattgttaatagctgatgatacattaatgaggaatcttctcaagtcttctatgagaaaatgtttatgttgacgatatctcttccaaaaagggagaaaagaccatagatggaatttcataacctgaggcaggtcaatttattttgcactggagttttttcactaccttttttagatcactccacgtaagtggccccttaactttgctgatgtgggccaacaatcatgtctgaatctctaattgtagacaaataattttgtgtctttgaggctgataaagggattccactaacagaccaattaaaacagtgattaaatcagttagtctgaggagctcaggagtgatagtgtgaaatatctgggattccccagtctagaaaaatagatgtctcattttacttatttgtaatgcacagtgcctttggcactcagcacagtgaagccaaattcttgagcactgacccccaaacctgaggacccactgggagtactgtacatcccaagaggactggctacttctcagagaaagcatccactttcactatgagcccacctaggtttaacttccctggactcctccttagtgtaaattaatgtcagaaaaacagttcagccaccaaatatagagagtttccagtgaagcaattctgaaaacctctgaggttcttgctgtttgtgtttctgaggattggtctggccacagtcactacttgaagaatttttacatattcaagatggtagctttcctcacaactgtgatacatgtattctcatagtttatacattacacacacactcacatacacacacacacacacatttctgaagcataatttcttttttccactccaggaacactgttactataaaggaaacatcctaaatgaaaagaattctgttgccagcatcagtacttgtgacgggttgaggtaagaactaccatcaaaattactcaagatcaagaagctttttgttacacagaattaagggctactagatattgtcttcttactattttggtaaatttttcattgctgaaatgctgaatatatgtggttaaagtgaagaacaaagtattaccctgacaatcatttcataatctgctgctctaggagaagtcaggcctagcaatgtaaaacaagaatgctacactctggaccttgatgatatctggatccacttctgtgtttatccaacctactctctgaaacagttacttcctgttttctaaaacattcttccctgcaatggtcacagttgaacttaattttagaattatatgtgtttctgtttacgtagataattattgccaatgagagaaagtttggaaagtaagaaaaagcacaaataagaaaataacaggccgggtgcggtggctcacgcctgtaatcccagcactttgggagggcgaggcgggcagatcaggaggtcagaagattgagaccatcctggctaacacggtgaaaccccatctctactaaaaatacaaaaaaaaatagccgagtgtggtggctggcgcctgtagtcccagctactccggaggctgaggcaggagaatggcatgaacccaggaggcggagcttgcaatgagccaagatagctccactgcactctagcttgggcgacagagcgagactccgtctcaaaacaaaaaaaaagaaaaagaaggtaacaactaccacaaaagttgacctctgagtaatcactgttattaacattttgtcatgtttgcacccttatgtgcacatatagacaaatgtatctttcacagcattgaaataaaaaaaaaaccacattgttcttccaacatggctgataacacacacgacaagttcttcacatatcataaaataccttcagggatataattttgaacagttaagttggattgtaatattttattatatggattcaccttctatttatgaactaattatcatactattgtgattatagaaagagggattctttaagctacttctaatcccaacgtgttactctggttggcctgctgatcattcatgttcccctctggggttcttgctatctaaacattcccttactccattttccattatagtcctaggatctgccatgaaatatttgttaaatgaatcaataaactatggaaaaatatttaccacggtgcaaattccaaattctttggggttgcttcatctttataattcttgttcagaattctcttggtaaataagttaggcttcattttatatcgacaaatagtgattctaacttacattaccagaagttagctgaaaggtctatgaatgacaaggctatgtgtgaaattgggatggaggggcagacatcaatccattcttggaagcaaatatgacactgtgtgtcaggaatcctgaaatataagtctctatatctcccagaggatacttcacacatcatcaccaaagataccagataaaacctctgaaaagcacagacgagaaagaacatgccgtctttacatctaaccaggaggaacaagacccagctaaccacacatgtggtgtgaagagcactgacgggaaacaaggcccaattcgaatctctagatcactcaaaagcccagaggtgaatacaattcccttacctcatcatttacttcaattgtctcagcaaagataggcaatatactactattcttagaaatgagtagtatgtgtatgtgtcaagcctataatttatttacttatttttctatttatcttctattttaggaaaacaagtctccttttaagctttggaatcttttaggataaagataatgattaacaatgttcttttattctttgtaaagaaagaagactttcttcgggcacagaaatacattgatctctatttggtgctggataatgcctttgtgagtatgaaacacacggccctctcggccagttcagtcaccctttaagtttacttatcaagcaaaagcaagcaataaactattttagctaatcatggggcatttgtccacctgggtgtcttggctgtttacatgccttgccagcaatagttatctcctcataccctttaatatccatctgccaccaaaatatttagtattggcaatatacttaataccagatagctacaggcaatcaaccaaaaaagaaaaataaaaggaacgcattattaaaatattgcaatactttatatcttaatataaaattaaatatatttaatataaatattatatcaatataaaatcaacacaaaactctatataacttagaaactatattgatagatacagaggaaaatactagaatctacatttctatctagtaaatattgttttgtaatcaaattttaatcacatgattcggtttaaaaacctaaaaattgttaatttgatgtattcaactttaaaatgaagaacactaaaattttacatgaatgtctaacttttatcaaaaaactcctaacatttgaaatagaatttgccacaatgcagtcttacattatttaattatggaatgaatagatgttaattgtagtgaaattcataatttttcttaaaatgtgaaatcttgtatgccatcagctttctcagtgtaatctgctatttcactatactttgtgttttgtattttacagtataagaactataatgagaatctaactctgataagaagctttgtgtttgatgtgatgaacctactcaatgtggtaagacattagtcatgtaaacctcatgtttctgcatagggaagttctgcctggaacttccctaagatttcaccaacaagaagttaaaaagatcccaaatgtcttaagttaaatagttcagggaaattttagcagaacaagcatcaacatcaaggtgaaatcacatgcatggcaacaaagacaacttttaaaatttttactttcaaaatggaaattcattacttgtagtccatcactttatctattacttgtggtcaacaaaagctctcagacacgaaaggaatcctgaacatttttatgaagataaatgctctttccacagatatataacaccatagatgttcaagtggccttggtaggtatggaaatctggtctgatggggataagataaaggtggtgcccagcgcaagcaccacgtttgacaacttcctgagatggcacagttctaacctggggaaaaagatccacgaccatgctcagcttctcaggtgagcacatgctggccaggtgaatgtaggcagaatggatagctatccccagggttccttagcagggatttccactctgtaatatttccctgatcaactgtcagagtgcttgacattttaccactagcaattcacctgtgacattattggatcaataatcagatgatagaatgagctcttggatataagataaccatctgtggtcataacactaaggaatagtagaagttttttggggcctagtgaatataaaaaggctagggcagcgaggcaattcgttaatgtaattaacaaaagctaatggttacaaagactcagattgtgacagtagtatctgtaacttttcatacagcgggattagcttcaacaatcgacgtgtgggactggcagcttcaaattccttgtgttccccatcttcggttgctgttattgaggtttgtaaatttgtagtaaggctctctgtggttctgtatcctctatgaaggccagcataacaccttatatagaatgagcaaaatgaacatttgctgaatcaatgaatcaaggaagaaatgaaactactggtaggtcattgcactgaagatcccttgggttatgcgacagaacatttccttacatcagccttgctagaacgtgccatatcattctttagttcatgttagaaaatcagagtaggaatattggagcagaaagggcatccagtaccctctgtggcctgggctaatactagtcatccccagtatctatggccagagaggccagacaaggaagaagggtgcatgcaggtgtcatatggccaagaactccagtgtcataggtatcatagcaataggttttggagacctccgatatggtgcctatgagtacttcctatgaagaatgtaattaattcaaccatgatttactggtaacttagtatccattagttcaacaaatatttattgaataaaatgtaagtattcataggacccaaccactttaaatgctctttcaacgttttgcaatacacagtgacagggaaaggagctaacaattcactagttttcatctcttaagccatttttaaagtactgcacattggcaacaattaaataaaaaaagaataaataaatatatctactttttccaggctaaaaaaaagaataatgtggctcttgtaggagtgatgtcacatgagctgggccatgtccttggtatgcctgatgttccattcaacaccaagtgtccctctggcagttgtgtgatgaatcagtatctgaggtgagaccttgtcatcctaaaaggagagagatattttccaaatcttttttttttctgaagacacatattattctctattgtttaattaaatattagatcttgtgttgttccaaaacagattttaaaattgtttataaaatacatactaatcaacaggatagattgaaagtgttacccaaaaaacaatcttaaaacgtgtagggtaacatattacattcttaacctagtcttggattacagtaatctgctgatatatgtttcataaagacatcaaaagtgctattttacaagtaaattatgtttagggacacttgcaatgaatgtttcttttcatatatatatatatatatattatactttaagttctagggtacatgtgcacaacctgcaggtttgttacatatgtatacatgtgccatgttggtgtgctgcacccattaactagtcatttagcattaggtatatctcctaatgctatccctccccctccccccacccacaacaggccccagtgtgtgatgttccccttcctgtgtccaagtgttctcattgttcaattcccacctatgagtaagaaaatgcggtgtttggttttttgtcctcacgatagtttgctcagattgatggtttccagcttcatccatgtccctacaaaggacatgaactcatcatttttttatggctgcatagtattccatggtgtatatatgccacattttcttaatccagtctatcattgttggacatttgggttggttccaagtctttgctattatgagtagttttccaaatctttaagaattcggaagcagtctacagatgttgaatggacatatcttttcccaagggttgtgtatcccattaattcaacttccagtctcttgatgcacaaattttaaaaactaccagggctcattctttaagatttccaaatatgccaagatagagcttgcacgtatgatgaccttataattttaacttaaaataattccaactgaaaatgaacccatagtttctaaaaatattaatctcattatgttgatgacaggatcttcttatattcccatcatcaatcaaccaatcaatctgtttttgcatatttatgaattacctgtgaatgccaggcactttgcaaagactttgggatagaaaaataaataaaacatactttgttcttgaaatgctcacaaagaaggagagaaatatttccataaagcccagaagcctgcaactacttcccttcactggttcattattattatctcttgcccctcaattctcaatgcaaaatgagtggataattacaaatggtgatggctgtcactgctgtcctttagaacaacattaaatggccacatggaaattgaaatccttccagctctgtgacttaggctctaggaagaaaaatgtccaaataccatagtatgcatgctctaccacccaccacatttaatacagggcagtcctaaatggttgccaaatttggaatttccattgagctcggtaatacagttagataaatcagagtctcgtgtttctttatctttattctgtgtttcacgcagaaggcaccacactgtatatcatattatttgagttttcttctgattacagttcaaaattcccaaaggatttcagtacatcttgccgtgcacattttgaaagataccttttatctcagaaaccaaagtgcctgctgcaagcacctattcctacaaatataatgacaacaccagtgtgtgggaaccaccttctagaagtgggagaagactgtgattgtggctctcctaaggtattatttattagaattattggggcagaagaattatgcagttttctttttgttttccaatattcttttggaaattctttctaaagacaaacttggcatcgtagttaaaaaggagatttgtgcttgtgtttttgctactgaatttagtaatcctttgaaaggcatttcaaaaactaggacttgattttgacataattatatgaagttaaatgtaaaaaagtaaattgttaactataacatgtcacttgcaatctttccaaaacgtgtattagtcagaaatccctagacgacataatgtcacagttgatcatctgttgaacagtaacaattagagatctagaagtaagttctactcagagggagagttggtcttttctcatcaagccagtgtataaaccaggttgtaaacagagaagaaagaggaaaagaaaaaataatcacaaaaatctgtagaaaataggctattaacatagaacatccagaataagcactatgattctgctaatttatataaattagactccttcaaggcatttatgtactctaaagaatgctgatcactagcaatcccattgccttctaaaagatattctgttgctccactggtgaagcaggatgcagtccaagaagtatccattacttaagatggctctgtgacaatgaacatggcgtctaaactctctatgcttcagtttatgtattcagaaattttagctggttagattagatcagaagactacacagcctaacttagtcatttgtgaagaatattgtaaactttctgttaattataaagaggcatggaattttacaaaagatttgacattttatagcaaattagagttacgtttatctcgttcttacttgcttacattcatctatggtttcttgggtggaagacaattgaagatactcaaaaccctaggtacttctggtttcagcaagtaaatggtatgtatttacagagaagaaagggggaaaggatgaaggaagaggccaagagaggaccattgtatacacaatatgtaacatctaaaattcttgaattatgtcagtcaactcttgtattattttcatatcttgttgatttttttcttatgtaattgaataaaaccagagagttcaggcttaggaacaactgaatttctaaataactgttttcttttccaaaaagtagtatgtatacttcatacagtattgtttattgagtaatccaatttctcatagatctgatatcccagtttattattcctaggtatatagttagggttttttttttagattttaaaaataagctttctgtctagatatttctcccaggcatcacactattttaaagattgtaacttgacaatgcgttttaatgtcaagtctcttcattgttttgtcgttactgttttagctgcaaatttgccctcaaataccattgagatttgatggaaatgcattaaatttatatttaactttgaagggcactgatatttttacaatattaagtattgtcttaaaagacaagttgcctttaaagtttctcaggaaatgtatatataaagttcttcatggagttcctgcacttttgaaaggctttctaaattattttcatatttttctttctgctgtatgttcaattttttttagtttggacttacacatcatacatctagacaaaatttatttttgaaaaattcttgaataattctatttctcaccttttgagaagtcttcattgctgataatattttgttttctatttttcaatgtccttggtcattttcactggaatttgcctatcagagtaatttaccttaaaaagtaaactttcattgccatcttgtgccagaattctatcacctagtctatgggaagaaaatgttgaacccacctttttccattgtgtgtgtgctttgaaggagtgtaccaatctctgctgtgaagccctaacgtgtaaactgaagcctggaactgattgcggaggagatgctccaaaccataccacgtaagaccttttgttttctttgttccaaaacgttttctcacgtttatttcagatttgagaaaaatatgccactgggttccataatacactaaaacacaatgtattttatatttttcaaacgactcaattttggagaggaaaactagcaatcattatgagcatgactaaggattgtagacaaacactcatgagaaagtagctactttgacatttgtgagattagggctgctggaatctatgccaaaaactgtttaaattcccgttagagaacgatgagtttaatacaaaccaaaatgagaaaagaaaagtgtatttaaaaacagcctcagttgatgagctcattttattcttggttaaaagctgatagttttaatttgcaaggctgtcagaaaatcaatagcatttaagaacatgctataagatttgacaattttactccctttaaagtgtctcaatgagccataattcaggtagtagttctgtgtcttatacaatcctatgtgagctgggctagggaacccagttacttggaaaatggtacttgtttcagtgaaaaataacctctaaatataaaatggcaacaagaaaaataaaaaataggggaaagactcaggatacattttctttactcctctttcccaattcttttctggaattgaaactgcagagacagtataaagaaaataattgactcaagcaccatcaattatcatttcatagggaatggataggcaaggtcaaagataaggaccaacgcttgtttatttaccaaacaccatttaatacagcctacatgaatcatggaatgaatccactctgcagggaattctggaaactgtgcccaggccagaaacatagcatcacaaaagaaaaaaaatcatccagctatttaagggcttggaaccctaggtgaacatgccccttactgtgcaagataggcaatttataccatggaagaaaattggaggtggactcaggaaactaaaattctagtcttttctgtcagaaactagctgtgggactttaagtccagataaattagtttttttcactcatgaaatacagctaatggtatagtctcttaaataatatgaattgttattcacataatttaaattctatacattttcattatcattattacataatattttgtaacttgtaataaccctggcttccaaattttatttttccttcaatcagagagtgaatccaaaagtctgcttcactgagatgctaccttgccaggacaagaaccaagaactctaactgtcccaggaatcttgtgaattttcacccataatggtctttcacttgtcattctactttctatattgttatcagtccaggaaacaggtaaacagatgtaattagagacattggctctttgtttaggcctaatctttctttttacttttttttttcttttttctttttttttaaagatcatgaatttgtgacttagttctgccctttggagaacaaaagaaagcagtcttccatcaaatcaccttaaaatgcacggctaaactattcagagttaacactccagaattgttaaattacaagtactatgctttaatgcttctttcatcttactagtatggcctataaaaaaaataataccacttgatgggtgaaggctttggcaatagaaagaagaatagaattcaggttttatgttattcctctgtgttcacttcgccttgctcttgaaagtgcagtatttttctacatcatgtcaagaatgattcaatgtaaatatttttcattttatcatgtatatcctatacacacatctccttcatcatcatatatgaagtttattttgagaagtctacattgcttacattttaattgagccagcaaagaaggcttaatgatttattgaaccataatgtcaataaaaacacaacttttgaggc

SEQ ID NO: 451 - DNA, 129374 bp, Homo sapiens
gtgcaatggcgtgctctcaactcactgcaacctccacttctccggttcaagtgattctcctgcctcaacctgctgaatagctggtattacagcgacacgccaccgcgcccagctaatttttgttatttttagtagagatggggtttcaccatattggcctggctggtcttcgaactcctggcctcctgtgatccgcccacctcagcctcccaaagtattgggattacaggtgtgagccactgctcccagtcttttttttttgtttaatgaactagaatggaagggaaaagaaaagagcattgcaaggtaagtattaccttgcaaaagaaaaggtaagtattacttcaagtggatgtgccacattgctacataaaatgcattcctattgtaagactgtggtcaaactggtttaaaaagcactggaattcaggcatggtggcttatgcctgtaatcctgccactttgggaggccaaggcaggagaaaggaccacttgagaagctcaagatcactctgggcagcatagtgagactctgtctctacaaaaaaaataaaaataaaaatatataataagtaaaaattagtctagcatggcggcacacacctgtagtcctagctactcaggaggctgaggtgaatgaattgcttgagcccaggaggtcgagctgcagtgagacgtgactgcaccactgcactccagcctgggtgatacagcaggaccctgtctctaaacaataataataataattgttttttaaacattttaaagcactagactttacataatagccggtacacttcttatttttaagaagtcttaaattattctatcctcaccccagcgattactctccattaacattagcctttaataaggtaaatttaaagttaaatgtgctgctaccatgtgttaggcactgttctaggccctgaggatgcaatggtaataaattgggatcctagctctcatacagcttccataaagttgggaagacagaagaaatatatgaaatacagagtcaagttgttctgcaagcaccaggaaaagaagaagcataatggcaaggcaatgactcaggtgcaattttatgtaggatggtcaaagaaggcatcattgagaaagtgacatttgaacagagtccaatatttaagtttttaatctagcatttttaatgttattttaaatttaagtgaacattttgataaataatagctaacaactgctgagatttaaaattttataaactatttcattccctattatgattcttaactttttgttcatttgcatatttagtcatttactcaacaaatatttattttgtgctcaccaagggctggccactgtactgagccttggggattgagctgaggaaaagacaaacttatttcttgctcttagaagtgtctggcctcctgaggtgtacactgaggcaggagaattgcttgaatcctggaggtggatgtttttgtacactggtgtgtacaaaaaaaaaaaaaaagaaagaaaagaaataggcaattccaaagtcataagtgggtcatgggttaaaacagattgcagttcccttcttggaagatcagagaagacttcctggagcaataatgattaaattgagatatagagggtaaaattaaattaaatttcaaatttttgcacacatccgcattttaaattttagttgaggccataggcttttagtggtgcttaataagaaactttgagttgtgaaaaaagtacttttaacttcactagattagtcattacccccgatttaaaaaatacagaagtttagagaatgtttacatgcttgttaccattaaatttacattaaatctataatcattctgtatcttgtaatcataaacttagatttccctctatttactaagaagggcaaagagtgtccctgtaatattcagaggtatgtttttccagtttgaagggctgttgatttataatctggagactgcaaatgttcgtaccgcagaactgcagtctacactgtcgaatgttgttgtagagaatcgtgtttgttcacttgaggttgcaaactgtgtttgtcacacgaggttaaacttgctcaccaaccccatgataattaaccagcaaggcctcactggtgttgttataatgaactcaaccagtataaaggcctgtgggttttcttgacataaggaaagtatttgaagctttttccttgtatagtttatgcaaataaaaataaataggtaaggctaagccaattaatttcaagcacaaccccaaatctcattcttccgcagaagctggcacgcaaggtggagcagaagagtctagttttctagatcaagggaaccgaatacagcagaggcctcaaggccaaaacaggcaggtttatttcaggaacttgaaagtagttcagatgcgaagcttccaggtgaagagggcaggttgaatagatcatgttatctctctccctgacccaaacttaatccactaatgcaatgccctccaaagatggcatttcataactaccaccacccaatttttgtccaaaagcatttatcactctctaatatactatatattttatttcgttattttctgcccccaacccattcccacggccattagaatataagctgatggagtatagtaattttgcctattttccttactaaagctccagattgaggatgggggagtaaagactgattggaagttcaaagctgaggcttattaattttgacctttactctaggtccaaggtgctttgggtagactattttttgactcccctcatccccacccttaacctccatgtcagtatttaaaagtatttccctttgggctggttggaaatttcccagagaagagtcttccagcctcttgcctggagggtaaggtctgggaaactgtcagattctgggagctgagtgggagacaggtctggagtacctgcatcatgggcattaaaatgcaagcagccgctacacctatgctttccacagagggtaccattccttcacctatgtctggtatctctcactccagagactctattttgccctctctagaagataaacctccagtcttcaaggggctatagcctcagccacccagtgatctggagtggggcaagaggtgagagagtccagaactccagaacataaaagccagtctgcctgccttcctgggagggtaaaggagaaaatcacctttccttatttcattgatgactctgatccaacagtgaactagttccaagtatatttctattttaaattattaatctacaccctgtcacattagctaacgccaatgaaacccagggaagctcattgctttatgatccattaaaagaaaagagctccacctgccttcataaacatttgttctctttttgatgtgctttttagggcatactaaataagaggcccatgataagacattaaatgttaagctaagcattgacctaaagtctgaatctgggttcccaatgtggggagaagagtttgggtttaaatgtttgacatattacacttgtacaacattcttgtagcactttgacaagtatactaattatatttctgatggcattatgaaaaatttgtattatctgtgtttaaggaaatatttgtgaatttgaggagggtagctcattctccccacccccataacccaggtttccaaaccttctctgaggaggtcagaggaattagaaaagaaacctagggctgggcacagagctcacacctgtaatcccagcattttgggaaactaagatgggcagattgcttgagcccagaagttcaagaccagcctgggcaataaggcaaaactccatctttacaaaaaatacaaaaattagccgggcatggtggtgagtgcctgtagacccagctattcaggaaggctgaggcggaaggatcacctgagcccacggaggtcaaagctacattgagccatgatcatgccactgcactccagcctgggtgacagaaaccttgtctcaaaaaaataaaaataaaaaagaaacccatttacttgacaatttgcctggggatgtttctgcacagcctcaacctttgctcagccctggtcctaagatctcttttgaagaggtcccatctgaactaaaagtctactcaagtctttcactacttaaggtccaggacttcagctaaggacacctgttatgaggtgaaagtattcatagcttcaactgaaaaaagttctaagtctttcggagaagctcttaaataccagtagatattaatgttgctctgtttcctatcacagtgacagtctacatgacgctgcaccttactgcaccaccccgtactcacccagggaagcagcagaagtcagaatattagtcattagcttcagcagacttattattaacttttctacatggcctttcagactcaggagcaaatttatgtccaagttagctcagttcaagacatagaagcaaaaagctgattatttgtcctgtcttctctttctatctatgcttccaacttctgctagtccccttcaacagtctggctgataatggttaggccccattcatcaactcaaatattaagatatggctgttcacttacctaagtctataatatgctccacatggatctctggcttcagacatcccctctctttcttcttcatccttctactccagatgaactacaccttctcttcttattaatatttaggacaggagctgtcttatgtaggataggccttacttatttcctttacacaaggcaagcagaagcctcacatatgactgaagtcacatgtatttctgattaaagaaaatgaggtaaagggaaaaggaagcaaaggaactcacaggaacactggagttccataacacagcatattcagtatgtttatgaaaagtttatggactccattaactctagcatatgtatacaaagatttcatttgatgaacttcattgatccatgaagtcatatcagcaagaaaactgtccttcaagatcaattccttctttgctggaccttccactaattctcctggttccaagctaccaagttgcaaatgagttgcaatgacaagtgaagatcactatttagccagcatttgcagatggggattctggaactctcagatagatgaagacacccttctgaaataatggtcgattatttacttaatgctggtttaacttgcttttttaacctggcagccaaaacacagtctgctgttggtaacaatggagaaattttattcagtagaattccttttagagagagcactgcacttgtttcaaattaatgtcttgataagacattttgggagtatttttaaaaagcctaacaacccaagtgtccatcaatggatgaatggataaacaaaatgtggtgaagggaaccagaatatgacaccccaaaatatgccactttggcataagaattattttgagctgaagacaatcaagaaacagcagacagaaaacaaaaaacaaacaaacaaacaaacaaaaactctctgccctccccctatctggctaaaagcaggacatgactttccatttttaatggaaaaaccaaagtctgcaaaacagtttaaagagatttttcagagccaacatgaagggccatgacctggagaaaaacaaccttaagtggtcttgagaaagtgcgctcatggccaggcacagtggctcacacctgtaatctcagcactttgggaggccaaagcaggtggatcacttgaggtgaggagttcaagaccagcctggcaaacatggtgaaacactgtctatactaaaaatgcaaaaattagttgggcatggtggtgggcacctgtagtcccagctactcgggaggctgaggcatgagaatcacttgaaccccggaggtagaggctgcagtgagccgagatcattccacagcactccagcctgggcaacagagggagactatgtcaaaaaaaaaaaaaaaaaaatcagagaaagtgtgtccaaagcagtcgggttatagtttggttgtatacatttcaaggagataggaattacagctaaagacataaatcactttatggaagacaatatcggttcagcccaaaaaggcaggacatcctgaggtggggagaagagcacttacaagtcataggtgggttttggggattctttagttggaaattggttgaaaaaattaagctttgtctaaagatttgaagtcggtagaaaggaatgtttaagttaaggaggttcattacccaatacactgggtcagagtgacctgtagggatgtgacttaacccttgtctggcatggtcataggtcctgtttacaatttggtatcttactgtcacaaagagtctgttttgtcagtcttatgatctctattttaacattaatactggtcagttgtgcctaaactccagaagggagggagtataaaaaagtgtgttcaacctcacttgctgtcatggttggaaattcagttcttaaggttttttgtgtctccatggccaagaaggatctgttcagtcagtgtgggcttaggattttatttttaggttatgcgtttataaaggtgtcctctcccttgccaaggaagagaacaactcttaatgcaatcacctgatggatttggtctaccctctgcacagacaaatccaatttactgagattgtggtattgcagtaaagaaagagtttaattaacactaggctggccacatggaagatggagttattactcaaatcagtcttcctgaaggcttggaggttagggtttcttaaggataccttggtgggtaggggactagggaatacgtgttgctgactgactgaggatacaatcatagggttgtggaagatggtcctcatgcactgagtctgcctctgggtgggggccatgggaccggctgagtcatgagtcagtagcgtcggtcagtggccaaaatgcaaaagtctgaaaaacatctcaaaagatcaatcttaagttctacaatcataatgttatctataggagcaataggggaagtcacaaatcttgtgacctctggccacatgactcctgagtagtaagggattatagaaactatattttagcagaatttaggccactcccatagttctaatcttgcggtctttcatcagttttacaaaggtggtttcagctcctgaacaaggaggggatcagttttagggagggattgtcatccttgcttccacattaaactagaaactaaatcccttccatggttagcttcctatgcccaggaatgcgtgaagacagccagtctgtgaggctagaagcaagatggagttggtcatgttagactcctcttgctgtcataatcttcgcaaaggtggtttcattaatcatcgggactcttcatcactggagatgactctagattcttttcagcccaaagacctggagaggaatgtatataacaaaccttactaaaccacccttttcttctatttatttccctatatatttccttcccacaagttaccaccattaggaatcccccttttcctttgtcttgtcaatctctgcaatgtatcaaatgtatcactgtttgtcaaaatgctgtgtcacctcttaggtctaactgcttctctgccccttcacttttctaggaaggcccctgtatatatacatgataaacctttcctcctgctaatctgtcttttgtcagtctaatttgcagggccccagatactgaacctaagaaggtaaaggaaaacatttttttcttcccccacagtggtatatgcataccatgaactattattacttagcatttcaaaggatggaaattctgacatatgctatactatgcatgaaccttgtggacattatgctaagtgaaataagccagttacaataagatgaatactataaaattccactggtgggagtgtctaaaatagtcaaatttatagggacagaaagtagaatggtggttgtcaggcactagggggatggggaaatgagaagttgtgtaatagccatagaagttcagttttgcaaggcgagaatgttctggagattagttatctaggggccaagggaaaagttccccttctccctatgaagtttcactgaaaaatcaactcacaaaaggcagactagtaggagaaataacatacaaatgcatttaatgtgtacatgggaaccttcagaatgaagacagaggaaagtgcacatttttatgcttaggttcaaaaagtatgtagagctgtttagaaatatgactggacaaaagggtatgatgtaactttaacagatggagtgaggaaacccagcaaggcctgtctgtctagattcttcttggcctctctgagcagcatttcttccttctgcgtatgggacaggaccctttctggaatgggggtcttatgacctacaatcaaacaaggtaggtccgatcatttccttatgaccagtttttatacagaatgtaaaccaaaagtatatgagacaggtcccgatcaatgtagaaagtttactttgccaaggttaaggacacacccatgacacagcctcaagaggccctgcctatgtgcctaaggtggtcaggccacgactttgttttatacattttagggaaacatgagacatcaatcaatacatgtaagatgtacattggtttggtccagaaaggtgggaccactcaaagtggggacttccaggtcacagggagatttaaagattttctgatttgcaattggttgaaagagttattatcaatagaaaggaatgtctgggttatgataaaggattgtggagacgaaggttttatcgtgcaggttaagccttcagagagaacagattgtaaatgtttcttatcagacttaaggagtctgttctatcaacaattctaaaaggaagagggtacaatgaggcatgtctggctcccccttcccatcatggcctgagcttgtttttcaggttaactttgggatgcccttgccaagaggaggagtctgttcagatggttggagtacttagaattttatttttggtttacaagaaaggcggatgaaaagtttgataatatttttaggttttatagctggctttcgggaaaaggggttctggtttctaggacccacgtggggaagagggattctagtttctatggctgccctcggggaagagtgggactgagagacaggaggcgagcaggagaaggtcagagaaaaccttttgcttctcaggctgcttctgaggccttcattttagggtgttgttttccatgtcccaacagtgacacaacagtgtgaatgtacttaaaactactgaactgtaggtttaaaaatggttatgatggtaaattctgtgttatgtgtgtattatcacacttggtttttttttttttttttttgagatggagtctcgctctgtcgcccaggctggagtgcagtggcgctatcttggctcactgcaagctccgcctcccaggttcacgccattctcctgcctcagcctcctgagtagctgagactacaggcgcccaccaccgtgcccggctaattttttgtattttcagtggagacagggtttcaccgcgttagccaggatggtctcgacctgctgacctcgtgatccgcccgccttggcctcccaaagtgctgggattacagacatgagccaccacgcccggccattattaccacagttttttaaaacctattttaaaaagaccacgaaacactttaaacattaaaaataatcaaatatttttttaattgcttatttaaatagacttatgatggcttttcaacctacacagttgttgagttttttgttgttgtttgtctgtttgtttatttagtagagatgggggttcaccctgttggccaggctggtctcgaactcctgacctcaagtgatccacctgcctctgcctcccaaagtgctgggattacaagtgcgagccaccatgcctggctcattcaacttatacagttgtttttaaaataaaaaatacataagccaggcacagtgttgcacacctgtagtcctgattactcagaggttgaggtgggaagattgcttgagcccaggagttcaaggtcaacctgggcaacatggtgaaacctcttctctaaaataaaatatatgtaataaaaaatttaggctgggcactgtgtcttgcatctgtaatcccagcactctgggagacccaaggcaggtggaccactcgagcccaggagttcaagaccagcctgggcaacatggcaaaactccatctttacaaaaaacacaaaattagccaggcatgggggcatgtgcctgcagtcccagctacttgggaggctaaggcaggaggatcgcttgagctcactggaggttgcagtgagctgagatcacaccactgcactccagcctgggtgacagagcaagactctgtctcaaaaaaaaatttttttaagactataggtattttcattatttttctcatgactcttctcatccttctgatatttgtacctcaatcctcagaccactgtccctgtctattctatttgggtaacaaccagtaagtggacatttacaaatttcctagtttttactggggatgacagtccccaatgctaagttgcatcgccttttacctgcctgactggtatactaaaaaatcaactctcagttgttataggtaatcatcatgattaatagaaaatatgttactcttttcacctgttctgcagataggacaaagtaggtgcagaatcgttaattcacctgaacaagtcatagcaaaggtctcaaatgagggcttgtgcagggtcagctttctgggcttgagacctgtacagtcacataggttgccacatttagaggagctccatgcttgtttgatgttctctgttatcatcttgacatttttaatatatatatattttaacaaaaggccccatatttcctttttgcactgggccctgcgaattatcttgctggtccaggacttaggtcactgatctcaaaatatgatgttctaggctcagcagtgggaagggtcgtacaagtaaagaagcattatcccttttattcaagattcagcgtagctattttatacacaatggtcatactgattttgctgtagagcactgcaatactaacactagaatccaccatttaaaagggaagctagagccctcaatagttacatccacgtttcagagagaaatccccacaaagacggatataattttctcataaatatttacaagttttaaatagttggatgttagtcaccccatttatcttggtgtttccttgtgaatgaagcccatccaacgtcgacatcgtattgagaaaaatctgtgaagctaatgaagaaagaagaatcaagagtgccaaaaataaatgtttccatcctgagccaaagaatgaatcacttgtgcattcatatgttatagaaaatgtgattccttttttccagttttacaaggccaacacctatcagcaacacaaattctgacttttactgacttagactaggtctcaaaagccataaaaaggccgttcatggaaatgaacaaagaatgtatttgtatctttatctgagaagtcatgccagaatccctttcaaatcagcagggtaacatttggttttacatttgtatgttttagtgagttttataaaccctgaagctaaccgatttttcttgtaaagtagagaagtaaactgattttgggagagacgcctggggatatagcagagctgaaatgtttgtgccttgtttattaaacatgatcatcctcaccagaaattaccatagcatcaggtttcccagaaggttctgagggccagagtttgtgcttcacttcttccttattcctaaggcaactaacacgatgctagcatgtgagaagcacccagcaaaccctctcttcaccctctctccaattttggcctctcgtgggaaaaccccctccttgcccatgatgtttcacccacatctgtcttgactgggcaatgcccccatgcagccaacttttcatattctctctttcacactttcattataatgtatttgtccttggtccaactgcctttgatttctaagataaaaatgatttgaaaactaactcagtcttaagttttgaagaattaacagcgtagtacaagacctctgttctcctttaggtaatttttttttttacaataacaatgatattttaaggcagtggccactggaattaatctaaaagttgaaatgtcttattaggcaatggggattttgaaacacttctgagtctcatcatttaggttgcagtctatggagaggactggctctttctaaaagatattcattcattcatttaatcatcaaacatatcctgaagacttactctgtgccagggactgctgtgggtgctgggatgcaacactgaacgggatgaccaggaccctattctcatggcattcacattctgaggtggcaggaatgtataaataaggagaaaatatgtaataatagtaaatggtatgacgaagataagacagagatgtgcaaggaaatgacagctggggtgcaggaactgggggctacatctaagtggtcaaaggtctctcaaagaggatggcattgaagttgaaacccgaataagaaggaaccagacatgggacgacttaggagaagaatgtgtctggcacagggcagagcttgtgcaaaggcccttgggtgagaggcagatctgtgtgttcagggcacgtgtggctataacatagtgttaccaagggatgagaggcaggcggggatagttcatatagcgtctcagaggccaggaaggaagaggctttgggtttgattctgagtgtgactagaagcccctggagtgaaaagaacatgttctgattatgttttaaaacacccctctggcatttgagctataactagactacaggtgccagagaggaagcagggaggggattaggagagaaacgatggtatctcggaccaagatggcagcagtggaggtgtcacaaacagcattaggaggtatcttggtgatggagttaacagaacttcctgatgtattgcattggttggggtgggtggagagtcaaagactcctggggttttggtttgagtaacagtgtaaggtggtttcatttcctgcgacagaaaagctgggggtggaggggactgagtggaaggggtttgaggggaaaattaaaaaaggcatttaaaaatcccctttttaagtcaggaaacaacagaagctggagaggatgtgaagaaataggaatgcttttatactgttggtgggagtgtaaattagttcaaccattgtgaaagacagtgtggcaattcctcaaggatctagaactagaagtaccatttgacccagccatcccattactgggtatatatccaaaggattataaatcatgctactataaagacacatgcacacatatgtttattgcggcactattcacaatagcaaagacttggaaccaacccaaatgtccatcaataatagactggattaagaaaatgtggcacatgtataccatggaatactttgcagccataaaaaaggatgagtttttgtcctttgcagggacatggatgaagctggaaactatcattctcagcaaactatcacaaggacagaaaaccaaacaccacatgttctcactcataggtgggaactgaacaatgagaacacttggacacagggcggggaacatcacacactggggcctgtcagggggtgggtggctgggggagggacagcattaggagaaatacctaatgtaaatgatgagttgatgggtgcagcaaaccaacatggcacatatatacctatgtaacaaacctgcacattgtgcacatgtaccctagaacttaaagtataataataataataataatcccctttttagtatctaacatccaattaaaagaggagtcatggctcaatcctcaagaaagaaacatgattatatggagtctttgccttatgtggacacagtatgcattttggaaggaaaagtcagtcttctgggaaagtgtggaaaatccaaattggacagaactcattgaaaaaggcaagatttcagtcactggagctgtatttctcaactgcattttggaaacttttgccagcacattcttaagacagggagctcagaagggaatttgaatcatggagatgctactaaaggaacagtatggtgcccccttagctgaataaagaatcaccagagagctgtgtccatgaccactttttttttttttttctgagaatcactgcttggtcacagcacatcacagacaccatttctggaatacaggtttgaggataccatgtcagcagcttcaagaagagaccttcttgccaggacacaaaatgatgctctcctctgggaacctgctttgaatagtgggattcaaggacatgagaccttcttgctggatttttatgatacaatctctacgattttacaaataaaggaataaaacccagataagatgatgtctacccttcctcggggtggtctgctgattgtctggtgatggcgtcagggcagccaaagacaggataaaggccgaggagggtgtttgtgcccttatgttattagcaccattgttcataggacttgtgagaggattctggaaccaataaaggggtagaaacagtacctgattcataggtgaactggaacaaacaggaatttaccagacctgtgttgaagctaagccatatttatcgcaatgtttaagattctcagaaatcacattttatgtctatccataagtaaaatggaactgccattaatagagcttttacaacgtaacatgtgaactgtgatttggtgctctgaaaaaacacggaagagtgggaaggaaggttctaaccttggctcctgataacttgttctatgtgtggagcaaatcattaacctgtctgttttttactgggcaaatggggataatcaagcacaggtccttcggccaatgggttgtgatgattaaacaaggtaattttgtgcaaggagtccaggttttggagtcagacagacctaggtttgaatccaagtgctggtgatggcagcagtggcctgtgtggagtggctgctgccatgatgccagctgtagtgggggaggcgtggctggggcagcaggctccatggagccagtgggagccgggaacagacccttccaagttggcgggatgggatccctgccctcctgggtgcagctgcagctgcccagccctggctacagaccctggcatccctgcactcttggggcccaggaattccccctgcccctgcagactcagaggtgactgctcccactgtctaacctctccctgctcctggcacctgctccgattttggagcaaactgtggccaaacctgggtgctgacatgacttggccaagtgtgcatgctctgaggcactgacatgccagcaccctgccacctaggacccctccacactttgggcactgacgagcatggaaagcagtgtaggcctgcaggagccccttagcaggaacagcctgggcactgtgggtgccgtggagggcaggttgatggtggcaggaggcagacaggctcctgggtggaaaggggcaggtactcagtgaagccccacctccaagctggggacggcctgaagcctgggggctcggctttcagttctgcagactggaatgagaacttatggtgctttttcttggacacccatggccacccatggaccaatccatacacactttctcccctctaaagcctgtataaaccccagactcagccagactcaggcagacatgggatgacctgcctgaggataggagctacctgctctgggtctcctctcagctgagggctgcacagacctcaggacaacctgtctgcggataggagctacccactttgggcctcctcaagaactgttctgctgctcagtgaagctcctctctcccttgctcatcctccagttgtttgagtacctcattctttctggatgcagcacaagaactcaggacccaccaagtggcaggactaaaagaggtataaattaaacagggctgaaacatgccccccccacccccacacacactcaccatgttgtaagcaacaagaagaagagaagagctgcggccctttggggagcacagacctgggggctcctgaacccagggctgtgacacccacggttctgtggtcctggcatttctaagcttccattgactggacttctactacgcaccaggcagcatgctgagtactttgttttacaaatttttttaaatgagcttcgtaaagatttaaaattatatccacaatcactaagcgagtaggtgtcagtgtcctgggatccttaggggtgtcacttttccagctggaagcctctgtggctggcggcacctttgcctgagttttactcgggcctcctgggctcgttctgcccactcggcccagcaggctgtgctcagcttgtgctactggcccggattccacacctgccaaacatgagccagatgtggagcagcaaggggtgtgtgggcaagcaagcgcagggtccagccactgcacacagccaggcatgcaggctgctactgcagggcaggcagctccaggcaccagcacaggtgctggctccatgtgaggctgtggctggaccagacgtactgcacatggcttctgctgcagacacctgtgtctggatgaggggacttttcatctgtacttttcaactgtaatgtaaggtggtattactgtttgaaaattagatggcagtagtttgcatttctcatgatcagaagccaagatataaacacacactacctaagaaagctaaaaaaaaattgcttttttaaaatgttgagtttgagaggcctattaaacatccaagtagaaatgtcaagtgagcattgagatatgtcaatctggggcacagaggagaggtcagggatgaaaattgaaatcaggggtcactggcacatagatgggagttaaagccaaggggctggatgagattatctaaggagaggggtacacagagaaggcaaagagccaagaaggccctcacttggggaaggagagaagtcagcaaaggagcctgagagagataaaaatccagactgtgtgtgtctcagaagccaagagagggtagtgcttcaaggagagggagtgtaaactatgcccagtactgatgagaggctgccgcagaggcagacaaaatacgtgctccttggaggtctttggcaacctttatagggcagtttcagagagatgggaacagagtgaggggactgaaggaatgtatgtcatacgcttccaggttgggcaatacccccaaagccatgctagactagcagtatatgatgttcttaaaagtttttatttatttttctaaatgatgtggcacagagaaaatacacaacaaaaacatttcatgacatttctatcaccacctacaaagctggtaaatcttgaaatgccatgaaggagctcctaaattaaccagcatgaataactttatggggtggctctccaagacatcatgaaggaataactaataaaagcaattgtaaaaaaagcctaacaaaaatagaaaatctggctgggaataactcacgcctgatggatttctatgttgtaatgctgacaaagccaccataaacacacagcaacgacttctgtggtgaaggcattgatattataacccatcccacaactagcaaaacatttgtctagaattgtgacagacttttatttcacttgtcacaaagtgcaactggaatcatatcatgttccatttgattcaacgaatatttttattgagcagatagtaaacagaagaggctgtgcctgccactgaaggagacacacagatgagtcacaagtagcccttgtcaccaacaagaactctctctgcctccaggctgcaccaccatcagggcagggactgagcttgtctggattgccactgttacatagcacctgggcagagaaggcactcatggggcaatgtttgtgaatgaataaatgaattcaaaacagagaatgataagtatatcaagtacatagtaggtattttgtaaattatggaataaacatcttagaagatgttacaaaataaggaaaaaataaatacagggatataggactgtcagaaaagattattgaagagattgtggcttctgaaataggccctgaaagctagatagaattccaacagaagagtcaggaggaagaatattccatgcacggaaatatgaaagaactgctgctgtaagatttttaaccacaaaaggaaatccttgggttcttccattcctgcttaaaaaaaaaaagagagagaaaaaacatacctgctgaaggaggctcaccgttaccggggcacgtgaagtgtactaccttgagctcctttctaatatcgagccaagtattccgtaggagcaatgggtatgaatgtcccgtgctggctcccacagttataacttacatggaaggctgttctctgtgaaccagtacctgccttcctggcctgacattaccttcttgggaaacagtgattttggttaggtcacctgtaaattttggatgaaaatatcctaccattcacccttagccagaatcacacagataggccagggtgtaacataggcaacagagctcaagcctcatgttctccagatccacctgtaggcacaggggagggatacatggttggccacaaagggtttctctttctacttacttctgtgaagaaactcaggcgggcatcaaagacatctgcagaaccaatcaacaaaatgaaacctccatggaatcatgccctgtcctccatcttcccaacaatttggagaagacagagatcctgtgggaggcatgaaaagattataaataagacatacaaggggaaagtctctatctcttctctctttagctggtgctgtacctcagaaatgtcccagataggtgctgggatgaggggagggaggtgggcagagccagcttcataggtgtggggcctgcccgatcactcagagccctctgcttagaagggtcccatgcttttagtgcactgctgtccccatcttgaaatttttaataatttcattttgcactgggtcccacagatcatgtagcccgtcctggagatggggggctggcaagacatagccttcagagaaaagaaagttcaggctagactctcacctgggctttaaacttctctttctctggccaagtactctcaatgccagaacaaagtaacctcatactggctaacctgggtctaagggaagagcagggaccagctctccccagtggaggcatttccttgaaggcccatattttatcctaagcaaaaacccaaaacatatttgcattctgttctatgaaatatctattagatacatttttaaaataagataggctttccctcaaaaaagcaatctttaagtagcattgatgcttcaagaggatatacccttattatcacttggatatgaagtccttctggcccccagataatctcaaatgccatagcacaacatggcatagcacaacatgtcccggagaggagagaggaaactccaattcagcaaaaacccacacacggattgcagcttcctccctcccctcacatggtttcccatggccttcactggcacattgtgtaactgatggcatctggctccttcctttctgccctttgtccttttcctcttcttaggaagtcatgtttacttgctagaacactgccctaaaatagccttatatttccattcccagtccagggtgtgctcacagccagtctaggttattccatgaggcccccgggctcctggttgctctgctccctgggctctggcacctcccagtttccatgcctcctccctgctctggacatacgacccactcgctggtggtgggggctggcacggccagcacttggcatctgcaatatgaaccctaacgatgatgagaacctccaggctttcccttgcctatcagctttgcacacataataccctcttcctaaaatgacagaagattcccatctgtccctggggctcagtgtagatgccacttcctctgggaatccttccttgacatactcctctcccctactcaccaccaagatgaagctagtcctcccatcctactccttcttttccttgtaggaatacttaccacactgtacttaccacactctagttaacttgcctgtatccccagctaaaccctaagcatgatcaggtcagggatatgcttgccttgttcttcaatgtattcccaaaacctgaaagcctcaaaaacattgttgaatgctgttgaagtttgagcattgttaagtgatttttatttattatatcacaacaatcctaaaaggaaaggattagtgttctcatttaacacttgaggaaagtaaggctcggagaggttgagtgagtttcctaagatcacacagttgtaagtggtacagccaggctgtcagactttaaagtccatatgtttcattccatgttccaaaattcaatcagagaagcagaaccactaggagtgatatagactaatggatttgttttaaggattggaccttatgcaattgtgggagatcattaaaagctctatgctatggcttctgcacccggtgcttgggtctgcagtctgcagggaaggtagttggcaaggaaagatggacatgaagttggagaaggtaaagacaaactggagcctgtggggaagagctgggcctccagacagactggaacccatgatggtatctccctacctccaggcctaccacttccacgtgaggatcactttgaagaacagcggcaccttagtcaggagtaaatacacacctggcctgggggtcgcggaagctgaaggagcaatctggcaggctctataagggctggtggacccagctgctgcctcatgcctgtcaggtgagccagcagagaagcaacaatgtatgtgagctacagtggctctaatgccctggactgaccttctgagcataaaaagaataggcacttaactcccaccttccaaatcttggacaaagcttctgctgtggcccaatcaatccacaaccatgctgggaaaaaaattcagggaaacccagttccagtttagctaaattgatacaatataaatctatttccctttctctcctacttgctttactgttacaaattacaaaataagatttccatttcctgaaacccaagatttataacactaatatataacataatgtagtatattaattatttcctacctttttcaataccctgttggcgcgcattgggcgaatgaagatataccttagtggtatatcttcttgaagcatcaatgctactttatattaattatttaccacctttcaaaacctttttctacacagcagttattcaccttcttttagaacatgcaccttaatttccctctgaggaaccagccctgcctccactcttagtcaatatggtttaggtgtagctgtctgccccctcactccaggcatgagcacgtgaacaaggcccaagcacactgcatcctctggcctcagaggatggctcaggcacaggtgcataatcttcattcgcccaatgcaagccaacaagacctagctgaagctttgatttgacttaaagggaagcagactcttccaggtcttgacctggagatgagaggctgtctgagaatggagcaaacacagtgaatgcaacactgattatgaaatgagagaaaccaggtctgggtgccatcatttgagtccctgggcatgtcgttctgaagccagcctcacctgcaattttccattgctgtacctcaactgtgttcgcttgcttgtgcaccacaagcatgatccataattcaacaacctaatacaccttctttgaaaacctactgcacaacctccattgataatagcaacatttactgaatgccagacacattgttgagtgctttatgtgaacaatctcatttaaccctctcaaactccttatgaggtaggtgctatcaattatccacatttctaaagaagaaactgaagcttacaggagttaatgccaggaagaggatgaaggtggtaagtggtgaattcctaattacaactttaaacaccaaaccacagtcatgttggcactcagaatttgaatccttatctactgggctccagaatctgtactttttaatttatttacttatttctgagacagggttttgctccgttgcttagactaaagtgctgtggtacaatcacggcttactgcagccttgacctcccgggctcaagcgatcctcttgcctcagccccctgagtagctgggaccacaggtgtgtgccaccatgcccaactaatttttgtattttttgtacagatgagctttcgccatgttggctaggctggtattgaacttctagactcaagtgatccacccacctcagcctcccaaagtgctaggattacaggtgtgagcccagaatctgtacttctaacaacaaaaatagtttctaatacatacaaaatacttgataggcctgatggaggataaaggaattaataaagtatattttgtgtcctccgggagcttaccatttagtggaggaaatatgtattcccacaaataactgtggggcaccaagttatgagtacttttacctccactccaatctgccactggctactgagcaatggtccaaggttagagcatcatatttagccatagtatacattggcatgcttactgggttgtgtggcagcaataaatggcaactgaaccaaaagatgcaggagtctagcaagactttttacttctggagcaatttcaggcttccaaatccttactgaattacccttaattgcaatttctcgtattactgagatgatgagagtctaatcattgagactatttcctcctaactttgttgctatatgcaggcaaccaagcttcattctgactgggggttacgctaacttggattttaaaacccaattctgcagttcaagagagatgataaatggagtagagggacctcctccctaccctccccccaaaacccccaaagccttcccaactccctatatactctaaaagacagacactagaaactaaacaacacataatctgatgggctgatcaataatgcattggttttattacctgaatattttggggttactttttcatgtcagtctctcatgtcaaaaattctcatttccctaatgcctaccccctcaggccctcatctctcttccatcttcctcacgaatgataatttaaggtcataaaacagatagcttcacactttcaatataaactccaaaaaataaattgttagcggtatttatctgacccctatattctagctattatagtcagataataaaatccagggtgctcgagggaacagatcaaggggacagttagaaaacttaagcttcagtgtttctgttgactctagaaaggcaaaactaaaataactcatctgtagcctgaatatcattcccaataggagttagataaaagcctatcttggcaaagctcaaagtccttaaagtttgggtcttatttgtttgtttgttagactattttggatcttgagagtttgctttgggatggggaacagctattagagctgtttggcgagtgggtatgctagaaatgggttgaaattatgacattagtataaatttttataaaaatctaatttctagactgggcaacatagcaagaccttgtctctactaaaataaaaaaaaattttaaaaaagctggccatggtggcacacacctgtagtcccagctacttcgggggctgaggcagtaggagcccttaagcctgggaagtcaaggttgcagtcagccctgattgtgcaactgcattccagcctgggcaacagaacaagaccctgtctcaaaaaaaataataataaataaaattagtcattatataaaaattctttcttttctttttttttttttgagacagagtcttactctgttgcccaggctggagtgcaatggcgcgatctcagctcactgcaagctccgcctcccaggttcaagtgattcttctgcctcagcctcctgagtagctgggattacaggtgcatgccaccatgcctggctatttttcatatttttagtagagatatggttttgccatgttggccaggctggtcttgaactcctgatttcaggtgatctatgtgtcttggcctcccaaagtgctgggattacaggcatgagccattgcacccggcctcaaaattatttctaatgtgtgcaaagatatctgataaaaactacatgactatgtaaaataaaacatactatttcctctgcctggactttctatttcttcacccttcaagttacagcttaaacagatccatcttctggaagcttttttgaactccacttaactccatttcaactcaatgagcaccttctgtgctcttgaatgcaggtttctgatgactttggaggttgtgccactggaatagagggaaaaaacttctaggactttcatggagagcttatgtgttcatgaatattgagcagaacaggagttatttgcatggactgagcaaacagaagaccaaaataatctttttatgattttttgcttaaaacgttgcttattctttgtgtttttcagagtcaagaaaacttttttatttggagctatttacagcttttaacaactgagtaaaatacactccagtgagcaaattttggagcgcatttctttctctctaccttatttctctgtaatttggaaactatgtctacgtatacttaatttatggtagtatcgctatttgcataagttcagtaagcatctgttttcttttgtaacaggacactattagagacactagttattttaccaaggctttgactggaatgacatgttttcagacttttcagactgctttgaggaattgaggttgagctacagagctgataaaaattccttggaaaaactggccaccttgtttttacaaggttcccaacctgtggtaagtaaaaatgtccctttctgataggcctaggaatcccaagttattttggtacctctagaaatgaggaattcattcaattcatacaggtatctgcaggcacaaataaatctttggctgggctcaagatgcttttaaaaggtctaatctgagattccttattaaaaaaacatccagcaaagccaattttttaaaaaggcctatatagcaaataattattcatgttatgtttcatgcaaacaattaggcctagtataaataaaaccaaagcttattttgcaaataaattggtcctgctatgatttgtctttggtaaaaatgggggaaaactggagagggaaaaattatgtttcaaaaaaaacctatagcatgcctgttattagattctagccttggctgggcacagtggctcacacctgtaatcccaacattttgagaggccgaggcaggaggatgaatcacttgagcccagaagttcgagaccagcctgggcaacatagggagaccccatctctacaaaaaattatttaaaaattagctgggtgtggtggtgcacacctgtagtcccagctacttggaaggctgagatggcaggatcactttagccctagaggtcgaggcttcagtgagctctgatcatgccactgcactccagcctgggcaacagagtgagacactgtctcaaaaaaaaaaaaaaaaaaaaaaaagaaagaaagaaaagaaaagaaaaaaattctagccttgtccattgtttgtgagcctatactaatgactcacatctgattggttcttggggatatttacctgaatccctcaaggcttcagatcagttctgcaaggactcctgaagctaagactttcacaccttgcattaggtctcttgtagtttactgttctcttaagtgctatactaacgatgtggataagaatactaacgtttttgttataccaacattggggacccaacaaggcacctgggaatacatacagacaactgcaaaatggtttcactcctcttaccttgggggcaacccttgccccaactataccccctgtcaacaggaagagcagttgtcagccttttcccatctccccagctcacacctcaggattgaggtgtgctgaagcacaagggagggaactgaaaccacctttgcaaagattatgacagcaagaaaagtctaacttgactgactccatcttgcttctagtctcacaggctggctgtctttgctaattcctgggggcacaaagagctaaccatgggagggatttagtttatagtttcacttggaagcaaggatgataacagtccctccctaaaactaatctcctccttgcttagagagtgaaaactaatgaaaggccacaagattagggttattggagggacctgaattctgctaaagtataggtatacttttataatcccttactgctcaggagtcatgtggccagaggtcacaagatttgtgacttccccaattgctcttatagataacatcactactgtagaacttaagattggtctcttgagatgtttttcagatttttgtattctggccatcaactgatcctacctggactcatgactcatgactcaactggtcctgtggcccccacccagaggcagactcagctcactgggacagttttccacacccctatgatttttttcccaactaatcagcagtacccattacctagtccccgcccaccaaactatctttaaaaatcctaacgtctgagttctcagaaagactgatttgagtggtaactccagtctttctgctctgctgccttgtcacttctttattgtaatttaaaaaaaaaaaacaaaaaacaaggtgaaggagccaggcatggtgtctcatgcctatcattcctgtattttgggaggctgagctgggcggatgacttgaagccaagagtttgagaccatcctgtgcaacgaagtgaggccccatatctacaaaaaataaattatctgggtgttgtggcatgtgtctgtagtcccaactgctcagaaggctgagatgggaggattgcttaagcccagaagttcaaggcttcagtgagctatgattataccactgcactccagcctgggcaacagagcaagaaactgtctaaaaagaaaaaaagtaagtacgttctgatagtatgtctcataatatcctgtaattttctttctgtaataggcatcaaaatggcaactgagtgactgcttatctctgtatcatctttcccaatacaatatgaactctatcaaagtgaggactatgtttctcttttacaccatggtattcatagtgcttagcatattattagatgttcattaaataattatcaacagaaggaatgaatgaaccaattaatcatgagtcatgaggagacaaaagaatttgtttggctattgtctgagtatatttataatttgactttccagaggtcattgttgaatagatatgatgtatgctgttttcaaaagggtcattgaaaagtaaatgattagatgaacttacaaattattaactatcttcaaacagtctctttgtcactctgctatatatacatttttcccttcttcccacactccccctgcctttctttctgctacaggtacagggtattaacaaagatggcagattctttctcaaatatacagtttttaaaaaaaaaaaaatccagaaatggttttctcgacatttgaaacaaagctagaaaagaaataaatttcagtaagtatattgtttcctaagagacaagagtatgactttcatctgctgttatgtcagattgtttgatatcacacaatccagattaaatgcagctaaataggactgtctttgctttggaaatcggccttattagagccaagaagctttcttgcaaatctataatataaacaaagtatagtaggagaagtaagcattattttgcactcaaagaccatgagtttaagagaaaaagtcactattgtaacaattgctttgtaattgtaaattatcacaaatttatggttgataaaggtctattccactattgcaaatatgttggaaggagctgggatgtggaaataaataagataaatataaacatatactatctgttgtatccctttctgtcttgttcatcttcactagatggtaataataataaaaatgaattcagcttgggacttataaagcatttataacaggccagacactgtttgttctaaactctttgtatatgttaactcatttaatatatgcaaccctgtaaggtcactataatcctctaagatcaataccatgagttagcccagtttacagaaaaggacatgaatgcaccaagaggtgcagtgacttgctcagggcacacagtaagcgacagagctggggtttaagctaagatggtgtggttccacagaccttacttttaataatttactattttagttattacatataatctcttgatgctatattcttcctagaataacacttataaatcagcaagcatgcactgagctctgacctagatgccatgggggaaacaaaaaatgacaccatttgatgcttcactcactctatttggggtgtcttcctgaactgaaattaatttcaaacgtttagatttttcctgacattgtttctcagctgatgtgttagggcatactggagtgtcaaactttgatctgattacattttaattttgcttcaccaacagtagatagaatgtgaagctaagaaggtcatgctgtgcagtacagaatgtggtacaaaccactaggggataagacacaagaagcagaaagtaatattatgccagctccccaagaaagatcacaggtttctttgaacatgtgaaattctttagtggagatttttggctcttgtagaatgtaagctacctaagggcagagatttgttctgtcttgtttacagtcgtattccctaggagcaagtgcagtgcctgacacagagtaaacaataaataattgataaggaaatgaatgaataattaaaaatcagagagtggggcaaagcagaaataggtttactctcacagtgacatagtgccaacaagggacaatagtgtgataacggtgcatgattttatagtcattgctgtgtatttttatattcttcctatggtacgctttttgattatgtagatagcatttttttagtccttttctttctttgtgccatgaaaaattctaggattcagaaatttatcacgaacacaaatgtgtatacaaatcctttctaaatctctcaaaggaatactaatgcatttacagttgcacatccaaaataaaagaactactctgtttggtttttgatagacaacttgcataacaaacagaaaacacagccacaatttctagagaaatgcttattaaaaagacatacagttctaaaaaacaaagtctactaataaaaaaataaaggaacaatttttaaaagatgcacagccaagactacagagtccttgttttaaacagagaatgcttgagttgagacatattctttcaatctctgagtcccactgtttagacatcacccgtggtagtttagggaaaggatcatcttggaccttaacaaaaaccatccagcttttcactaacaattttcttatctctagctataaatagcaatctttcctttctgaagaattgcaaggtcactttccttttttatcaaaaacaaacaaatccggttttgctgggggtactgatctgagttgggggagctactttgaaggaggtaggtttagtactgggggaggtaccaggagatcccagcttaagataaatgcccaaactccctcagatacatgagaagcagcagacaatagaaagaatcattgagcagcattagtataaggcattatattctacttgtgaaatttcaagaaaatgtgtctttaaggcctaggcaggcagatcacttgaggccagaagttcgagaccagcctgggcaacatggtgagactctgtatctacaaaaaatacacaaaaaaatagccatgcgtggtggtacacacctgtagtcccagctacccgggaggctcaggtgggaggattacttaagcctgggaggttaaggctacagtgagctgtgatcacgtcactgcactccagcctgggcaacagagccagaccctgtctcaaaaacaaacaaacaaacaaaaaacaaaataatgtaaaataagttttaccttattgggcgagttatttctgagcgaccatttgatgcttcactcacactatttggggtgacttcctgaactgaaattaatttcaaatgtttagatttttcctgacattgtttctcagctgatgtgttagctttatatacacacacacacacacacacacacacacacacacgtactcagcacatcttcaaattacttctgtagcacaaaaacacacaaattgaccaatggaacagaaataagccagtcacaaaaagacaaatattgcatgattccacttatattaggaatctaaactagtcagacttttagaaagaatgttggtagccaggagcaggagagagagagaaaaggtgggttgttgttcagtgggtatagagtttcagttttgcaaggtttgaaaaagttctagagctctattgcacaacagtgtgcatagagttaacacaactgcactgtacacttagaaacagttaagatggtaattttatatgttttatagcacaataatttaaaaaatataggaaggacatggtctcagaataaagggccatcttttatcataaagaaaaatttgcaacccaattccaacatgttaaggtgttctcttcttgttgtttcattgagaactgctaaaagtctcagtgcccttctcatttggatggtggtcctactcaaacgtttggagaccaaagccccatttggtaataagaaggatgtgttgcctggcctggtgctctgggcatatacacttcaggagaacctttcgtaggtaggggttaaggattggaatctgtcctgacagaacaatgtcttcacacaattaacacatagttcacatactagatgaaaacaaattccaagtggactacaaatataaatctgggggagggagagagggatgaataggtggagcacaggggatcactagggccatgaaattattctgtatgatactgtaatgttggatacatgccattatacatttgtaaaaactcatagcatatgcaatataaactatagatttagttaataataatgtgtcaatattggctcatcaattttaacagatgtgacacgctaacgccaagatgttaataataagggaaactgtgtatgtgggtagggcaggaaaagggtatatgggaaccctatactttctgttcaatttttctgcaaatctcaaactgctctaaaaaaattaattttaaaaaatgagatgaaagaagaaaaatgaaaaaataaaaataccaaagaaataaaaatagaagaaaatataaattaatttataatttaagaataaactttctaagaatatatcaaaaaactatgaatccagaaggaaaagactaatacacaaccagaaaaatgagcaaaagctattaatagactattttttaaaagaagaacaataaatgttcaataagactatgagagaaatgttcagtcacattaatactaaaacttaaaattatgagatttcatttttatctatgaaattggcaaacatttttaaaagagataatagtaatcatgaggagccaaacaggcattttcacatatcaccagtgaggactgtaaattggaatgacctttggtcagaaaaaatttttcaaaacttggaaagcaaaatatgattgcataatttgttttcatgttaggcattgcctaaccagtccatctaaggtgaattgaatcctgactcgttattacagatttgcacattttacaactgtaaattcaaatgttagtttgtagaaaattggtgagatgctatatttttgtccaatggagatataatttctgtcctgcacagatgaaaataattttgctctgtaaagatagcaccaaacattatggtttatcaccctgtaagacattaatcagatttatatctaatttagcaataatgtagaatgattttagtattcttttttatatatttatgtatatatataggatgtatatttacatatgtatattatatatagtatgtatatacataatataaatacaatatgtatataggtatgtgtacacataatacatatactatatgtatatatgtacataatatacataagtatatacatcatatacatatatgatgtctatatgtatagacatcatatacattatgggatgtacatacatatatacataacatatacatatattatgtatatattattatagatatatgtacatatatacatacatatatgtatgtagtaaatgtatatatagatacatatgtgtatacatatatagatgtatgtacatatatctatgtatatacttatagatgtatgtacataatatctatatatatacttacagatatatttatataatatctatatacttacatatatgtactatgtatatttagatatatacacatatttatacatatatgcatatacacatatacatatatatgtatgtacatatataaatagatatacataatatatgtatatacacatatagatatatatgtacacatatagatatacgtgtgtgtgtgtgtgtatacacacatattttctcatgtctttctttgaactggctttgttatcctgctggtttcctcattaataagttaaaattaaaacttgaactgtgcttactctatatttgtatgagaatactttttaacattttttaaattatacatttgacattttataggagtataacttggccaaatattttaagtcttaaaagtgtacatgctttttaacctagcaattacatgtctaagaaatgatcctaaggaggtaaggacatgctcaaaggtttagctctgagaatgtttctagatgtgctgtgtataataaagaaataccagaaacaaatgtgccacattagggcgctggttaatacctaaatgtgtgtgtgtttgtttgattgttttggggtttggggattttttttttttaagacagagtctcattctgtcacccagaatggagtgccatgcgatcatggctcactgcaacctcaaacccctggggtcaagcaatcctcctgccccagcctcctcagtagctgggactaccttgccccatccctaaatgtgttttaagaatggttgtttccaggtaagtaaaatttgtaagtttaaaatttttcttttatcttgttcagattttcttgtgacactttcaaagaaaaaagtttgaaagtcacaaagtctagttatactgttctcattcttgttgacatctattgaggtacttagccccgactatagttattccctctgtcccaattcctgctactatcttagggaaattcagagtccttaaacagaaccaatccaacactctggctttttcattccttaatttcccatttccagtgatctttacctcctcttcacttttgtaattcactctaagatattttgatcctgttttcattcagaattagtcattggtcctctctaacacttttgtgctttttcctctgctttgcttttaaattaaaatgccttcattgtttttccaatttaaaaaagcaatgcatgtttggtggaaaaacttttcagaaaatacagaaagatgtaaaaaagaaaattaaaacattgcaactcgtggatttgcactcagcatgttggtaaccttagaaacacattgctgggaatagtttttttttgtttgctttatctaaatgagatcttactatttattttacttttattatctgcttcttgcctgaacaatttgtctttccaagtgaataaatgcagatctacattgacattattatggctgaaaaacaattaattgtacagctataatattctttaacccagggtgtcttaacttcagcactattgacattttgggctgaataattctttgttgtgggaggctgtgttgtgcactgaaggatatttaatgcctccctgccctctgtatcagcactagatgccagtagctcccatccctagttatgacaatcaaaaatgtctcaagatattgccaaatgtctgctgtgggcactactgcctcaagttgagaaccactgatctaaccaatctgctgttgtttgacatttaggttttatctactttgtcacaatttaaagcagcagcacttatgaagctcctaacatatacaaactcaacacatcttcaaattacttctatagcataaatttctagcaaggaatggcacatacaaaattttgatgtctattcccagatttccctccagaaagattgtattaatttagaacaccattgaaacagcataaatgtcatttcctgagatcctgtctacttccaggtattgtcaatctttttaatcttgctttgtgataagcaaaacaaagtattactttacccttttaacttgtaattctttgattgcttaccaggttggtaacctttactatatttattagctatttgtgttactgcttttatgaactgcttattcatctcctttgctcattctttattttgtaagagcattaattccttcttccagcttgtaatttttctcataacctgatttaaacctttcttcttataacctttataaggttttctgtacagaagtcatacatttgtatgttttcaaattattagcctttttattatggttttacctttaatggtgccatacttagaaagatcacctctaggtccaggcctggtggctcacacctgtaatcccagcactctgggaggctgaggcaggcagataatttgaggccaggagttcgagaccatcctggccaacgtggtgaaaccccgtctctactaaaaatacaaaaattagccaggcgtggtggtgggcacctgtaatcccagctactcaggaggctgaggaaggagaattgcttgaacccgggaggtggaggttgcagtgagctaaaattgtgccactgcactccagcctgggcaacagagcaagactctatctcaaaaaaaaagaagaaagaaagaagatcacctctaaaatctctaaacttcagtattttactctattaggctaaccttttattttgctgttatctttcatactcttaacactaaatttttttttctctcttgaccagtgcaccttaaacttgaatgtacatatacatcatctggaaatcttattaaaatgtgtgttctgattcagtaggtttggagtggagtgacagattctacatttccaacaagctcccaggtgatgccagtgctgtccctggcctgcactctgagttactagctcctaaaccttcagcactcagtcctctgtaccccctacctccattctctgactccttcctgaagttgcctcccttcctacctagtgtgaaccccaatggcagcaatttcaactatagctcatctctgtttttccagaacaacaatcctggcaatctccattccagtattgatgaagccaccatttcttccagtctccagccacagcaccctgcaggaaatcagatagtgtccacgtacttctcttaaaaagataggatttctaaggtacatcagcaagccttcactttgttcccacccagttccctttcccattcctagagtaactttgcctaaatttaatcttctcaagctccagtccccctcctcagacctcttagtcaatgaacaacaatgaaagggaaacgtcttcaacccttccagtggaaataacatttagcatagtgactactgcacaattaaaaaaaaaaaaacctactcaaagactctacaatgtcatactaagacttccaactcttaggccaggcaaggtggctcactcatgtaatcccagcactttgggaggctgaggcagaaggatcacttgaggccaggagttcaagactagcctggccaacatggtgaaacctggtctctattaaaaatgcagaagttaggcatgtgtggtgtaaaaatacaaaagttacgtaggtgtggcgatgcgtgcctgtaatcccaggtacgttagaggctgaaacacaagaatcgcttgaacctggaaggcagaggctgcagtgagctgagattgcaccactgcactcaagcctgggcaacagagtgagactgtatctcaaaacaaacaaacaaacaaacaaacaaacaaacaataaaacaacttctctttaagaaaaaaaaaaagatggccaggcacggtggctcacgcctgtaatcccagcgatctgggaggccgaggcaggcagatcgcccgaggtcgggagttccagaccagcctggccaacatggtgaaaccccgtctctactaaaaatacaaaaattagccgggcctggtggcaggtgcctgtaatccgagctactcggtaggctgaggcaggagaattgcttgaacctgagaggaggttgcagtgagccgagatcatgccattgcactccagactgggcaacagaattgagactccatctcaaaaaataaagaaagaaataaaaaattaaaaaaaaaattccaactcttggaaaattccctttaaagagttacgaattaagctggtttatttatgtaataaacgcttcgcacagttcttacaatgtgcctgccaaccttatttaggtaggtacaattaagacttccactttacacaccagaaaataaggcacagagtcgacacagccactgagtgtcagagcaagaattggcactcatcccgtgagcgcctcagttctttttttttctttatatatactttaagttctagggcacatgtgcacaactgtggcacatatacaccacggaatactatgcagccataaaaaaggatgagttcatgtcctttgtacggacatggatgaagctggaaaccatcattctcagcaaactatcgcaagggcagagcgcctcagttcttaaaccactcttctatgctgcggcagaatcactggaagtctcagggagtcctgagtgcgcaattctaggaaaagtatctatatctgtaagaaagaaggggcagggaatctaacggttctcagctcttgaaggcacattagattcattcaaggtcctctctaaaaatacactttcttgggcctccacgagaaaaattctattcaattagtcgtgggcttgcatccgtatttttagtctgtaaaagtggaatgttatctcaaatcagtggttttcaaactttttatattctgcggaccttgacacgggcccccaataccctgacacggttacttacaatccgggagagagtgggagaaagggggagagagggaaggggagagggggaggggagagagagagaatgaatgagaatgaatcttttagagaggtagagggggttggcccgtgccacaaaccacctctcaggtttgagtgaagccttcgttctctctcgtgcagagaccatgccatccttccagaaaggagcattttaggacgttttaggacgagagacctgtaattggcctaagactcaggtgcaggtggaggaagcatcggatttacaacagtggtcctgccttcttcgatgtgacttccagttttaaattcaattctaatttacacaaatcccacccactatgtaaacttgttggaaaatgtcctgcactctgcacttcgtggcatttaaaacttccacacacgcgcgcgttctttctcgaagccccgtgattgcttagcctcgctgggcagcttggcactgctgggagcttggctcgccctgccggggccgacgccgcccgtcccgcaggagcccgcgcggggctcagggcactcaggactccgcatgcgtcccggctccaggtgggccccggcaccgccaaccgcaggaaacccgccgagccctaaacgtctcccaagcggctgcagtctgcgacagagagtgtccctcggtggagcgccctgtggctgcccaggctacagccgtggccgaggcgaggacacacttctgacctggggctccagcaaagactgtccgcgagcggcgactccatgcccgcagccctccgcccagctcagccgcccggccgcgggcaccagcagccgcgccacgaaagggcgcaccgcgcgggcgccgtctctcctaggtgcgaaggcggctgaggccccgcccgggaggcacccgcgcggctccggagtgggccggagggacgtccgggggcggggcccgggcgcgcccgccctctgaccgggctataacacccggccccgccgggcggccgcgggtgggtagaggtgcgcgcctgggacctggtgaggctgggggtgcgcggggccgggcgcagctgtggcagctgccggacggcggaggcgccaggaggaggaggagagggaggcgcgggcggctgggtcgagggcaccgaggctgcccgtgctcccggtctctggttgcacggctcactcccgaaggtgttgcttccagcttttgcctccttaggaggcagggagcgtcagtgtcgggagaccctgagaccggagtaccgagacgtagctggtgatgcccccgcctgccctcatgtgttctcaggttcttcttatttttattcatctctagaacatggacttcccgtgcctctggctagggctgttgctgcctttggtagctgcgctggatttcaactaccaccgccaggaagggatggaagcgtttttgaagactgttgcccaaaactacagttctgtcactcacttacacagtattgggaaatctgtgaaaggtagggtccgtctcgtgaacactttgccaaaccctcagtcctccctttcagtattcattaaatatgccccagcttcctgtctgctcttccacgcacctactctgagtggcacagaacaagtcaaccggtaccgtgcgtgttggttgttttctgcttttgttgggaggaatagtaggaagaactgaattttactggacttgtccattgtaattcagtgtcactgagtcctttccattattggagttcttctgtctttttggatcttgcagacattggttatttgggatgtatgttttagttccttttcaagataaactcccaagtaagtccgtttatccgtttcagttcccctttgtgtgggcttctttatatatgacttggactgttaatgtcatttcttcatgtctcttttaaactgaaataatgcagttttgttggtaagatttctgtgtcatctgtagttagccttttatttaaagttatgcaaaactatcatttctgcaagtttcttttaatctaagtagtacagttctgttggttagatttgtgtcgtgtataattagccctatggcttaaagttatgcaaaaaagtggttctatgattaaaggctgtttttaaaatgtatccatttgaagaagacaatgctagataatgaatatatattagtagtgattgaaactcttcccagcattttcatatttatcattaataatttattgttctaagttagaaactacataaagttattttcatttttatagacagcaagtttgaatcagataaattaaataatttgttcaaggtctcccagatggtgaattttatagccaggactggcacccatccggccaaggcaaataatttgatcagatatcgttatttcatctttctttctttctttctttctttcttttttttttttttttttttttggtcagagtctcgctctgttgcccaggctggagtgcagtggcgtgatctcggctcactgcaacctccggcttcctgagttcaagcaattctcctgcctcagtctcccgagtagctgggattacaggaatgcgccaccacagctggctaatttttttgtatttttagtagagatggggtttcaccatattggccaggctggtctcaaactcctgaccttgtgatcctcctgcttcggcctcccaaagtgctaggattacaggtatgagccaccgtgcccggccgagataccattattacttaatcatcttttattatcctgatgttcccaaagaggttaccagaaaacttagtccttaaatcaaaagtttcataaattttatgcaatttggatctcaactttttgtaaggtgtgttcaaactctaccttgattttagctctgaacttttgagtcaattgagagtctcataattaccatattcttcatcatttttcaaaaaaatcaaggctatggcttctatattaaagaaaaagtattatataaatgtatttatgtgcaatgcgaagtcaatatcctgggctgtgtgtaatagtaactttgtttttaaacagcattgccaaagagatggtgccagaattactctatattgctctataatccaaaattatagaggttgggtgtgtgagaaatcatatcttgaatcagcatacgtattcagccttctgaaatcatttttccctagggctagagtagagcaatttaaaaagatctaggaatactaattatattaattaaaaatatatagaacacaactagcttgagttattgttcagtcatcatttcaaccacaagatgatgaggatgttgttaattttaagtactaagtgatttggtaaggttttgtattttcaaacacaatgtgcttgtgacagttgggggctctctttcctaatatgaatcagcagttgtgatctatcctgcatgatatcaaaccacaatcacagtgaaagtcagcaggcttaattttgtttttaattttaccttgtatgcactcttgcggttaaaggcttgaggagttatcatgtaaaaataaaatctgacactagtggttaaatatttgtgttgaatatgttgttctgaataataactcggattaagaaaaatcccaaatctgccatttggctccaactggtagatgaaactgtatgccagtaactgggagtcagttgccaaagtgtcactgcacattagtgtgacaattgagagatggtgctcctttgttggtggtctttttcactagatattttccctaaccattctgccctctgatgtaagataagtttgcttagaaaacagaatttatgaccaggcccagtgactcatgcctgtaatcccagcaccttgggaggccgaggcgggaggatcacctgaggtcaggaatttgagaccagcctggccaacatggtgaaacgttgtctctactaaaaatacaaaaaattaaccagacatggtggtgtgcacctgtggttcccgctactagagaggctgagaccggagaatagcgtgaacccaggaggcagaggttgcagtgggccaagatcatgccactgcactccagcctgggtgacaagagtgaaactctatctcaaaataaaagaaaataaacagaatttattatacacgtgttatttatttatttatttatattacatgtattaacgtgggcagtcttacccagaagggaaagtaatattcctaagtaactaaatacatgtttagtttttgtaaaaacttaaatatatgtgctatgcctatgtaaatatatgcatatcacatattttctttgttgtaattgtggattatattctgcttgttttttcatttcatgttatttccttagatatttccatgaattgacaaagtcggtagatgtgaattcgttgctgtttagtattctatcctcttgattatgtgaattttcttagtcattcacctctttgagcatctgtatagtttttggttaactctgttataaacagggatactataaaaccattgatacatgtcatgataattaccttctattattattggtgatttttaaaaacgtttttattttgaaacttttaaaatccacacaaaagttaaacacatctatacccagcttcagccatagtagaccatatttcagttgagccttttgaaggaaatcccactgcctagtgacatagtaaagaaaatcttaggtgaaacaagagaagcaaaaaagtactgatgacttagttcagaaaaatcagaaaaggtacagtgttcatcagttcgttcgttcaatcctccgttcaattaaggaagcacctcccattttttgccccaacccctttgtctagaaggatgcctggcacataatcaataatctatatctatttatttaatggatcaaatatttgctgagcaaaaggcatgggaagcaaacaaacgtgtgtgtcattcattccctgccattaggtagctcattttcaaatacaaatgtatttactgtgaatttctcagggtagtctctccacacacaccccaaaattagtttaggaacattttattatttttttaaaaaatgaacccttgtgttgagggttgactatcaatagatagcaatgaaagaactgctctgctacatacaaaaccccaaagggccattttaaatgagatttcctaccatctattttaagaatcttgcattgactgggtgtggtggctcacgtctataatcccagcacttcaggagaccagcctaggcaacatgggagactccatttcttaaaaaaaaaaaaaaaaatttaattaaccaggcataatggtgcatgcctgtggtcccagctacttgggaaactgaggcaggagaatcacttgagcctgggagttcaaggctgcagtgggccatgatcgtgccaccgtactccagcctggcctacagagcaagaccctgtctcaaaaaaaaaaaaaaagtatcttgtcttgcctcctgctaagtctgatcatcattgtatctgaatacagtaggcgggataataacaccttccttactagtgataatactattagagattttttaaagccagccaaatttagtagtctctgttatcaagtactttccatgtagtaaatagtttaagacattatttcgatctcagcaactcaaagtaggccttatcctcatttacaaaacaggtaaaatgaggcacagagaggttaattaacttgctgaagataacatagctaagtattagaagattcaaactcagatctgcctatttcccaagcacctctctattctcttttaaaaagcagcttgacatttaagtctttaatccatcttgaattaatttttgtataaggtgtaaggaagggatccagtttcagctttctacatatggctagccagttttcccagcaccatttattgaatagggaatcctttccccattgcttgtttttctcaggtttgtcaaagatcagatagttgtagatatgcggcgttatttctgaggtctctgttctgttccattgatttatatctctgctttggtaccagtaccatgctgttttggttactgtagcctcgtagtatagtttgaagtcaggtagcatgatgcctccagctttgctcttttggcttaggactgacttggcaatgcgggctcttttttggttccatatgaactttaaagtagttttttccaattctgtgaagaaagtcattggtggcttgatggggatggcattgaatctataaattaccttgggcagtatggccattttcacgatattgattcttcctacccatgagcatggaattgttcttccatttgtttgtatcctcttttatttcattgagcagtggtttgtagttctccttgaagaggcccttcatgtcccttgtaagttggattcctaggtattttattctctttgaagcaattgtgaatgggagttcactcatgatttggctctctgtttgtctgttactggtgtaagacttaaacgttagacctaaaaccataaaaaccctagaagaaaacctaggcattaccattcaggacataggcacgggcaaggacttcatgtctaaaacaccaaaagcaatggcaacaaaagccaaaattgacaaatgggatctaattaaactaaagagcttctgcacagcaaaagaaactaccatcagagtgaacaggcaacctccaaaatgggagaaaattttcgcaacctactcatctgacaaagggctaatatccagaatctacaatgaactcaaacaaatttacaagaaaaaaacagacaaccccatcgagaagtgggtgaaggacatgaacagacacttctcaaaagaagacatttatgcagccaaaaaacacatgaaaaaatgctcaccatcactggccatcagagaaatgcaaatcaaaaccacaatgagataccatctcacaccagttagaatggcgatcattaaaaagtcaggaaacaacaggtgctggagaggatgtggagaaataggaacacttttacactgttggtgggactgtaaactagttcaaccattgtggaagtcagtgtggcgattcctcagggatctagaactagaaataccatttgacccagccatcccattactgggtatatacccaaaggactataaatcatgctggtataaagacacatgcacatgtatgtttattgcggcactattcacaatagcaaatacttggaaccaacccaaatgtccaacaacgatagactggattaagaaaatgtggcacatatacaccatagaatactatgcagccacaaagaatgatgagttcatgtcctttgtagggacatggatgaaattggaaatcatcattctcagtaaactatcgcaagaacaaaaaaccaaacaccacatattctcactcataggtgggaattgaacaatgagaacacattggacacaggaaggggaacatcacactctggggactgttgtggggttgggggagcggggagggatagcattaggagatatacctaatgctaaatgacgagttaatgggtgcagcacaccagcatggcacatgtatacatatgtaactaacctgcacattgtgcacatgtaccctaaaacttaaagtataataataataaaataaaataaataaataaaaataaaaagcagcttgacacagatggggatgattccatggaagttgaggtcattagtagagggttttaggaccatggtttgggcacatttgacctgaaggtatagctctaccaaggatctagagctgttcaattcagtagccattagccactaagcaattgaggagttgaaatatgactagaccaaactgaggtgtgctagaaagtgactttgaagacttaatacaaaaaaggaaaatatttcactaataatgttttatattgattacatgttgaaatgataatattttagatatgttaaataagaaatatttttttaaattaatttcaaggccaaaagcagtggctcacacctgtaatcccagcactttgggaggctgaggcaggtggatcgcccgagctcaggagtttgagacccgctggggcaacatggcaaaaccccatctctaccaaaaatacaaaaaattagctgcgcatggtggcatatgcctgtcatcccagctacttgggaggctgaggtgggaggattgcttgagcttgggaggtggaggttgcagtgaaccaagattgtaattgtgccactgcactctaacctgggtgatagggtgagacccccatctcaaaaataaataaatatataaataaaaattaatttcacctgtttctttttacattattgtaactagcagaagattaaaattatatatatgacttgcattatattttgatcggactgtgctgctatagagtgcaatttgttattattaattttttcctgcgtacaaaaggaattctagttcatttagaaaatttggatcatacaacaaagcaccaaaaagaaaattaaaatctcaccatccaaaggaaacatttagtagactgcaatcatactacacagttttgagcctttttacccccctgagtcaaatatcttattttgtttgtccatgcaaacatgttatctctaaaacttgatttttaatttctgttttgtgtcctgtcaatagatattttattgtttaacttatgccccactggtgaatatttagtttgtttctaaactttcgctgttatgatcaatgctgtagtgaacatccttgtagctaagacagcaaaaatctgagcacaggctttggaatcacctgcccaagttcaaattccggattctcagttttgtagctacgtgaccatgggtctttagaataattcctggcacatagtaagtgctatgtaaaagctgctattattattattattaatacatacccaaaaaggaaattactaagtctaaagctgttttaagtatttgatatatataccaaattgccttccaaaaagattgtgttgatttataatttcttgggaaatgcatattaagaaaaataaaacaactcttctaaaacttacactagtcataaatcaatactgtcattagtgctttgaaagatgattgtagtatgtatttctcattgttatgttgtaagtatgagggagaatttatttctcttgcccctttccctaagaactctcaccttcccatcattaacagacattcactgaattcctctactaggagtcctataccatttcagatgttcagaaatctccctaacattggttaagattcttgctcctaagaggaaagtactatgttcacatacacagatctctcatgatcacttgccctcaactggatagattttagccggtgatttaccctcagaaaacagcattgtatataaaattttggcacaacacttggtcatccgtcacactctgctcatttcccaaatatgctcgtaaaaccagtttgcttgagatcctgtataaaatgcctattgtgatgcaaatactgacatattgaggatgaatatgaagaaaaccactaaaatctaggaaattcagctataatatacatgtttgtgatttaaagttatatgggtttagtaagcctttcccctttaacataatacgcagagtacctttctgagacatttatcagctatcagccttattcttattcttgaaacattcagggtttcttaaagacattgccttttttttttttctatatggagtctcgctctgtcgcccatgctggagtgcagtgtcacaatgtcggctcactccgcctcctgggttcaagcaatgctcctgcctcaacctcctgagtagctagggttacaggcacccaccattgcgcctggctaatttttggtagagacagggttttaccatgttggccaggctggtctcgaactcctgacctcataatctgcccatctcagcctcccaaagtgctgggattacaggcgtgagccactgcgcccttcctatcacttatcttgtcatgcttacattattccccacaattttaggttttttttttttttttttttaagtagagacaggtgtctcactatgtagcccaggctggtctcgaactcctgagctcaagtgatcctcctgcctcagcctcccgtagctctaggattaaaggaatgagccactgtcccctccgcccacaattttctaatgtcctccatagggtaagatgagcttacaattatctgagcctaaaaccaaaatcttttttgtatacaaatacaaaatatttccccccaacagttttaatatatactgaacttttcagggatgccactatatgtaaattgaggggaaattatattttgttttgctcttaacgtgactgagagatatttcatattcagagaatcctgacaacagtgaacaaagagccaaaccaatctgcatttgtaatctatatgttcacggtgactctcaagtatagatacaagcatgtgatttctttgtcttctagtggagtacccaagttattgcatatggataccatatcttatgtaaattgcattctttttttatttctgctttatatagtttgaacactatattgatcttttgaaattatgtatgtaaatgtgttagaattgtatgccagcatgataaaatagaagttgcaaaatattggatatgaaagcaagaggcatcatctgatagagttaagaactattggtgtaaaagcacaaagagagctgttaaggacccacttgaagctcatgtggccagcatccaaaaggtgcttagtttctgttcttaatccctgaacgtgtgtatctgacggtaacactgtggttacagcagtatctacatttgagatgtgataactgccattagtcctgattcctcctttcagtttgtgtgtttagaacacccctttctctaagaatgcaaagtaagaaagtaagatgtaaaaaaaaaaacaaaagaaaaccttaaagtgaaattactcaaaacacacacacacacacacacacacacacacacacacacacacacacacacacactctatatcaaataccaacatgcatttgggttaagggaaggagactaagtcaaatttagtcaaatcttcctgtttggagctaggcttggtcctgtagtcccagctacttgggaggtttacacaggagaatcacttgaacccaggagtttgaggctgtactgcactatgatcgcacctgtgaacagccactgcactccagcctgggcaacacagcaagagtctgtctctttaaaacaaacaaacaacaaacaaaaaacacttctgtctagtgatttaaaacaattgacattcttcctagcaattaaatgtaatactgtatagtagtttgtgaagaggttagtaagtcctaatttgaatttgtgttaaaataaaagacacaaaatgcacattaaaaatgtttctcatctctgttttctgaggactgctgcatgtcacaggttttaaaaatacacattttctatctgtgacctttcacatacatacctttgtcaagctcaactggagggcttaatctccactgcatcaaaaaaaaaaaaaaaaaaatgctgccaacttcaaacaaattgccttggagctggcttcacagagttatcacgcacttacccggagttgaagataactaccttgacagtggggatacaaaggcagtaatgatagtgcctactaccccagtctttagtctatcacagaattcaggagaagccaattaagtaatccttctgtttgtttaaagaactttcaattagttgcttatccagtttttaaattattctgatgcaaatccgtgaaaactagaaccacacttaaaaatcacaactaaagtatcatgaattgacagttattcaaacacataactaagcctcctttcccacataatacacacgcacatatacaaatacaggcaggtgaaatttagcataacatcatgtttttagagcacgaataaatgttagagaccatttgatcattcattacgttaattgaaacttagttcaaaatgttgcttcctccaggaagcctttttctattccctgggcagagtcagaatctccttccacacctcttctcctcttgagcatcttccagtaactctatgttcacatagaggccaaggaccaggctttgttcagctttgtatcctaggcactaagatgtgcttattacatgtaacagatactctcaaggacaaagattaagagttattatgtgcttattaaatgaaacatatgaatgcaaatatattgtatgtagtatattaaataatacataagtatataggatgtacatttttaaatatacttttatattgttacatatattatatgtaactttatacacttttatatagttacctatattgtatgtaagttcttcagtccctcaagaaaatgacattgttttcttatgaactttttgttaaaattagttttatattagtagtaaataatatgataacttagagaggtagaattgggggaccacaattatgccccagttcaagataagtcactggcatgtaggagaaggcctcagagaagttacggactttcaggcagtaaaggacacagttgaattattcactggctagcctaaaatgggtctacccccaccccttgccttcagccccctaaaacactgaccaaacatgtaataagaaaagagtaattataggaggttcaccaccatcacactcacccctgccttcattaagaagtgtttaggctggttgcggtggttcacacctgtaactccagcactttgggaggctgaggcgggtggatcacttgaggccaggagtgcaagaccagcctggccaacatggtgaaaccccatctctactaaaattacaaaaattagccgggcatggtggcaggtgcctgtaattccagctacctgggaggctgaggcaggagaatcgcttgaacccgggaggtggaggttgcagtgagctgagagccgagatcacaccactgcactacagcctgggtgacagagcaagactctgtctcaaaaaaaaaaaaaaagtgtttaaataaatgcctctggctttatttgaacagtccaggaataattcaagggtctgtcacagaattttgacaaagaaaaaaggtgggagggatcatgtgaagaaggccttttttcccccaagagttaagcaggggccaggcacagtggctcaggcctgtaatcccagcactttggaaggccaaggcaggccgattgcttaaggccaggagtttgagaacagcctggccaacgtggcaaaaccccgtgtgtactaaaaaaatgcaaaaaaaaaaaaaattagccaggcatggtggtgcacacctgtaatcccagctactctggagtctgaggcgggagaatcacttgaacccaggaggtggaggttacagtgagccgagactgtgccactgtactccagcctggcccacagtgagtctctgtctaaaaaaaaaaaagaaaaagaaaaagaaaaagaaaaaaaaagcttaagcagagatatgaaacccttccattttaagtgtcttttcccccctctatactcagaaatgttgtacttattttaggtgaaggcagatgatatgtctaactattcttgctgtgagtggtccagaagggcacagttttggaaatacacagatgaactgttgaaggtagtttcaccttaatttttagtccttgttaaatatttattcccttgtccattgttggtgactcagttgagcccactcgttaaaatccttttcacggggatagtcactcttatgaaaacatagacacctagagacatgtgggaagcgtagggtcatttaacatgtggcgattctacagcagttttcccattgtttaactggagagatttatttacagcttgtgttaggctgttcttgggttgctagaaagaaatactgggtaatttataaagaaaagaggtttaattggctaagcgttctgcaggctgcacaagcgtggccccagcatctgctcagtttctagggaggcatcaggaggcttttactcatggcagaaggtgaagcaggaccaggcacgtcacatggtgaaagcagaaacaagagaaagagggggtgggaggtgccacacgcttttaaacaaccagatctcgtgagaactcactcattattgtgaggacaacaccaagccatgagagatccactcccatgacccaaacgtctcccaccaggctccacctctaacatgggggatgacatttcagcatgaaatttgggggaacaaatatctaaactattcacaccttactaataatactaaatgtgcacagttaaatttcagataaagattgttcaattggggcagacacgtaattttttccattgctctttgggactcagatgaataatcttagtgtggtagagataagcctagctggtttgtcatgtgttactgtcagttcctttcaatttatgaagaaacagaaagataaattgggaaatgtcacattctagccttgacgaactttttagttggacttggccatctttcgagttgtaagaacatgtacttctaagggtacaaaatgtgtttccaaactctatggcatacagttctagcataacaccatgtcagtcaattgcagaaacttccaaacattttttacactgagagctctttggtcaaataattcttgcttggaagtaaatcccagtctgtgtgtgccaggcactgtgttaggctagagacagagtcatgagcaaatagcatctctgctctgatgtttcttacatgtgctagtgagggaggcaaacaaaaaacaaggcgagttcagattttgatcattgctatgaagcaaatacatagtttagtataatggagagtgacagttactgtggaacataggttccatgaaagcatggagcctatcctacttgtcactgtattttcagtgcctaaaacatagcagttactgtttgagagaatgttgtatggaaagaatgacaggaggcctgcctgaaaagatggtaggttaaagtggagatctgaaaggtgacagtcagctagatcttatagcctgattacaaagtgcacaaagtgcaagtgatgtgcaaaggcctcgaggtggaaagagtagaacagaagtgagaccagggtggctggagcccagtgagcaaggggaaagtggtctttgagcaagttggaaggtacacaggggacagagcatagagtgccttctaagccaattctaaagtggagagtttgaattctgttctgagaataatgggaaaccattgaagggttttaagaagagagtgatgcaatctgatgtgggttttagaaagataactttagctgctgaatacagaaaatggccagaatagaagcagggagactaatccagttacagtagtcctggcaaatgttgatgatggtgatttggattaagatgctctgttaggaatggaggcaagtgaaaggattggaaatctgttttggaaataaaaccaagagtacttgctaatgggttgggttgggttgggttggattggattggattggattggattggattagattggattggattggaggaggaaggcgtgtgagcagaagaggaaaatcaaggatgatgcttaggttttgtgctcgactgagtgtatgaagtgttcttatgttagatggacaaaactggaagaggacagatttgggatgaaatcaagggctctgattcagacattttctttagaaattgtgaactcctcaggaggtatccagtggagacggttgggtatataagtggagctcaagagagaagtttggctgcagaaagaaagttgggagtcatcaacatagaaatggtattgaaacctgcaggactaataaaataatctagcaagagagtagagataaagaaaagaaggccagaatcgagctatagcaccgtcacacagttagtctgatagagtagaggagccaagaatggagatgggaaaagatcagtaatgaggtagaaggaaaattaagagtgatgtcacagatgtcaaaaaggggagtggctcaagaaggcagttgttttggggagtaccatgaccacctactagtgatttgctggaaggactcactcacgactcaatatagaatcatattcaaggctaagatttattacagcaaagggtatggtgcaggaacagcaggatacagatatatggtggcaaaactagagaagtcgtagtaggctttcttgtcctctctctgtagggattccacatgtttctcaggaatgcatgtttctctccagctgtaaactgcagagacatatgcaaaacgcctccacccaggaaagcccactcaagtcttaggggttcagagctggtcaagggagctggtcgtgtagctatgtaaccagccaggatgcagaccccaaactaggtactaggatgcatcaggaatcttcatgtcaactttaaacaatgatactgtcttgatatattttgaccactgccttgagggcacaaaaataacataactaattagtaagcatttcagggagtttagtgctcaggatttgggtcagggtcattgctgtgactgcaggtgttcccaaagacaagcaagaactgagtaaaacatactggctatgttaactctttcctctagaggtcatggttaatgttgaatgcaggtgaaagtcaaaactgagagccataaagttaatttctatatcccaaagtatagttagtgaaattatatttctctccagatagattcattccacttatttagtaaacatttattgaatgcctaatatagttcatggcatgtgctagcatgagactataggggtaaataagttagacatggcacctgccctgaaggagttgacaaaccaataaacgcagatgtcattagctgtgtgcgagaatatgacagaggtctcacggctgagacctgaaggataagagatcagccaggtgaaaagggaaaggcgaggcaataaatagcacgttcaaaggcctggaggtgaaggagcatattgactttgaggagcaaaagaagttcagtgtggctggaggggagaaaggagaaggtgagtgtggggtagattatggaggaccttatacaggctgttaaacacgttttgcttcatccacggggagatataatcctaagggtttttgcttgataggaaaatgacagatttgttttcttgattgaaaaatttctgataattttacagttagttttgcattgcaacagagattctctctctctctctctttttttttttttttttttgagacaagagtctcgctctgtcacccaggctggagtgcaatggtgcgatcccagctcactgcaacctccgcttcctgagttcaagcgattctcctgcctcagcccccgagtagctgggattacaggggtgtgccaccatgcccagctaatttttgtatttatagtagagatggggtttcaccatgttgtccaggttggtctcgaactcctgaccttgtgatctgcctgcctcagcctcccaaagtgctgggattacaggcatgcaccaccgtgcccagcccagagattctctttaagaaatttggtgcaacagtcatttctgggacaaaaagtagtgagaaaatacaaacacaccagggtaaataaaccagagcgccacaaaatgtaatattaagtgtgtaaaaataataatccctgagagctatcagtgtgaaaagtttttatttgaatgccgtaattgaatggaattgttcatttaaaccttcaagtgaatttatttttatgtctaaaacttattagaaatgtttcaatggtgattatatgtagtttcttttttgccttcaacagagcacagatcacacagaaaggaatgattttttttttaatcagcaattttggagacaaattctatgaatgccaacctatacagaaactgacaagcattaattattcagaatgtaaagagaaatgccagagtattaaggaacagatacctagatttaaacataattttggaatattataattattatgaattacaaccacttatatttgaggcagtatgtaacagctgtgtgcgtgagcaggaacatgagagggaacgtaacctggtctcattttctagacaagccattcaagaggagcaaagagagtgggaaaatgaaagcaatgccactactgattattgaacatctttatctgccatgcactgtgctaggccctttacacattttccttctttaagctatttaaaaactgcgataagttccttacattcccattttataggcaagagcaaatagattttacagatgaagaaattgatgtcccaaaatgatatcttggtaggtgatagattcggttcggtaacccaaatgtgtcttttagcgatttatgtattcattcaacaaatattcattgagttcctactgtctaccagaacttttgtaaggggatgcaaagaagaacagacccaggtctttccctttatgaactagggcagtgggccttacacccaactgccgtaatgggaaaagcattgtaatggggctttgttcgttacagtcaacagtgcagtgtagggatgctttgtaagctggcctacagggtgattggtaaagttgagaaaggcttatcagggaggctgacatttgaacaaaggtttggatattaccaggcagagagatggaggtggtaggaattccaggtaaagcgactgggaaaacacatgctgtgcttgggtggcaggagcagtccagggaggacatggtgggactgtgctgcaagaagccttgtatgccaaggagatgagacttcccttgtacatacagccaaggataagaatttgatgacgatttctaatgtatcttagcatctaagttcccttaatttgtgctcactggaaaccacagagttttagaaggcttttgtcattgtggtttaaaagaaaaaaatagattgttcaaagaacagtgatacatagggaaaatattttgactcaggaacgtaatttctcactaaaattggcaatatttgtagccccatgggaactatgtttccataggacattctgttcgctgtccttgggaagctatctaaaaaaagaagaaaaaaacacaataaaaagaggtatttggggatcagtaataaaagttgtatactttattgaatgtgttactgtgtactagctacttatccatattattttaaatcctgacacctattaaataataggtagtattatccctgttttacagataggaaactgaggctcagaaaaaagtgacttgcctgagactacttagctagtaaggagcagagctgggaattcaaacccaggtctgtcaggattcaaaaccccagttcttccagtctctagagcctggtctctagagcctggagacttctgtggaggtgacctaggccacttcaataggtgaggagacagaggaccgcttggggatgcattccttaaatcagagcagctgattctatgaatgccaacctaatacagaaactgacaaacattaattgttcagaatgtaaagaaaactgccagagtatgaaggaacagacatctagatttaaacataattttggaatattgtaattattattaattacaaccacttacatttgaggtagtgtgtaacagctgtgtgcatgagcaggaacttgagagggaacgtatcctggtctcattttctaggcaagccattcaagagcagcaaagagaatgggaaaatgaaagcaatgccactgccgattattgaacacctttatgtgccatgcactgtgctaggctctttacacattttcctcttttaaattatataaaaactctgtgataagtttttttaagtatacagacttttgtgctaaattggaaaacccgtactggaacctgggggtgggggcggggcagaggtcttctaatgactggccttgtgctctttaagctgcactagctatcccactttgaaaagaatgtgtgaaacacagttgcagtcatgcatactccatctccaaagaatggattcattcttcaggccatagtatactgactataattttctgtttgtaattacccagattccaagcctgtttatagcatttatacctgaggaatggaatagtgaggatttgaagaggccgcagtccttgaggttttctttgataataatatctgtgtagctgcatcaaacacaaatttgatattctgtgtatctgtagcacaggtcatgtgactgtaaattcttttgatatcttgttgcatactgaggtcaaggaactggctcttgatgtaattccccgcatcctcatgggagttgttaccatcatactctggaaaacaaatgctgagatggattaactttttacactgggtttccgcatgggattttataggaataaaggttccactaccagcagtgagtagcctgaagtctgccacattgaccaggaacctttgcaagaataaaccgaggatgtgccctctgcaggtgaatgtgctaggctctctggggttgccaaggagtttgagtccccatccttgagtccccatcaactacatctagttgatgtacacgtgatcctttgcaaaggttctgagccctctaaaactgatcaaaattgcatctgttagaaaatattaaatatattctatatatcaagccaaatactaggagcttgtgtaagcaacagagtatcttggtggatcacgtgggtgttgggttaggcaaaagatcccactgttggccctccccacacccacatccttactatgctctgggcagacagagttactccaactatctcaaaatgcccagaaacccttaaccacctctactgatttgcctgtattcaggagcctccttcttcacagctgagattcagacttcattgagggacaaggtgaatgagagggtaggggacagtagggggcagaatctggtcatcaggaactttggactttccagtgagcacagactgagatacctcaggtgctaagactgcagcacccctggaggaagactgtacactagacaacaacaaggctggttggcaggacagcatctacccagcatccttaacatccgggaggagatgatggtgccgtgtagggacacttgaccctgcccatagcagcctcagcccctgtgcatcctgggagtgaagtgatcaggtcatgcaagtaactacatcagtcctcaccactgggatcattgctacagaggggaaggcttttccctgtgtgttggagatggagatagaagtgtattaatggaggaaaacaaaataagcttttacatctgctaaattaacagaatcccaggctgccaaaaccctgaggcttgctcaatcagcagtccaaactgtatttcctctaagggacaaattatgagctgctgtaaaggtacacacagtctagtgagaaaccattcaattttgagggggaaactctagggaaatagagtaagttaaaggagtagagtgtgccagtatgagaaggcaactctcctggagtttgagttccaaaactcagtgggctcataggtcatggtgtgatcttagaagtcataagtgaccaacaaggagtttaataacgccttttcttatactccctctttttacatagcctttataccaagttatcatctggcagtcattttagatataggtttctaagttagacggtagggtccaaatgaagtgtttggcaaagtcatcttaattttttaaaacttgatatgaaaaagatggtggtatcaggtattgaaattgaggagctatcagaatagggaaaaattccccatttatgcccatactcacaaatacacaaatatttataaacaataatgatacaggcaggcatggtggctcacacctgtaatcccaccactttgggaggccaaggcaggcagatcacctgaggtcaggagttcgaccagcctggccaaaatggtgaagccccgtctctactaaaaatacaaaattagccgagtgtgttggcgcatgcctgtaatcccagctacttgggaggctgaggcaggagaattgcttgaacccaggaggtagaggttgcagtgagctgagatcgtggtattgcactccagcctaggcaacaagcgcgaaactctgtctcaaaataataataataataatacaacttatttttttccctttggggggctttccagcaaaaaccagaaagcctattagacaaattttaaaagagctgtaacactataataagactgtttaataatggttgagaacacagagcccgaagaacacagattgcctgggttcaaatcctggttctgctgttcagtggctgtgatcttgaactactgtcttaccctatctgtgcctagttcctattttgtaaaatagaaataatagttctacctcgtaggttgtcgagagggctaaataagttaataaacataaagtgctcagaatatgattggcacataagtgctatggaaatatatgctactcttactgcagttacataaattgtgatatttggcagccttgaagcgtggccctgccatatgctttgtgtttaaaaccctcaaactactgtttattgagggcatctttgatgtcaggcacagggctaggcaatgttcctgctgtatctcaatgaatctacacaacaccctatgaggtaaataccaatttacagctttagatactgacttgccagtggttaagtaacttgcccaaggccacaaagcaagtacctggtagattcaggactgaagcttcaagtctagagagcttggctccagccgcagctgcagtttgggctgaccttgttcctgccagcacactttgggacctgggccatacaagttatagcatcctggacagaccctctattttatagaaaaggaacctgaggccctaggattaaatgaattgccagaggtcactctccaaagagactctgaggtccagattaggaaacctgaactaacattgaagccgtgtctttctgtataagatccaactgcttgtggtatgtttggccaaaaagactcaggttaaagtcagataccaaataatatattgacatctagcatatttatgcccagatgccgtatagcaaatcatccttcactttaattagcttatagttatatactcgacaatgtgaatgaacagagaaaaacaaggtatttttttttcatcttctaaatttgcttgggaaattcctccgtgtcttttacaggtttaaaaatcatgtttaacgataatgtagttatcttaggaaaaagaccaacccatttttatcactctttatcattgggccatcacagatgagagctttctatcttatagaatcatttgcacaaagtatatatgaggatatacagcattgtatttgtagcatttcttataatagtaaaaaaatgaaatgatacagtcatctagttaatgccactgagttgtacacttagaatggttaaataacaaattttgttatatgtgttttgccatattttaaaaaaataatagtttaagaaactagtgacttgtatacttaaactgagtggattgtatagtatgcaaattatgtctcaataaagatattttttaaaacccatacatttatccatagagaattggtcagattatgccaaacccagtcaatggagtattttacaacctttattaaagaattaggtagatttatatgttttgacatgggaggatgtccagaatatattgtgaagtaaaaaaaaagttgatgtgcatttccatatgctgtatacacacgtctacagttttgtcttatgagtaacactcttgtaaatgtcattatgcaacttggctttttcacttatgtgtgttatgttagaggttagtacatatagagatacctcatttttttaactgtttcaaactattctgtggtataatcttatcttagtttatttagtcatttccatattgatgagtctttaggtcatttataacttttagatatttcgaagaatgctgcaataaatactgttaaacaagcacattagctccataatttcccaagataggcactactaaatcaaaaagtacatgcatttttttcctcaagtttctttctttcattgatgatgctcttcttcctcctcttcttcctcttcttcttcttcttcattattattattattattatacttttaagttctgggttacatgtgcagaatgtgcaggtttgttacataggtatacatgtgccatggtggtttgctgcacccatcaacccgtcacctacattaggtatttctcctaatgttatccctcccgtagcccccccaccccccaacaggccccagtgtgtgatgtttccctccctgtgtccatgtgttctcgttgttcaactcctacttatgagtgagaacatgcagtgtttgattttctgatattctgatagtttgctgagaatgatggtttccagcttcatccatgtccctgcaaaggacatgaactcatcctttttatggctgaatagtattccatggtgtatatgtgccacattttcttaatccagtctatcattgatggacatttgggttggttccaagtctttgctattgtgaatagtgctgcaataaacatatgtgtgcataaaaggtatatgcatttttgtgcttgatggatactgacagattaacctacaagaggatgtattatttacactcccagccccacgtgagtatgtgtatttccccacatcctaaccaacactaatttttttccattctaatgggtgaaaaaaaaaatctccattttaagttgcattttcactgagcatggtggtacacacctacagttccagagacttaggaggtcaagatgggaggattgtttgaggccagggccaggagttcaagactagcctgggcaacatagcaagatcccatctctaacgaaaatttttttaaaaactagccaggcatgatggtgcattcctgtcattccagctacccaggacaccgaggctggatgattgcttgaacccagggccatggtcccaccactgaactatagcctgggtgacagagcgagaacctatctctacttaataattagtagcatttacatgattgaaaatcagaatgaacatgttttcacattaattcaacattagataaacattgaggtactgccccagatgaacaaacacaaacccctgcccctgtggaacttctgttaaactctattggtcatttctatttcctcatgccatttgcctgtttttctatttattcatgctttgttatgtgtgtggcaaatattttcacctcttctgtggcttgtcttttgagctccattttcagtatctttggccttacagaagtttttaatttttatgagatcgtattcgtcagtccttttctttatgcttttatgttccatgcctcacttaaaaaggccctctttcccccaaggtcataaatatattctatacccttttcaatatttttatggttttagtttttatgtttagcacctaactccatctggaatctatttttgggaatcgagtggtatgtagatagatttcatgtctgacaatatatatttttgagcactcaaatttttaaaaagtatgtatgactttggtaagcagaaagagccaagaggagtttgaagagacactcagaaagtggatgtccattctgggtgggcccaggagtttgcaattttagcagatacctccagagaaaagagaaagtgatgagaaaaaaaaaaaaaaagctgtgtcctgtggagtagattcaggtcataatggctgtaggtagagacacagcagaaagagtagccccgggttggccttgtatcctggtacctacagcaccttaggaaatacataaaatacatgaaatgtcacagctttgcaagaactagaagaccagccagaatgaatcagagaagggattcttcagtgtttctacttgtaatggaatttttaatccctcatctggtacaaaaatgagtttgagataatagtccatttaaaaataacccaagccggtgtggtggcttacgcctgtattcccagtactttgggaggccgaggcaggggaatcacctgtcaggagttcatgaccagcctggccaacatggtgaaacctcgtctctactaaaaatacaaaaattagtcaggtgtggtggcgggagcctgtaatcccagctacttgggaagctgaagcaggagaatcacttaaatccgggaggcggagattgcaatgagcccagatcgtaccactgcactccagcttgggcaacagagtgagactccatctcaaaaataaataaataaataaataaataaccaacccagccctggattaatgatgaattttcattctggctagcaaaggttagcaaaagtggatgactacatgtaggcatgttaattaacactttttagattctggaaaaagaatgttgtgtggcagaaatatgggtacaaatgtgcaagccttctgtagatgattctttaaaggcaggtggagtgggagccgctgggctaacctaccccaaatcactgcacttcctttcttcccttgtcattaaaaccatatgacccctttagtgtctgtgttgcactcatgagttcagaagttccaatgcatctatcaaacacatgtgtttgcctactgtgcatgttgttctaagtgctccttcactgcttctgacaaccctatgaggtactattataagcctccttttacacatgaggaaactgaggctccagagagttaaataagttgcccatagtcccacaggcagtggtggcattgggatttggactcaagttgtctagctccaggttcgcagaatcaccctaataatgtgccctccaaattggctatttcagcaactgcagtgttcaggaaagaattatactctgatgagccttcatgaggcagggttgaaaaacctgtgtcaggaaaagatatgacaccttactggttatcagaccatgctagaaggagcctctttaaaatcgaacaacagagccactgctctggtgcaagcagcactctcacccagccctctgacctcagtcacagtgtgagctctatagttcctggcaaactttagccatggggtcaaaaatggagaagcgtgccttcaggtataagatgtgatgtgttcatgcagggattagctctgtttaggcttaattctggaagccagggttcttaatttggttcccattccctgacggaatactatgcagtcctgataatgaatgatttacatttatacaacagtatgcatggatgcaccacaggggacagtgcctggaaataggcacaagggtgctttgaggctgctgtctacacaaatgtgtgtttagtttatgaaaatccacagtggcgcctgtaatcccagcactttgggaggctgaggcgggcggatcatttgaagtcaggagttcaagaccagcttggtgaaaacccgtctctactaaaaatacaaaacaattagccaggtgtgatggcggatacctgtaatcccaggtactcgggaggctgaggcatgagaatcacttgaacccaggaggcagaggctgcggtgaaccaagatcgtgccactacactccagcctgggtgacagagtgagactttgtctctcaaaaaaaaaacaaaatctacagtgagctcttcagcatatagctttctctgcatattgtattccatgtattcattgtactggattcaatgtacagtattctatgtatattgttatttcactgaagagttttttcttaatggcgtgaattagagtcagctgaggtatttgtgaaaaatgcagactcctgaactcacgcctcaagattcctgttctggatggggcccaggagtttgcagttttttacaaatacctcaggtaattctgctgcaggtcatctgaagatatacctgtaagaacatagcaaagctgcagacctggtctgctgttgatgtgcttaatactgggcatcaataggactctataagtagagcaaaagaatgacttgagaatgactaggctcacacattgggatggtaggaaaacagcctggtgcactgcaagggtaacaccatcttgaagcgaaaccaccacgatgaccgatgcttgagtcctgcatgccaaggtgttcttgcagcaaggccaagaaacaatgcctgtagcacagataacccctcataaacatgcttatctgacttccccagtggtcaccagtgttccccaggaggatctgagacatgaccagctgtctttactctaaacacttgctatataaaggatcatttctggtgggtggacacagggactcactttctggagcagcccaagacatcgcttctatttgtaagtccctattaaatattttttctgaagaactggatttatcagcctctttcttaagcctcttagttccctctgcctttgtgggtaggtttgcgtagacctactcaccaagaaacaaggctatatcttacatgtatccatgattttttttaatgcacaaaaatgtaaaaagactatataaaatacctacaacaagatttctgttggccaggtacagtggctcatgcttggaatcctagcattttgggagggtgaggcgagtggatcacttgagcccaggagttcaagaccagcctgggcaacatagcaagaccctgtctttacaaaaagtacaaaaattagctgggtatggtggtatgtgcctgcagtcccagctactcaggaggctgatgtgggaggattctttgagcccaggaggtggaggcagtggtgagctgagatcacaccactgcactatagtctgggtgacagagtgagaccctgtttaaaaaaagagagagagagagaaaaaaaaagatttctctgaatccttctcatgcgtatcatgagagatgttttaaaatgtttctatattttggccgggtatggtagttcacgcctgtaatcctagcaccttgggaggctgaggcgggtggatcacctgaggtcaggagttcaagaccagcctggccaacatggtgaaacccccatctctactaaaaatgcaaacattagccaggcgtggtggtgcatgcatgtaattccagctactcgggaggctgaggcaggagaattgcttgaatccgggaggtggaggttgcagtgagccgagatcacaccattgcactccagcgtgagcgacaagaatgaaactccatccccccaaaaaaaccacttttctgtattttaatgcacagtttaaaaatgccagacctggctctattctacttaggtttctgttcattagataggagtcattcatgtatgactgaatcactatgaggatcctcctctctctcttcttccccttccacccacatgccaggctgtggttcagactgccttctgctttctcacgggtctctgttgtgtgatcttgtgcccacctctctgtgtgttaaatggagagagtggcttgaacagtaccctcatggttggtcttcaagagctcatctaattctgaatggtagttgggcatgtctgaaggtattagcaattctgttgctcagcattgctgatgtattgagcaatgtgaaaaccttggcgaatcttgttgccatcttcccctaagaatctgcctcatcctgaagcccaaccatttgactctgtggtaaaatgaagtaacttcagtaaggtccatgtctaccaatttcttaatctcatttgaggtaaatagatgcacattatcagaaaggactggccactatgtactgcaaatgatgggcacagagttgtgattgtcccagcagacttgagatgagctagggatacatcagtccattatgagacggtatctgttatagtcaagagtgtctctggaatggcttcttgtaattatttggactttctaccaaggtttctgtgccatagcctatggaaaagtagattcctttcaagagacctgacttgccaagcatggtggttcacacctgtaatcccagtgctttcaggggccaaggcggtgggatcacttgaaaccaggagtttaggaccagcctgggcaacaaagtgagacccccatctctacaaaacattagccaggtatagtggcgcatgcctgtggtcccagctacatgggagggcaaggcgggaggatcacctgagcccaggagttccaggctgcagtgagccacgttcacaccactgcattccagcctgggcaacagagcaagacccagtcaaaagaaagaaagaaagaaagaaagaatgagagaaagggagggagggaagaagggagggagggacggagggacggacggcgggacggacagagggaaggagagacagagggagggaggcctgacttgtatatttatgtgcacgaaatccgttctaggcctctgaatatggcacctggcccactctttcttgagaacagtttgccagtgagcaatgtgcctcatgtcctttgtgaaactggcagagcataaattattaatttaaaatacacaaactaagatcaagataagatgtgctttaatgaacgggtaaactcaaatggcttattaacaccttcatttcctcatgctgcttctgaaatgggcatttctcaacttacattttaaggtaggagctgatctgagatgcaagttaattatacagtttgtcgaagccaaagagttgggtttgggagattttctgacctgaaaatgttcagtggcggtgcccatgtaatcttgggcctactctgacagacagttcagagccttaacattcagtgttggtcctttggatatattgaacataagctacagtttacgggtatgagaggacattattgactgagacttcaatagttccaaagggggaaaaaaagagaaagatggcttttttaaagctactgtcttcagctcaggaaaaaacatgtgatcagccgactgtaaatgcacagcttgagaaatttagcaattcccaaaataggttcaagtttctttgtgagcatgtaggcctacttgcaggtaacattgactttgttaacaacgtttgttaacaataacattgtaggcagttaatgtctcagagctcttatagatacaaaagaaaataaacttacaacttccagaaagcatcttctcattgatgagtctaaataatgctcatctattggagaagcaacttgttaatagtgactttttgtcacttttgtagagtggggagagggacatgggagatgaagctcttactttatttgggaagtgagatgtctcaagttctttattctaaaaaaggtaaacatcagttgcctctgaggtagtaatagaagaaggtctgttttactttggaggaacattaaccttagagtaaaacaaacgaaaacacagttcaaagcccaggctgtctgagcccatctcgtcatttgtaaaatgaggataataatacctgccttacttatctcatggtgtttctgttgaggattaaatgataaagcactttggaaattatgtaaaatatctgtattttaagcaggtatgatttcccgaaatccttgagtttttcctctgattccatgattatgacatcacttaaatatgccacccctctgctatcctaataccccaaatctcagtgaaacactggaaaagtccgaaaccaatagagatttctaaagcagatccccttattatgcccctcaattagtgatcattgttagtgggtctgctcagagcatcattgccaagtgctttgataagctgaagaaatctgttgataatttcttgaggcatggtatttcagtgtgtggaatacttgggtactagttcttgggagttttttaaagtaaaatacttatatttgtgttgactttgcaacagcaggtacagcaaatttcacatggtaccttgctacagaaattaattagtaccactcatggtttaaattatgtagaatgatagtatgctcatattcttcttggctgtcttaaaaatgaatagaaacaaaaaggtaaacaaagctcatatttacctctccttggaaagaggttgagtgattgtcatgtagcttctcatttatcaagtatgtgttatgatttcgttaaaggataaattgaaaggattcttaaagcaacaaaggtttggtcctgcattgatgcatattaagtaaagtagagctcctcagttggcattcccaggctgggtgacacagaggtgcctctttctgatactctccttcccagctcctgtgccatcccctcccctctccccttctctctcctctctccccttcttctcctgtaatacttctgctacttgctctgttctacccagagactgaaggaagtgagtggtgatctaattgagactgaataagtccgaacatttattttccttccccttcactccatccaaagtccaatcctgaggaagacatggaggttatgattaaacttgcccaacactcaaactttactgactgcttattcttatgttaatcacttggcctttgctagattaatgactgagtgaccagaagtctcaatgatcccataaatcgtatgattttaaactatttgtgtagcttttgctagttgtaataaaaattttcacatgattttttttccaaatagagaggtttaataaagctaatgtgcttgaccaggttttggagagtttacatactaatttcttaacccctttctaatatggttagtatagctctgtgttttcatcagagagaagcagactgtgaattcctcaccttggggcttccattctccctccaggtggcctcacctttcaggtgaacaacctgacctctctggctcctaaatcccacccttacaagccgcaggagccggtgcatgggggcatagtttcttacctttacctttttcaaacctttccctcctcaccagcttttttttaagactttattttcttagagcagttttagagcaaatttgctgtacctactgtggcaaagtcaatacaaatataaatatttacttaaaacccaagaaccagtacccaaaagcaaaattatctaaagcaaaattgagaggaaggtacagagatttcccacataccccttgtccctatccccacacgcgcatagcctctcccatgatcaatatcccccaccagagtggtacatttgttacaactaataaacctacactgaagtaggggtttggacaaatgtataatgacattgtagtatcatacagaggagtttcactgccctaaataccctatgtgccatcttttcatccttccctcctcactagcctttggcaaccactgatctttttattgtctccataatttcgcctgtttcaaaatgtcatatgcttggactcatatagtatagccttttcagattggcttcttttacttagtaatatgcatttaagtttcctccatgtatcttcatggcttgatagatcatttcttttcaacactgactcgtattccattgtctgagtgtaccacaggttatttatcccctcacctactgaaggacctcttggttcctttcaagttttggcaatgataaataaaaatgtaaatagctgtataatttttatatggacgtaagttttcagtttattttgttaaataacaaggagcttgtttgctggatcatatggcaagagtaggtttagttttgtaagacacttgcaaactgctttccaaattggccattttgcattcccaccagcaatgaatgagagttcctgttgctccacatcctcgccagtatttggtgttgtcagtgttctgaatttttgccattctaataggaatgcattgatatctcattgttgttttaatttgcctttccctgatgacatatgatgtgacatatgatgacatcttttcatatgcttatttgccctctgtttatcttctttggtgaaatgcctgctgtttccatcttttgtccattttttaattgagttgtttattttcttattgttgggttttcagaattctttctgtattttggataactctttcatcagacatgtcttttgcaaacattttctccaagtctgtggcttaccttttcattctcttgatccctccagctttttatttagaaaattttcagtcctatagaaaaaaatacaaaaatagtaaaataagcactcacacattattcatatacatccaccagttgttaatattttgccacatttgctttatctctctcatgagctccatctgttgattttactgaaccattagaagtgataaatggcatgtcacatcatcccaaaaaacaccaatatgcatctcctaagcatgacttcttactgcctaatcatgacacatcattattaaactaaaaataataactcagtaatatccaacaacatactgcatttttaaagttctccagtagttcccagaatcaaatcaagcaaggctcacccatcgtctacagtctcacaatctaggacagttcccctgcctttttttggcattgaccgattcatattgaaccaattttatgtcattggttgattcctaatgaaccatttccttgtctacaagctcttggcttgccctcttacagtgatgagttggagtctctccatgacagcaccagactggaaattcttaacatgctttccaggctcattaacattgagatagtcaaaatctacacgatgtcctcaataattttgagaacaggccatgaaagaaaatgttgtgaaaaatgtgtttatggttaatgattcaacacagttaacagaggtgacttggctttctgccctgccctcatggcaacatgcggcttcccagttcagcactgtcctctgctgttagggcctgggaattctgaatgagattcagtccttggagttgaaaaagtaatttacctgatgcttggtggtgtgaatgtttgtgacagtttttgtgctaatacattttgaaggacatgttctctcaaaatagccccttccactttctgaatccacactccagttttctttttaacttcagtgagtggtagtctatttgacctgatgtgcagatcttctggcacatacatttctgctgtctcttggcataacaaattggcagtctatccctatgttatgtacactgtttatattgaaaatttgtctttaattggtctgatactacatcatctgctagggccagtagtttgtcatcagccaatttgtacacctgaggccctcaaacaaacacgtgcttacaatgtttctggcactatttttaaagcttgtaagaattaaatgagatagcacaacaaccccatgagggtaagtaccgttaatcccataatatggatgaggaaactgattcatttagagggattaagcaatttgcccaataccacatggctagtaagtgacagagctgggttttagctctgacactttgattctggaacctgcacatttcatcattatgtcagatgccctgaagaggatactgtatatcatctcatctcacatgctgtgttcaggcaggtgacgtgctgctcaatgctggttttgatgtctttactaaactactgatctatttttgagatttaaatctcaaaacagtgatactagtgagaagtagtccacctttgttaatccaccaaatgttccggttagggaacctaattttggtaacttcaaggcctctcctgctattgggagctaagcatccttcactctggactctcacttgcttcactttagaatgagagctttttagggtaaaactcaggaagtaggatgactgaaagaaaagcctttcttctccacagtagcttatggggaaactagtaaattaattgccattattccttgccactaaaggatgagttcttatggtagcaataaatagacaatagggctgtgcagacctccaacaaactgtcttttctggggtcaaaaggggtctgaattaacctcttcttaaattacagctctgtgacacctgcaggcactcataacaaataagaacaccaggccaggcacagtggctcatgcccgtaatcctaacatcttgggaggctgaggtgggtggattgcttgagctcaggatttcaagaccagcctagacagcatggcaaaaccccatctctacaaaaaaaaaaaaaaaatacacaaattagccaggcgtagtggtccatgcttgtagtcccagatactcaggaggctgaggtggctgacttgagccctgggaggtcaaggctatagtgagccatgattgcaccactgcattcctgcctggctgacggagtgagaccaatagggcagcaagaaacaaaacctcaacactgaaccggaatgtccatgacatactgtaaaaaaagaaacctcaaatggacaataactgtatagtgctagttgtaatgattgtgcctttttttttttttttttttgaaacggagtctcgctctgtcacccagactggagtgcaatggcacgatctccactcactgcaacctctgcttcccgggttcaagcgattctcctgcccaagcctcctgagtagctgggattacaggcacacaccaccacgcccggctaattttttgtaactttagtagagacgaggtttccccatattggccaggctgctctggaactcctgaccttgtgatctgcccaccttggccaagaaatctctttaagtattcatttgtactttaaggtaatgctcgatctcgctcttagtacagctgaattgtccttcaaaaagatgatctggttatgtttgacctcttcctcaagggaccaaaaagggaagttctcagctttttatagtatgaggtccctagaggttttcactttggggatttaaaaacaagtttcctgtagctatatggaggaaaaaaaaaaaaaaacctaaaggggaacatggaagaattataatgattggggcatgataattatgtccagtttttaaaactccattcttaaaaatgtcttataatttataggttaaaaatttaaatgtttagaggaagcaggacaggtttatgagtctctgacctgggaatggagtgggaggaatagagaaggtggggttgcaagaggagaaaggcagaggaatttcctaccgtcttcctgttttttgttgatggttagtgattaatgagacaagctgttctgtttctctgggagtcttgactgtcttgaagaaaaaaaagaaaatttattgcaacccaatgcagcttcagatttttcctctatttttttttttcaattaaaaacgtaactgtccctaatttaggaactgaaattcccaaacctccccattcacctattcaggaagaaatgaaatggaacctaacatctacatttcttgggtataatatcaaaactttaatactatggggatgaacatgtaagcaaatgcaactctatctccccataatgttggaagaatctaacttgaaaccagacatttggtttggatcttggcactttcttgcatggaaatattccaagaaggtgcattgactcttgatttgatctagaaaactgggttctttccagagcccacccaggatggcacctcatagactaactatggacttttccatcaatactggaaaacagtttcatctaatccccggaccaaaggtgactcggactccaagtgagcttcctcaggtttgtttgttaatttatccaatcatccattcactcagcaaacatttatcaatcatttgctatgtatatgccagacactacaccagattttgcaagcacagagatacaaaatcccttgcttgcaggaaaacctttggtttcaataaatgataggagaggggttgcaggggtactatctatgaaagttcaaaggaagcatctaacttagggtggtaggggatggggctgagcagaaggatcaggaaggtgttggatggcaggaggcttttagctgagccttgaaaaggcaaggggaggttggccgctttgatggggtgggctaaggactatccatgcagaagaaagagcaggtattaaaggtgtcaaggcagggagttacctcctttgggaactacacataaagaagaatggctagggcctggtgtatgggattggggtgggaaacccaaggcaggaagaagacagatcccaagaggtctggtgtgcatgctgaggggatcaggtgccatctcaatgccatggggagtcattgaaggaaaagcagttagagccatgggatccagttcacatatgatcaatcacccaaacaaaggaaagtttactcaacaacatgttttcatttggacttcattttgtcaaagcatgaaagtgatgtcagaaatagaaatgagtgtattcatggcacaccaccacacccagctaatttttgtactttttgcagagaactcctgacctcaaatgatccacctgcctcggcctcccaaagtgctgggattacaggcgtgagccactgtgtctggcctaaaacacattttctaagatttctttacttctgggccacctccacaaaattttatggttctgggaacccctatctgaaaaagcacaggtatcagcaataagtataatgaacactcactagagggaaagtcattttggtttgggttggttatggaagcagtgtcatatgaaaagggctggactgtactgcagaaatagaagacccacaaattgctatggcttataacagaaaaataaagatttagatgtcactcatatgtccattattgaacagttgtgactctgctccctgtcaccttccctccaggaccgaagctgacagagcaccctctatccaatcattgcctgtcttatgtcagagggaaaggagatggcaaatcatgcatcagcccttaaagctctgcccagaagtggtacattaccatttctgcccacatttcactggccagagcaggtcacatgatatgcctgagttcattagggcaccagatgttgggcaaccaataatacaacccaccactgaggtctttactaagaagatgacctgggccttagggaatggccatgatttacctggtagacacagcaggggagcaaaaggaaaatatgacaatatttttatgaaatcaagacttggccacatgaaacttttttttttttttttttttttgagactgagtctcgctctgtcacccaggctggagtgcagcggtgcgatctcggcttactgcaacctccacttcccaggttcaagtgattctcatgcctcagcctcccaagtagctgggattacacgcaccaccatgcccagctaatttttgtatttttagtggtgacagtttcactgtgttagccaggctggtctcaaactcctgaccacaagtgatctgccctcctcagtcttccaaagtgctgggattacaggcatgagccaccacacctggccgtgacacccttagaaaactaacttcaaggcagaatgcttcacagtgacaaatcttaggatgccactttatagaaatattctgaagagagaaaaacccaggtgagtcagagcagcctggggaaacttcttagaaccaggattttgtggaattcagaggattttaaaaggcagaaaatccaatgaagccattttaagctaaaacaatgtaaataaggtggggctgtgcctagggtactagggtgcagaaaggaacctgcctcctgtgggcgcatttgtgttagcaggtagtgggaaattcgggtggagggcaggtgatggaggaccctgaacaccgagggaagactctggatgttatgtgccaatatttatcaagaaaacgcagtcctggagatacaccaataatttttgaaatgttacagtagatactaattgaaacctacagtgcgccaggcaccgttaggttagcagtgaacaaaaccagcaacctaaacaaaatggtgaacacaccaggcagtgcccttgtgggttacattttggtgagacagatagtatatagataaacaaatatacaatctcaaagagtgaaaaagttgtgaagaaagatgacacaggattagagagtgactagggtgtatatggtggcagtggtggtggtggtgcagccaaggggtggggtggaggacaagacagctgtgaagactggtgagcatgaggtagtccctggtaacaaccagcgctccacaccctaccctcagagtgccattgcagggttagcatactccactgagtaaagcttccttgtccaggcaatcagttagaagagccaggaatgctgggcccaaagaggttggccagagagaaaagtgcaggggacatggttcccagatccacgcagaacccctggggaccactgagttccacaacctcaacaaggcccagggttatactaacacagcaggtggcctcattttagaccccacaccagaatctgtgcaacgggaaattccagtgcagcagaagttggagtcaaatgcctgcctatttctcattccattttgggaagcctaaacagggaagccttctgtgttcctctcattcccatattaaactgaactgcaaaactcatggctctaagtagactttagaattgacctaggcagaagaaatagcccagccccttcattacttcagagcagaatagagcacttactcttatcacagcagcacaagacccctgggacacctgactccctgagacccttccttgacaggttcccctgtccataaacaaagtcaggaattcccagcccactacacagaatatgacagttaagcttcattgggatcctgtggctgacctggggcaggctagagggcatcacatctgtacaggctctcagctttgcgagttcagaaacagactgggtgttcatgtggactggcccaaacctgaaactctacagaaatcgcagtgcatgccaggtggtttgccatgaaaaaaggtgtgtgtcccagagacagggtgtgtatggtacaaatggattttgtccacgtctttccttcccttgccagtccagccaccctactgtctttttttttttttgtcagtttttgtttttttttaatttaagttctgggatacgtgtgcagagcatgcaggttcgttacataggtatacatgtgccatggtggtttgctgcaccttatcaacctgtcatctaggttttaagccctgcatgcattaggtatttgtcctaatgctctccctccccttgcccccaaccctccaacaggcccaggtgtgtgatgttcccctccctgtgtccatgtgttctcattgttgaactcccacttatgagtgagaacgtgcttaccctactttcttttcggtttgtttttttgtttgttttgagacgagttttgcttttgttgcccaggctgaagtgcaatggtgcaacctccgcctcctgggttcaagggattcttcagcctcagcctcccgaatagctgggattacaggcatgtaccaccacgcccagctaattttgtatttttagtagagacagggtttcgcgatgttaggcaggctggtctcaaactcccaacctcaggtgatccgcctgccttggcctcccaaagtgctgggattacaggtgtgagccaccacgcccggcctacctaccctactttcttagcctatttgctgactagcattcaaactgagtgcagggagaacacctagcagcctgatcccagaagtgcagctactccacattccacagctctggggcagagtgactaaggctcacctgtagtccttaaatggagagcaatttgggatgtaccagctaatcaaataaaaccaaggcagcaaacaatagccatcacttctcaaaccatcctcattgtgcccctcgactccctccttccatttccagttctccccagaggggagacagacaataacctcaacaacagaagccagtacacagcaagcttgcttcacacgttcacgtttcttttgtttttctttgatgttttttctttgatgttttccattttccatctctgaggtgattagcagtacagcatagtggttaagaacagagcagggactccacggatagactacccagtcttgtcctttgttacagtggttcttaagctttcaggtgactgggaatcacctggagagcttattaaaacgtagatttccagccgcgtgaagtggctcacgcctgtaatcccagcactttgggaggccaaggtgggcagatcacttgaggtcaggagttcgagaccagcctggccaacatggctaaaccccatctctactaaaaatacaaacatgagttggccgtggtggcacacatctgtagtcccagctactctggagactgagacatgagagtcgtttgaacccaggaagtggaggctgcagtgagccgcgattactctaatgcactccagcctgggggacaaaacaacaaagcgagactctgcctcaaaaaaaaacccaaaaaaacaaaacaacacagattactgctccccaaccccagagtttctcattcagcacatccaggatggaacacaaggatgtgcagttctaactagttcccaggtgatactgatactcttggtaccatgaccacactttgagaacctctgccttatgaagtttccaaagactgttgacttgtgtgtgaaaggataaccctatacctaccacttgtggctattagggttaaatgagtgaatatacgtaaaatgctttgagctgtgaataataaaatgcaagcatagctagtctggaaacttcgcccatgccttttgtctctgttttgtttgttaacctccatttgttttgtttgtaataaaccacttagccaggtacctcttcctctccttcaaatacagagggcgtgtgaactttggagaatgagtgtttaaactgacctaaataatatgtgattttcaactcttctgtggattcactcattattcaatgtgggctttgcgtgccatatgtgataaacttcttgtgtgtggggtatagtgggaatgtgcatacgtgaaattgatgtcagatctttggatcgttgttagggaagataaaaggaactcacactacagtgcagccttgccagtagggctgttattcccacttacgtggaagaaactgaaactcagttcattgaggaaactctctcaagcttggacttaggtcagaggtgacttgtaaggatacacacagagaaacatccaagcctgggaaaccagctgatctattactctgtgtaccagaactttatgtatcagaccaaacacacaacaagcctcacgaaaaactggaatgtgcttcacatcactgcagctttgtcccaatgactgggccacccaaggtctctgcttctccctaggcatgtcccattgagactctccacatagagatagtctgatggagttgtgacattaacacccaatgtggaatgtcccggtggggtggcctcggattcagttgtcttgttctgtaatcagtcatagccaggaagaaagcccagtcttgctccaggagcaaaccgtagcagcatgctgctgaaagaactgcctggggactttttccccagagtggggttggctttggcctgtctagtactttcagggacattgaggcagccttagatcctcagaagagcacagatctttggaatcagacagacttggatttgaaccctgtttctgccacttaagtttcctcaactatgcattgtggctatcacacacctcacaggtgtgaagatcaaataacataaagtgcttagcagagtgcctggcacatagtatctgcacttaatgaatgatagggtttggtttttttttttttaaattaaaaaaactggaaagatggaaaggtgaaaataattactcagctttatcatcctatcatttagcctcttatccctgacagtgtgccattttcaatcctgtagggatgcattcattattattaattttttaagagacaggtcttgctgtgtcccaggctggagtgcagtggcacaatcataattcactgtaacctcaaactcctgggatcaagggatccttgcacctcagtctcctgagtgtaaggttcttgtattggttggaaccctgagagcgcgccaacagaaaacacgaggcggtgtgaagcaacatgctgttttaatgagcacctgggtacaggcaggctgaagcctaaaatggcatcagccccaagtgaggacagggcagaggttttatagtctcttgtaaacaggaagtgtcctagtctgacgtaactgctatgttgtacccaggtggcctgtttctcgatcaggggtacatgtcttcgtccagggtaggtgtcttcctgccggctctcttcctgcttctgctatcttgctgacacacgctgctgacacaagtggacttgcgccttgggactgggcctgagaagggaggagttattcatctccttaagctttcaggccccggggagaatcttataccgcgtagctaggattacagacacatgccaccacacccagctaatttttaaagtttttgtagagatggcatcacactgtgttgcccaagctggtctcaaactcctggcctcaagtaatcctcccacctcagcctcccaaagtgctgggattacaggcatgagccaccacacctggcctcatccattatttaatttaaggctttatatgctacgaagctataggtttttaatagaaagtctgttttacatggttgtaattatataattttgcattctttttccatactataaaatattttaatgttataaattctgtacgtaattttagtgaacatgctataatttacataaaattccttatcattggacacctaacaatagagaattgattgaataaatggtagtgcattcatataataaaatattaatcagccatttaaaaaggtggattagaagtatacttcttaacatataaacatgttcacgattatgtataaaatgaaatgagtgtacctaaatatcaactacctctcaagtctgtctggacattttcctacctcagtctcagcaactttcaaactttaatgagcctcccaatcaccaaaggaacttgttaaatgccagtttcacgctttaccccaagagtttgactgagactggggctcaggaattggcacttttacaaggatcccaggtgcctctgatgtgggaaagacacctcacctatttctgcctgttgaagctatacttaattttccaagcttctccttcttctttctcctgaagtcctgtagtattttgtagcacttgtctgctttcttgtcttagagatcttagcaaatgcttctaaattgtaaaacttttcctgatcctccaaccaaacctagttatgcacccatgtcacagccccagaatttgtgttaaaccctgtgtgagttgctgaatataaatactgaaatctctggaatccaaacttcatttactttgtggtggagagagagtggctgagtacttcagaactctttagaacacctgttatagcaggaacttttgggaataaaggtggtctttctaaccttgatttaaaacaaaaacaaaaacaaaaccttgtttagattacttttacttacctgacagtcaggttgtgaaaagtaaatagtttgtcctttgtgcatttgctctggtctaggccagagatagccagtaagctggagagggcagttaaaacccttcaagaggcctgtcattccaaagaatagttttcttcaggtctgttggttggttttcattctcagactgtgtcactgaggttgttcaaggtaagattcttatcttgcagttcacttagggaccacttatgctaaaattgagactgagttactcatcaaagtacttcttcacttagatttttatcagtgtgatttccctccttctttaaataatattggatatccatatcaagtcaggtttatgtcatcttacattatcttttatgtaataggccagcttgcagatgcatagttataaataactattgataaatattatattgagatgacactgaaattttgtccttgcttgtaagagaactagatcatattctgtataattagttaacacaaaagaattcctcagaaacaaactttaaaagccaggtataacagctcactcatgaaaagttccttgtttcatatgaaaatggtaactttgtagaagtaaagctccagacaacaaagaattgacagggttggggaatggaaggttaatgaaattggttaatcaaatgcttctgatggggaatcaccacatgtagtgtacttgtccacatggcaaactcggaatcactcttcagaaccttgtgtagaggcatcatctataaaaccctgcatctgtaaggctttttcatcagccccctccttggaaaaaatttctttttttattctatgcccacaacagtacactacacacacatctatcatatgtcacactctagtatatgcttgtgtgttactattatccaatagatcagaaattcattgggcatagagcatgtggcttatttgtgcaatctgacccaggttcagtgcctggatatagtagtattcattaaatagatgtatgaataagaattctgcactgaacagggtacataaatcatataaactgcattttgtgggtgttttctgagaactcctgcagttaaatttaaagcatcaccttatgacaaatttccataaaatattgttataataaattatgaataaatgttgaaaataacaagcccagtatctgctgttccctgagtccctgatggcaactgcatgctccccagtctgtgggactcctgatttaaagagctagatctgaacttctgcagaaacctgctcaacatttgcccattggttgctgtgaaattcctctcctgggctcttaaattccacagaggcttaattattacagatatttaaactttgtacatacatgacggatatcaaacatacccacatctctaaggtaaactgtattaaaagtgccagacaattttaaaattgaaagggacttcgtcatttttactggttaggaaaccaagcctcttaagagacaagcagtttttgttagtgggaggagcactagaattgaagtcaaatagaccagagttcagttcttggctcaggggctcaaatcacagcctctgatcggcagtgtgatcataagccctttacttaatatttttgaagatcagttttttcatttgtaaagtttggttaataatccgtctcagtgggtcacaacaagggattacttgagattacctgagccagagcagcacacataatatctgcacaaagcaaatcctcagtgagcttttgtctctgccctttcttgcccagatcacacagagctaagacttagacgctttctttgggttgtggttcccagttcacctgacaggactcacacatatcaaggatgctcccaaggggctgtgtcacatcagcatttaaatacagaattcaggatctcctgctttaaaaacaatctcccttctgagttactctttttaaattttatttatttatttatttatttttgagacggagtctcgctctgtcgccagggctggaatgcagtggcgcgatcttggctcactgcaagctccgcctccggggttcacaccattctcctgcctcagcctcccgagtagctgggactacaggcgcccgccaccacgcccggctaattttttgtatatttagtagagacgggatttcactgtgttagccaggatggtctcgatctcctgacctcgtgatctgcccgcctcggcctcctagagtgctgggattacaggcgtgagccaccgtgcctggccctgagttacttttattgctgttgtttttttttctttccttgtactgcgagttatgacaccctcccagtcaaccatcaactataatttaactttatataattgtgtgaattagcaagatcctaggaggctccaggatctcaaaggctccaggatctcagggtaatgtatatacacattttagaagagtaagatctacatcgcctaataagtcttcagcttttaaaaatcacattctaaaataataagtgaaatatttgtgctgaattgaaagggtttccataaattctgacggtaaacgatgagtgttttaagcatggagatgttagtcatacaaacttaagtcaccatgaaacaggcgatcaagtgggggaagcagcatcctgtttcctagtcttaccagagttcatttgtcattttaagagacaacttacttttccatcttttcttcttttcctgtaaaggtagaaacctgtgggttcttgttgtggggcggtttccaaaggaacacagaattgggattccagagttcaaatacgtggcaaatatgcatggagatgaggtacgtatgtggcttgaatttctgaaatgtcaccagagaagcttcccctagggtctcttgagctctgtataaatgctaccgaggaagcctggagaagtctccagcatgcattgtacaaagaagcaaggcccagagaggtcttcctgtgaggcctgtgggaggttaaggaatcagggtccaacaaccaccacagctgtatggttgtgtacccagcaccctgtcagagtagctggagcttgttttgtgtttggggccggaagaacaacagttccccagccctgaacttctgccagccaatccctgcatctcctttctgggttaagttttcccacctcctggtcagcatgaaggtgacccagcaaaggagctgtattgtatccgaacccacaaccatcagaaactcccaaatagctacccaaattcctgagatctggcttttcaaatgcttttgttactctctcttaaatctaacactcattgtcttcagtgctccagtttagacaatcacacttatgattctctcctactcaccattcaacaaacacttggctgggtgcagtggctcacacctataatcccagcaatttgggaggccaaggcaggtagatcacttgaggtcagtagttcaagaccagcctggccaacatggtgaaaccttgtctctactaaaaatgcaaaaaattagccaggtgtggtggcgcatacctgtaatctcagctagtcgggaggctgaggcaggagaattgcttgaacccaggaggtggaggctgcagtgagccaagatcgtgccactgctctccagcctaggcgacacagtgagactccatctaaaaaaacaaaacaaaacacaattttaaattccttaataatatcttgcctcttttccaacttagcagggataaactctccttttatttttaggttctacaaaataccatttaccactgttacctacccagccattcttgccaggcagttgaagatgttcacctctgtttctcaccttgcttcctcagaatattttgagaccatgacaactgaaatattttctgtttaccaggactctataaaactgagcgatcaaagagtccccagccatcccagtaaggaaactttgcacaggaatgtgggtattaccctgtaaaacacaacttataactttagggactttctcatttacatacatattccaataagtactacctgctgacttgttaaaacacttctggatttgcaatagtatgggtggcatgctctaatcagtgctgagcttcctgttctggcttaagccctccccaaactctataggaactggatctacccttcatggtacactccgcctgcccttgccaggcatgctgcccaacctgtcctgctgagagaggatacttcttgcagctgcagctaagatgcaagcacctgcccctagcaaaggaataagtttttgaacccgattttggggtgggtgcaagtttagcccatctgtgactttttgagcatcacgggcggcttctttaaaaaagactacgttgcaaggagtctgaccaaagttagttttaataaaacaactgttcgttatagacagcagctcagactgcgtttcccttttgctatcttgtctattgatcgaggtcccttgatcaaggtccctcagaatgcttttttttttttttttttttttccgatggaatttcgctcttgtctcccaggctggagtgcaatggcatgatctcggctcactgcaacctccgcctacaaggttcaagcaattctcctgcctccgcctcctgagtagttgggactacaggcatgcaccactatgcccagctaatttttttttgtatttttttttttttttagtagagatgggggtttcaccattttggccaagctggtctcgaacccctgacctcaggtgatccgcccgcctcagcctcccaaagtgctgggattacaggtgtgagccaccgcgcctgactcagaatgcatttgtaacaagagacatatggcattcattgtctttagtagtttttttattgctggcatttcagaggttccagctatctactcagaaattagtcctcagaactgaaactcccaaagataagcaagagtcctttccgtcccctacccccgaatttgtttattctttccatgcactttcctaaatttctggcatcttgttgtctggtgtatcgttcaaatcagggctcgctagtgcgctctgattctttgagaaatgctgagggctgagactaggcagcggggaaaagtcccagtgtattttggggtgggaatctgaagcacttttacccccttatgtgacccagctcgtggcaatgtctgggggctctatggggctagtaagaaatttattattctgaatttgagaccttatctattctgtcctccccatgccgctaggagctgaagaaagtgatggcttaacattggagcagagaagtccttctgaatacaggatataacaaccccctttttcctcccatagatcttttgaaattgaaagcatttttaagaagcaacagagctaacattttagggcagtgattcttaaccttttttggtgtattccttgctattctgttataaatttgacctgacttcagggtctgtggattacctaggagtttatggaccttaggtggagaatcccagcagggaacacatacacactgagtggcagggtggacagaattggccacactatttttaaaatgggaccccacccccactgtgcgtgtgtgtgtgtttgtgtgtgtgtttccacacttaatactatggctagatgacaggaagcatcagctgcatcagggagactcagctctgctgattacacctgccattttcccccatgtatttttattttacttatttatgccttgttttagaattgggtctttttttaaattagaaattgtctggtggccaaaaagcatatgaaaaagtgtctaacaacactaatgatcagagaaatgcaaatcaaaaaccacaatgagatatcatctcataccagtcagaatggctattaataaaaagtcaaaaaataacagatgctgatgaggctgcagagaaaaaggatcacttacacactgctggtgagaatgtaaattagttcatccactgtggaaagcagtgtggtgatttctcaaagaacttgaaacagaactacgattcaacccagcaatcccaatatatacccaaaggaatataaattggtctgccataaagacacattcacacgtatgttcattgcagcgctattcacaatagcaaagacatagggttagtctagatgcccaccaatggtagactgggtaaagaaaacatggtacatatacatcgtggaatactatgcagccatgaaaaaagaacaagatcatgcacttgcttatagaacaagatctataagcaaactaaacagaaaatcaaaaaccacatgttctcacttataagtgggaactaaacattggatacacatgggcacaaagaagggaacaatagctaccagcatctacttgaggatggagggtgggaggatggtgaggataaaaacctacctgttagatactatgcttattaactgggtgatgaaataatccatacaccaaatccccacaacacacaatttacctatagaaccaatctgcacttgtacccctgcacttgtaacatttacctatagaaccaatctgcacttgtaacatttatttttaaaataaatgttaaaaaaaaaaaaaaaaaaaaaagcaggccgggcgtggtggctcacgcctgtaatcccagcattttgggaggctgaggtgggtggatcacctgagtttaggagttcaagaccagcctggccaacatggtgaaaccccatctctactaaaaatacaaaaaattagctgggtgcagttgtgggtgcctgtaatcccagctacttggtaggctaaggcaggagaatcacttgaacccagaaggcagaggttgcagtgagccaagatcatgccactgcactccagcctgggcgacagagtgagactgtctcaaaaaaaaaaaaagaaaaaaaaattattacaaaatcaacatatgttcatgttagaaaaagtataaacaaaacattatatactgaccttcccaaaattagtgctcttaatttcttatttgtttttccagatatttgtgtgtgcatgtacttttaccaaaagagatatgctatttgcaacacttttaagtaaatactagctacctttttgtaccaataaatctttatcctatctttatcttatcccccactttctagtttctccaattgtcctcaaatgtctctaaaattacccaaatcaggatccagtcctggctcatgcatcgcatttagtggatatgttggatctcttggatctcatttaatccagtatctttttattatgatactaggcttgataaagagcccaatcagttgtctgccctgtagaatgccacatattctggatttttggtttgcttctttatagtatcactgcagttgtacctctagtccctgactttacttcaaactggaaattaaatctaaaggtttgttgaatttaatgtggctaatacacatcttaggagttgtgacgataggttcatttgattgatgctgagggttcaggctaattcacctggctacactcaggaatgccaaaagcaaactccgggtagcaaaatcaacttaaaatggcccattttcagccaagtattgttacaaaataagtaaagttaaactcactcctcattttgcatgaatttcacgtattctcttattcttgcaaaggtcattgttctactaggatcatggctcatactgtagatatttttcttgtcttcagtgaccttccattgtctcacatgctttctatggcacaggctcactatgccacattaatcaggctggcaagttgcctcctcaaacagtgctttacaagaaaataataacaatagctaacatttatggagcacagatgacaataagtgcattttaggcctcgtttctttggatcacctctgcagaaggcatgtttattagtcccatgtaccatgaagggggcccaggtttatgcttggtcaccagctgtgggaacccggagcctgaacaccaagctttgcccagctgtggatccactcctttactctctcttctctgtttttaaaatgttctgttttatggttttcattcttaagtatagatctatgatctatctcaaattaatttcactgggatggatactaagttgttgcagcaccatttggtgagaggatttgggcttgctgttatgtaaaagagtaacaagctcttggagggcaacactggaataagtatcttccagtcacctacctgtccctttctttcccctactcttcacttctctctccttgactgctggggagctgacagacatagcactcgtggtgagcctttgtcaccgatgtttattcattttttggagcagcatgggagaaacatttctggggttctttctcattttaataagactagtaggtgtttttctggttcatccaggcacacacattatttgcacacatattggcatgttggattgaagcctcaattctaggtttaatttacgcaagctcctaattggcatcacttggcatacctacagttgaatcttttttttttaattggaagggttgatgccagtgcaggctgaatggggttctctgccattcctgtatgctacagatattcagattgcctgggaacaggatccttgtcccctcaccttcccccatcacctcattctgctcctggcttggtgtgtagtaaactataaccaatactctaaaatcagagctatactgaaaactgggaccatgccctgaaaccaggagcatctaacatcctcagcctaaatgtggatgcagaagagaagcctgggaaaatcttccccagccctccctactctttgttttgtgcttatcttctatcccatgtttttcaaattttgcagaaaaaatacttttcttgggtaatctctaggttggtaagacatctttaattcctgcctaatggaaatattgaagcaaggcatgactgtgtgcttaaagaattgggtgcccaggccaggcatggtggctcatacttataatcccatcactttgggaggtcaagctggggagattgcttgaggccaggagttcaagactagcctgagaaacatagtaagaccttgtctctaaaaaaaaatttaaaaattagctaggtggggtggtgcatacctgtggtcccagctactcaggaggctgaggtggaaggattgcttgagcctgggaggtcgaggctgcagtgagccatgatcacaccactgtacttcagcctgggtgacaaagcaagaccctgtcttaaaaaaagaattgaatgcctagagttttaagccaaccctagtaacattaagcaaagtatcataggtcagagcctgggttcaaacccaggtttccttgacctcagtgccaagggtcttaaatactgtactgtaggagtaactattgaatatgcttgtaaaataatttaactaaattgcaattattttttattttagagttgggatctcgctctgtaacgcaggctagaatgcattggtgtgatcatggctcactgtaacctcaaacacctgggtccaagcaatcctcctgcctcagcctcccacatagctaggtctagaggtgtgtgccaccacaccaggctaagttttttattttttgtagagatggggtcccacagtgttgctcagactgttctcaaactcctggcctcaagcgatcctctggctttggccttccaaagtgttgggattacaggcttgagccattgcgcccagcctaaattgcaattctgcttttttggggagatggggggtaggaatttttttaagccttagtttcttaaagagcaatgaagtatttttactaagatagacttaatatgggcttttgtaactgcccaacaggttcattttgcctgttgtccagatagagcagatttatcaagacaggggaattgcgatagagaaagagtttaattcatgcaaagccaactaaacaggagaccggagttttactattactcaagtcagtctccccaaaaattcagagactgggagtttttaaggataattttgtgggttgggggagagacagtggggagtggtgattggtcaggtcggagacgaaatcatagggtgtcaaagctgtcctcttgtgctgagtcagttcctgggtgggggccacaagaccagatgagccagtttatcgatgtgggtggtgccagcagatccatccagtgcagggtctaaaaaatatcttaggttttacaatagtgatattatccctctgagcaattggggaggcttggaatcttgtggcctctggctgcataactcctaagccataatttctaatcttgtggctaatttgttagtcctacattcaggaaaaggctattatcatctttgtttcaaagttaaactatgaactatgttagtttagcctatgcccaggaatgaacaaggacagcttgaaggttagacgcaagatggagttggtttcatcagatctctttcattgccataattttctcactgttatgatttttgcaaaggcagtttcacttttgaaaaattcgcatcacatttagaattttatgattgtggcattggtttatagtttattgtattccagaaatataggttgaaaagagaaaacattccctgggtaatagtggccatatttgtcaacctgaaaataaagagataaaggataaatgactttcacacaccttctaagtataagagacagttgatgagatgtagtttgcatgtctaaatgttttacttagggggtattttaatggtttacgcagacagtgggacacaatatctgaaattatggccgttctggaaaatctgggaagtacagtcaacatgcagtagaggttcccaacttatcattaaaccaaaacacaacattaaagcttgtctttctaaatgccgctgcccaagctccttttcctaccactatcctcaggtgatagtaaaatgtcctcagtaacgctctgtggtttgaataattaaattctttctttttagatttaggcagagctcattgttttccaggtgaaatatctaattcattttaagcatgttttaaattaatgaactgtttggtgaccagatatcccaagtccctgtcatgagcgtaattgttagcctgtgcctctataaaatgtgttcggtatttaaaaatccttcagataaaatagcttgatcatttgtacatctccccttacaaagcaccttaagtcctcatgtgaatttcagaaagttcttcctcaggatagtcttgatcttataatgaattttcaacagtagtttattagcaattatttattgaatacatgatataccaggagctggacaagctacaccaagaacacagggatacagagaaaaaccgtgaaggtccctgacttcggggcttcgatggtggagttagagaaagggaggtcagtcaaggtcagccaagtgattgtaacgtgtgtgacccgcattagataacacaggtgtcatggtgaacccagacttgggaggtcaagaaaagtatgctagataaatgtcatgtttaggctgatatttgaagaagaaggattagctaggcaggtcagacaaataacttaaatctataacacacacaccactgtggagccccacagcccgatgactttccccccagaagctgcatcacagggtagcatttcaaaaacagattccattgttaggatagctgaagattctctctctctctctctctcacacacacacacacacacacacacacgcatgcgcgtgcacacacacacacaccacacaacactgcctgggttgtagattgttccttcaaaaatttttttctgttttttttaataaacattctgtgaagaaccagaacactcatttgtatctgtgtggcaaattccaacttgactgaattgaactgcagctgatagagaatgtattttctgctttctgggtgactgccattttaaccaccggatgaaggagatggagtgagagtctccggaggccggtgtgtccatcaggcccccgtttcttcatgagggcttctccctgaagtctgtgctctcacaggaaggaagccagcatgctgggtgaaaggctgcctgggcaattggagactcttttgaccacattcttttttaaaatttggactctccagggtttcctgtcaaagacttaattttcaatgaagggaggtttatacataaaacatgaatgagtgtttgaaacatttatattaaggttgggaagaattaatttgaataatatttggcataaatctgctgttacagaggcaggaaaagatggcccaaaaagaaaggaggattttgtttaactgcctctgaaatttcatctgtttatctcagcatttaaaaaattatctgatgcttagttggttctttatcttattttcaagatttttatttacccttgcaattgagaacttgtgatttgttgtggactattgagacacacaaaaaatactttggttacatacttgtttccctgaaagaatcatgattttattatttttgtaaaaatgacataggttttctttaaaaagaataagaggaaataaaaatcattcagaatactgtacccagaaatagccatcattaatatttgtcagacatcattgtagacatctatatatttctgtagtaagagaatgagaggaattaaaagaatataaaataaaatgtctcatatgttatattgtatgaaattttattttatttgaattaacagaagaataaaactgaagtgaaactaaaataactggtgaaattgatgctttctcaaaataagaaattgattatcacatttgtctttcttttttttttttttttgagacagagtctcgctgttgcccaggctagagtgcagtggtataatctcggctcactgcaacctccaactcccaggttcaagcgattctcctgcctcagcctcccgagtagctgggattacaggcacctgccactacacctggctaatttttatgtttttagtagagacagggtttcaccatgctggccaggctcgtctcgaactccctacctcaggcgatctgcctgcctcagccttccaaagtgctgggattataggaatgagccaccgcgcccagcttgatgatcagatttttctaaagttaagaaaaaagattattaaaaactttgaaattgtagtcattttatgtgtatatattttaacttttgatagtattttatgtccccttactatgaaatgtgaagtaattaacactttgaaaatttctccctcaacttcttttttttttgaggtggagtcctgctctgttgcctaggctggatggagtgcaatggcacaatctcggctcactgcaacctctgcttcccaggttcaagcgattctcctgcctcagcctcccgagtagctgggactacaggtgcccaccaccatgcccggctaatttttgtatttttagtagagacgaggttttaccatgttgcccaggctggtctccaactcctgacctcaggtgatctgcccacctcagcctcccaaagtgcttggattacaggcatgagccaccgtgcccggcctcaacttttatattttgttctatacccatactaccaagactgcttaatctaattctgtatctaacagaataccaactcaacctagcctcctaatcatggtttctttactcttccttttcactttctttcggttgggtgaatttcattgccaactcgtgtcgtgattgtttgcatgctggagagtgtatgattcagatagctaagagacaaattcacatttagagtcacatggggattctgatatcacttcctctctgttcttgacttgggactcagataggccagggatttttgccgattgaaccatactatggcctctaaccagcatttagacatttaaggaactatgggactcctggtcacttcctcctcaccttcctgtacctattcctccccaaacccttctgagaaagcttcttaaaccaacgatctttttcacatttttttggttttttttcgagatggtgtgtctcactctgtcacccaagctggtggcgcgatctcggctcattgcaacctccgcctcctaggttcaagcgattcttgtgcctgagcctcctgagtagtggggattacagtcacctgccaccatgcccagctaatttttgtatttttagtagagatggggtttcaccatgttggccaggctggtctcaaactcctgacttcgggtgatccacccacctcggcctcccaaagtgctgggattacaggcttaagcctccacgcccagccccttttcacatttaaagttactgtcacagttttatgttaccagctcctccccactggctttaggggaggtcataagtagctcatcaaggttacttccaaaggtgctggaccttcaaaaacctattatatcttaaaattggaacccagtggggtgtacaagtgacttttttggttattagcttgtaaggactttttccagtgacaattttgactataaaaacaaaaatctggccgggcgcggtggctcacacagtaatcccggcactttgggaggctgaggcaggcagatcacctgaggtcaggagttcgagaccagcctggccaacatggtgaaaccctgtctctactaaaaatatcaaaattagccagacatgctggtgggcacctgtaatctcagctacttgggagggtgaggcaggagaattgcttgaatccaggagacggaggttgtagtgagccaacatggtgccactgcactctagcctgggtgacagagtgagactctgtctcaaaaaaaaaggtagtggaagaggaagataaaaaatgagtaggaaaaaaagttgaagtcaggattggacataatctgactctaaattttatggttgcctatgaatctataattcatatatcccaaattttctttctttcttttttttttttttttttgagacagggtctcactctgtcacccatgctggaatgcagtggtgcgatctcttctcactgctgcctcaacctcctgggcagcacaagcgatcctcctacctcagcctcctgagtagttggggccataggtctgtgtcaccatgcctggctaatttcttattttatgtagtgatgggatctcgctatattgcccaggctggtctcaaactcctgggctccgccttagcctcccaaagtgctgagattacaggcatgagccactgccaccagccccaaattttcttagtcccaatttcaattattctgtgttcattaggataacaaatgtttaaaatgtggtctctttatgtgccagtgagggaatcaagtgagaagtggtcatccaaggaccgcttatcctttgtcacaatgttgaagtcctacagtgaaatcatgactggaaattcttctgaggctccatgaaatcttttcttgcacagtgtctacatgaatgtgcctgcagcactctcctgattttctcacctgctgcccctgagttctcatttactaacccctcaacaacatctgttcttctgaagcagattccttgaacctaaaatgatagggagaatttgatgtagtctaagcagatcttcctatgataaggctgacatttaaattactttttttaaataagaaaaataatgactctctctcctggggagggattataaagcaagttctctcacaggccttcagtttcccaagccttattgatactgcaagctaatttaggtggatatgacagcttttaacattttaatagtcatgcttttacttaatatatattagaaatatatatctagaaaagtgataatgatatgaagtttctcaggagttggaagccagccttagcaacatagcaagaccctgtcttaaaaaaaaaaaaatctacaatgtgatgattttaagtctgttatccaccaatacatacatgataagcttcatatgcaccatgcattctcatggaaatacgtgattcctgtgcttctctgtaactcaacctcttgctctcccactccagaagatactttggaaggcaaccaaatgaaaaatgttgtaagaatcattattgcggccgggcgcagtgtctcatgcctgtaatcccagcactttgggtgtctgaggcaggtggatcacttgaggttaggagttcaagaccagcctggccaacatagtgaaaccccatctctactaaaaatacaagaattagctgggcgtggtggcacacgcctgtaatcccagctactcaggaagctgaggcaagagaatcgcttgaacccaggaggcggaggttgcaatgagccaagatcgcgccaatgcactccagcctgggtgacggagttgagactgtctcaaaaaaaaaaaaaaaaaaaggaagcagcagcagcagcagcattattccactctaattcatttttgcaatatgtaaactatttacaaataggtactttcactcttactagcatttttcagcatacctcaggactgatcgccacctgatggccacttggcagagcataagcatgcttgagaaagagtgatcttacaaactagtttgggtctgagatatcatgtgtagagacccctattggggaatttgtaccgtagggagtgctttccttattgcctctgacctaataatgtcctcttttctctttaacacatatagactgttgggcgggagctgctgctccatctgattgactatctcgtaaccagtgatggcaaagaccctgaaatcacaaatctgatcaatagtacccggatacacatcatgccttccatgaacccagatggatttgaagccgtcaaaaagcctgactgttattacagcatcggaaggtaaagaggggctggtctatctttacttgaaaacaacacaacacaaaggctcccgacaggcacctgttggccttggcaagaggagatgtgtcatggtgagagccctcagagccggtgtcatgtcgctgatgtgccaaagctcaaggcacatcagggctgcctccggcttgcaggaagaaatgcaaataaggctactttgccccggtgcccacctagcctctccatcttcatttgccactccttctctctcccctgcctcctcccctctaggcctccttcctggaagtaccaggtgctttcttacctcagcattttacacacaccgtttccctgcctaaatagcatttcctccaagactctttctctcgacctgtcatacactagatcccctgataaactctcacatcacctggcactttactgtcagagcacaacttttaatatctaatttcttgcttcatgtctctccccccactacactgcaagctacctgcaggcaggaatcctgtccattgtgtttgtcgttgttagatccgcagtgcctggcagagcacccaggcccttggtaatgaccggttgatttattaggccagtagtccaagaactaaccataagcaagaacgggtcttgaaggagctctgatttaaacagtttattttgtttcaagctgccttgggaggtttggaatttctcagatgtctaatatacattcatatgtatgcaatttacatatatgtgtttgctttaccaaagctgaacaaaatctcaccacttgattccctccaattttaagtttttcaaatatatttaaacatggctgttccacgtttcacaagtacttctgtgtaatgtgtttagtgttgtttctgttatcagttgctacttaacgaaccaccccaaaattagcgacttaaagcaacagcctttttatttactgttgattccataggtcaggaatttgggcagggcagagcagggatggctactgtccgtgccacaggtctggggctcagctctggtctttctgagacaatttacctggagccatggactctccgtggactctccacgtggcgaccattgggatctcaaggtcccaaaagggagcatctaagagcagaagtcccaaatacaaacacttatcaaacctctgcctgcatcacaatagctagtatctcattggtgagagcagatcacgaggcaggggatgccatgggatgtaagtgccaggtgtgggtcatggcaggccacaagggcagccatccaccacacccatactcacgtttggaaagacacctggagcctaaaccaaagggcaagacactgtaagaatccactccctcatgccctatcaataagccctaaaatattctttcttttaaagggaaaattataaccagtatgacttgaatcgaaatttccccgatgcttttgaatataataatgtctcaaggcagcctgaaactgtggcagtcatgaagtggctgaaaacagagacgtttgtcctctctgcaaacctccatggtggtgccctcgtggccagttacccatttgataatggtgttcaaggtaagcaggtgcgggtccagttctggcttcttaagtccagagtggggctgaaaactctctgcctctggatggggatcagctctcccttcccctcttaacttctctggcagggtgaaaagagcttcatgttcccaactctagccatccttcctgtgattcttcaacagcagatgggcagtgtggctgaactgacaacccacagctggacatgcatcagtgaattagtgaaatttagattctagaaaatacaatctaaatagtcagattttgattctctgacaagagacaacatggctaaaataacataaaactggaacaactcacttttttttttgctaatcatatatgaacaataattgttgactcttcttaaaactctgtgggatgaggacccaaaatattacagtagctttattcacccctataatacctaaagaaattgtccttacctccagaaattagcaagagtgactgagaggacacttaatttttaagctgatttaggagtttggatttgtatctgacttatttgggggctatcaccttgcatatgtttattataaagtagaaagaagaatagaggaggtggatgaaggatttctctctagggaaattagagcatgtgtgtgtgatgcgattatgtctttgctaatatggtgtttgtgtttcctcttactctcaagtcagtttaaaggtcttggttcatcttttaaatgcagcaactggggcattatactcccgaagcttaacgcctgatgatgatgtttttcaatatcttgcacatacctatgcttcaagaaatcccaacatgaagaaaggagacgagtgtaaaaacaaaatgaactttcctaatggtgttacaaatggatactcttggtatccactccaaggtgagtttctcttcatttcttccattctccttattgccttcacccagaagtgccagctggtttattttgatccagcagttgttaaaagaactttaggcacaataggcccttcactctgtccttatcagctaatatcataagagcagtggagatgactgattgtttgagagatgctcagacatgttcctcattaccaagggccttcttcattcattcaggtacttattctgtgtctgcctactgtgagccaggaactgaaagatgaacaagacacacacctcaccctggagttgaataggggagacagacacgcagataagtaattgtgatagcagtgcaattagaataaaaacagatttagagaaggtgcagtgtaccccaagggtgcacagagccaaaatacaatagggagtagtgaagagcttggagaaatgtgatgcttacatcccatctaacagggacagctgctactagatctagctaattattgtcatgcagccttggggagccaatactgccagatcttgcagtttgtaaagagaagctgaatttgtacatgaagtatcatgattttaaagccattttgcgggctcaacaaaagagctcttcagacaggatacagtgggaggagggcccccagttctccaatcttggaataagacagccgggtaagggacaggatgagattgtcatgtaggcaacatggaaggagagatattcttattagagggaataatataaacagaaacccggggtaggagggacctagggtggaaggacaggaggagagacggactggaactggatttccatgcctcaggggaaaacattcccttttagactcgttagcctgaccccaccaacagcaagttgcggcatgcatttctgcgtgcaggccacttccaaaggtgccttccctaattgtcactttggatgcacaggctttcaggtaatctttcacaagctggtatttttatgcctgggtggctctctgtcagttttcctggtaatataaataagcatagaccacaactgataggcaacaggtccaggcagcattccaaacctctctctggtgtccaagatacagccccctctcctaccttagggcttctgcatcgtccctgctctccacaatttgtagctaagaaagggcccatcctgtccagtggcagagctgtccttcatgttcactgtctaactttcgaaggcaaatccagatgtgtaggaaattagctagaaacggttgctgctgggaattgttccccagtgtgcctgtgtgtgagctgtgtatccttctcagacaaaaaacaggtgaagccagctgccttgaggagcccagaagaatgtgcctggcctggcctggatgttttgttggccaggcctgacccgccttatccagaactgccccctccacgcttggcattctcagttctggctatctgctagggatccataatgcctgcctgttttgctatttaaaacaaaccctttgaaagtaagggaccagaggagagaactggaaagtcagcatgagcagtggcagcctgggctccacagggggccgggccgttcacctctgagaggcagtgcagcactctttctttgatccccaggagcactctggcatattggggaagcccacaggtgctggcggaaggtggcctgcactccagtgtctgtcatttactggccaaaacccctgagcacttttctttaacatctgtgatcatgtttcctcatctgtaaagtaggggcaattgctgtgaggattaaatgagctgatacaaagcacttcatatggtacctggcaatagtgaatgttggcccatgattcccccaaattagcatgcttagctttgcttagtaagtgtatttataaatgatttgtagaaatattttaaaggaatcttattctagcttatatccatgtaaaatgtaatttaagaaagaaatgaaattcaaagaatcatttttgtaatgtaggatttcaaaaaataaaaacaaaaaaggacccttccttcacccgtcacttaattttgatgcacagttgaacttcagtcagctctgatccagttacccatatgggaatatttaggattgtctagtcacgcctgggtaatagaatgtcaagccctgattttacaagctaatatgtcaaattcattttttcctgtttacatgtagctgtctgattcatttgtccccgaggcacgtgatacttggctccactccaattttagaccctaacaaaaattaaatatgcttgtgtttaggtggaatgcaagattacaactacatctgggcccagtgttttgaaattacgttggagctgtcatgctgtaaatatcctcgtgaggagaagcttccatccttttggaataataacaaagcctcattaattgaatatataaagcaggtgcacctaggtttgtaaaattttcttattaattccctattaatacaaaatagagcatctggcaagacctctgggttgactaaacgcaagcctttatttatgctttgtagttatagcctcatttcagtgccagatctgatggttaagaattctctctgcatgagtatctgcagtgtgtgagaaatgcagtgcccactcattcatagaaaaggaagcatgatgcatgttcctttaatatgagggtataaaaatccagagtaccaggtggtcgtggtggctcatgcctgtaatcccagcactttgggaggccgaggcaggtgtatcacctgaggtcaggagttcgagaccagcctggccaacaaggcgaaacctcatctctactgaaaatacaaaaattagccaggcgtggtggcacacgcctgtagtcccagttacttgggaggctgaggcaggagaatcacttgaacccgggaggcagaagttgctccctccgccaaggagccaagatggtgccaatgtactccagactgggtgacagagtaagactccatctcaaaaacaaacaaacaaacaaacaaacatccagagtccccctaattttacatgttgaatgatctagaaatctggcaaaatatcaggaaaataggctgctactctgttacatcatctcccatttagaaaaatactatgtttgcttgtcactcaccacgcagtaccaaggaccctgagaacactggacataccactttgcattttttccagaattggggtggtgagctagcaccattaccttcaacccctctcacctccgaactctgccagatgtcctggtgctagaaatcttgccagcctgtttgctgaaggctggctggcccttatcacagatagacagactaaatgtggcagagagtgatagctttcaaacgtgcagtggactcaccgggagcgcttgctaaaacagattgccaggccccaacccggagtttctgtttggaccaccttaccacgtgatgctgatgctgctggtccagcggctatacttagaaagccattgcactagagaaacacactgctagagatgatgatggaatcttgtacagttcaagtttattaaccaggtggtgtctctttgggcaaggtgtggaaggctcttctatatttacagaggtgaagttatctttctccattcagaatggcttggggagagaaacatatcaggaattggcataatagctatgataccacatggagagagagagagagagagtgtgagtgtgtgtgtgtgtgggtgtgtgtgggtgttgaaaaggtttgctgcatgggcctactgcataactgcataattcccggaattttctgcatgattcacagcaaagctttcctcctgctacaaagaagatggagaaggatgagggaaggtagcacagggccagagggctgagtgcaaggatgattaggacccttcctcggcacacatccctaaaagggatgcccctgccctctttcatacctgtatccccagcctccatgccctgacctgaagagaagtacacaaagattactggtaaactcacagggctatgtctaactggctgagtcgttcatggactaggttgactccctgtgataggggatgttatgaaatatcgttctttctcaccagcatcttaataaagattataaacttattattgggactttcaccttcttcattatgtcatcaaacgttgtcttgggttctctcttgcttagtattctggtaattctttctccactagattttcctcatgaggcatgtcatgtattagtctaacatttctattatatttctacctctattgatcctttagtttgttaatctattactattattatcattatcatcattttagagacagggtctcactctgtcacccaggctggagtacagtggcacagtcattgcccactgtaccttgaactcctgggctcaagtgatccttctgcctcagtgtcccaagtaagtaggactacaggtgcacagcaccacatccagctaattttttaaacaattttatatagagacagaatcttgctatgttgtccaggtgagtcccaaactcctgggctcaagcgatccttctgcctcagcctcccaaagtgctgggatcccaggtgtgagccaccgtgactggctctgcctatccttttctgaaattcattcttcaccagtatcaacatgggtatgggcgtgcaagtgaacatcaaatatgctctgtgtaactgcactactattttcagaacctcaatctagctgtaaagattatttaccaagcactgaattaaggtgggctttgaagtatcatgttgatgtaatattgccagggaaagggcaatataaattgcagtatacctattattatttttaataatttggaaggcttaccagtccatttgcactaggttttgtttttttgtttttgagacggagtctcgctctgtcatctaggctggagtgcaatggtgtgatgatctcggctcactgtaacctccgcctcccaggttcatgtgattctcccactcagcctcccaatttgctggaattacagacacccaccatcatgcccggctaattttgtatttttgtagagacagggtttcaccatattgcccaggctggtcttgaactcctgacctcaggtgatccgccggcctcggcctcccagagtgctgggattacaggcatgagccaccatgcccagcccatttgcattaggttttataaagaatgtgtatctgcctgtctctataatcagatgcaaacaactcactcaaaaaatacatatattggcacatcaaccctgcccccttgtggtttaagacagatgcataacatggtttaataatgaaaccatatttcaaaataccaatacagtgtggttattactacttaatagaaaggttctctccctactagtgcccaataagaaactaatgaatattttgtttgtgaagaatggcagcaaacacccctttattggtattgctctggtttaaagacattattgatattcgtcaaactgcattgcatttactggttccattttaccaattgctaggatgcttctgagtttctgaggttttgacccatctggaagtctctgagccaccttgtctgggaaggaaaggccttctgctttagtggaagggccttgccaagagggtagaggcttaggtagagcccaagctgttttgtcatctggcgatgtttgcaatcttgagcaagcacttgtctgaatctcagtgtagtcaacagaaagttgagagtaatagcatcagccttgcctcccaccagcctgttctaaggcttcagtggtgttattccttcaattagaactcactgcagacctcaactgaaactcgggccccttggtgctgtgttgtcctgcttagaggatgatttactaggttcaagttgagatgagggtgtcggcagacattaaaaccaaagtagcaaaggagggcaagtctgaattctagaggcttaaaatgtcttgcttgtcccggtctctgaggagaagcaaagatgagccagacacggtgttacctgcctgctgcggccctgtctttcccctggactcctcaaagcagatctgaacctagagagcaagggaatggctcacagcatccagaaacctaagcaacctgggcataaaagaatctggtatgtgctgagttccagaagcctgtgagccacagatgtggatctgttatcacatccaaaataggaggcaactgtgaccatgcggtggggacatgggcacaaacaagcagtctcctaagtactgtcccagctccgactctaaattgtggccaacagatgcagaattctagtgcttgcccagccaagacttttcattcatgaagctctaatccatttccaagggaaaaagagctttacatttctcccatgtatctccccatctggccacagaatttatatctcagattttatgtcttctcatttgtattgtatctgagcatttttcaaattttcctttttttttttttaatatagtgttggctctctctgcgtctcttagggtctaccagtctttttttcaatgtttcaacttcagcatatagaaataaatcacattttctggtaaaacaattacttccctcttaagtaaaaggtttggtggtatgtagacaaaatattgtaaagacatatacaagctaaagcacgcttttatttggctggtgggaggggttttcctttgaatataaattccatacataagcatggtctgtgtttgcccagtaacagtgatattcgcataccccaggcttccatagctggaagaaccatctttaggtttaggtaagagtcatatgaaagtgagtctttgggcctgtaatcccagcactttgggaggccaaggtgggcggatcacttgagatcaggagttcgagaccagcctggccaacgtggtgaaacccatctctactaaaaatacaaaaattagccaggtgtggtggtgggcacctgtaatcccagctacttggggtgctgaggcaggagaatcgcttgaacccgggagatgaaagttgcagtgagccgaactggtgccactgcactccagcctgggcaacagagggagacttcaatttaaaaaaaaagaaagtgaatctttgggttattaggggatgacgaatgagggtcaaactggaatatgaagattttcagacatttcttcaaatgcaaattgttcttcctttttctatctttgagggtaggcagaccgcaggttgactggagccttgattcagctgcagcacacactgatacgtaggtgttgttcaagtccctgaggccatccaaaatcactgtcatgtgactgtcaaaaaagtcaaatctgttctattaaagtgtaactgcttctagccaagaagaaatttgctgcctttttttaaagggtaccatgacttttttttttttttttttttttttttggtgtcttctgccaactactcattactagtaccctgaattctatttcatcattatctccaatgttaaagaatggtgtaatgttagccgggcgcgatggctcacgcctgtaatcccagcactttgggaggctgaggcgggcggatcatttgaggtcaggagttcaagaccagcctgaccaacatggagaaaccctgtctctactaaaaatacaaaataagatgggcgtgatggtgcgtgcctgtaatcccagctacttaggaggctgaggcaggagattgcttgaacccgggaggcagaggttgcagtgagctgagatcgcgccattgcagcctgggcaacaacagcaaaattccatctcaaaaaaaaaaacaaaaaattgtgtaatgtcagtttcaatgatagctctgcttcattttttatgcacttgattttcttcgatttggttggttttggggaagtcaacaaaaaatacaaaagatgccaacagacacaacaccatccagcacaagttaccttgctgaaacgcatggattttctaagtggcatgaagactgtaaactagctcagagccctggaaaaggaaataatatgcatagcttcttccctcacatattcctgctttgtggaacaaagttgaattaagactccagaaattcatctaatatattctccccccgccacaccacatagtttttcttaatccaaataagaggaaaggaaagaaagccaggcctggtggctcacacctataatccctgcactccagcactttgggaggccaaggtagatcatgtgagctcaggagttcaagactagcctgtgcaacatggcgaaaccccacctctacaaaaaaatacaaaaattagccaggtgtggtggtgtgtgcctgtagtcccacctacttgggaggctgaggtgggaggactgcttgagcatgggaagtcaaggctgcagtaagccctgatcacaccactgcactccagcctgggtgacagagcaagaccctgtctaaaaaaaaaaaaagaagaagaaaggaaagcaagaattaatgtttgttgatcctcctgttctgtgttacttacatttaatcttcacaaccatcctgggtggtggtatattatccccatttcataggtgataaaattgaggcttgggaatgttcagtgacttgagaactagaattcaaatcaaaacctgactaggttctttctgtcacaccaagctatgatgatgggtacacgctatatttatcacatatcaaaggacctcctaaggggggcacagtgtaaatagctcttcaaaataatgccattgaagctgagtgtggtgcctcacacctgtaatcccagcactttgggaagcttaggcaggtggattgcttgagcccaggagttcaagacaagcctgggcaacatggtgaaaccccatctctacaaaaagttaattaattaattaaataaaacaaaataatgccactgaaacccaaggaataaatgcgtaatcaggttaccaaattattaccaatttatgattgggtactacctaaacatcaaaaggatatgtatcaagcagtaggaataaatataaatggaactgtgtttaaaaaagagagggcaaagaggaacacacgaagtgaaaatagaagtttacacagttgtatagagaaagggagaaggaaatgtggcattttcctcctcaggagacaaaaaatgaagagtcaggaactaaataggacagaaagtataataaaaggcaacctaggtcagatagaagtttgttgaagttcaagataaacattgttttgctaaatgccaaaatttttatttttcactttaaccgtttctgggggaaactgttacgtgtgcctcgtatttttctgccctaataaataattattgagcataactgtttggggagagttcaagatcatcttactattgtagctcttcattctcatttatgttattggggacttaggcagcttcaccttaaggtaatatgatttgacgctggagtaaacaaactagatgtgacacgtaggatctaaaataagaaaggtcttaaaatataaatggctttttaaaaattgtactcctgaaattttgagaggggctgtcgagactatcatgggttgacggctaggctgggccacttcgttggctgtgtgagtttgaggaggttattttaataagccagagccttagtttttttcatctgtaaaatcatgataataattgatgacacagagctgatatgagaatttaatgagaaaatgctcatttggtagttagtacagagcctggaatatactaagtgctcaataaatattggctgctgttactggccaatcgattccatgcttccaagaagccttgtgattataattttgcttcccatgtagttgcactacaagacaaaactattgagtccctcgcacacgtaaatattttgttgtaactaatacattgacaccgtttttatttaggattttatggaatccaccaatggttgtagtacagtttggtgactgagtaaataacttggaagtgacaggaatggatcttaggttgtcatctgtgttctctcactgtgataatacgtactaatataaatgggctattcaacaacgaacaaatttaagctataaatcagattagtaattttgactgtattttaagttacatcaaaaataagttttttccctctctaacacttaatattaactcacaacattgagttagctaataaatattgcatatattgttcttaaatatttataataatttttatatgccataaaatatggtattaatatttaattttatttttgtcttgcaggtgtaaagggtcaagtttttgatcagaatggaaatccattacccaatgtaattgtggaagtccaagacagaaaacatatctgcccctatagaaccaacaaatatggagagtattatctccttctcttgcctgggtcttatataataaatgtaagtatgcaatgctagttattgttattaaaatattatagaactcataatacttattcacccagaaggaatccaaaataagtctaggaagttcaaaagtagatccatcgagacagaaagaaaggatagtgtcagacttgcaattggcaggaggtggaagaggtggaaattatatgaaaaaaaaaaaaaccacaaaaattcatattttttccctgatggcaatttttaaaaaatggaagccaaatcctatctcttgtgatatcttttatgattaaaatgtaacccgattaataataaagaataagcaatgtagcaaaggtagtttatagtttcccaggatacgacacaacacccattccacggcatacactttctactataaaaaatgaattggataaagttccttagaattcattttataagtgaaatctgatccacaaattttaacactatattcagcaaatgataaacatattttgcagcccttttttcatcgatgcaagtaaaatttcagtctttaattccataaaatatatatttctgagtcattttatccgaagacaggaaggcatggactaatttgagcctgagtggatttatgtgaaagaactaaatgaataagtattgatatagttggccagattttgcctctttctctttgatgtgaatttctctgagaaattcaggattcttctattttgcttagtggggcttatgccaaccatagcagtcattctatatagagctaatcctgggagaaggtagtcatctcttctgtagtgaaaactgagttggtattttattatttcatcttgaggacatcatggaaaaaacatggtttttagtttataaaactatagaattcagagcctccatgctccatgggttctccccaaggtgcctagatgtgaggcttatcaattgctaatccttttaggaatttctactcctgccgagaaaatggatagagcttgaaaaatctcaactcactgtgaatctttgtctaaaaaggccctttattttcctcctatttactgtgatatttctattctatttaaaaatatgattttccctgtagtgaatctaaacttatatgcaacctcataaataagccacacctttagaataaagttatgaattgttcatttcccattagttagactaacacagtacacattgaccctagatattagttctaggataatatttgaaggtaagactctggacattgaaatgaatgtgtaaaatacataccaatgagtggttatgtaaatgtcattccccattttttcccttctccaccatatataataaaagcatttctcagtagacattgcctgtagttagtttagcatttgtcttgtcctgatcatttcctccactaaaaaaaaaaagaaagcctaaccaaagattcaggctgatatgaacaaaaccaggtaaaatcaaagcttttaaaggagggtggatgtggtggctcatgactgtaatctcagcactttgggaggctgagaggcaggtggatcacttgaggtcaggagttcaagaccagcctggccaatgtggtgaaaccctgtctctactaaaaatacaaaaaattacctgggcatggtggtatgcacctgtaatcccagctacttgggaggctgaggtaggagaatcgcttgaacccgggaggcggaggttgcaatgagccaagattgagccactgtactccaggctgggtgacagagcaagactctatctcaaaaaaaaaaaaagaaaaaagaaaagaaagaaagaaaagcttttaaaagaagcaataggcttgtaggtcagctgaaaagaaattagtaagttgagaaaataattctacttgaaaataatcttgatatccaaggaggatgttaaatacacacttgggacaaagggaaagagttatctctttacccttctgccccacgaaaaggatggtggcagaaacatctgctgcttccttctcttgacttacattgccagatgaggtacccatctgtccttatttcattttgtaattcttggcaacagcattcacaacgctggtctctgtcaacaggcattggataactcagcctgcaggaccaaatctgttgctggcccagaggtctggtagattgttacatgcattgcacaaaggctgcattttagtgatggatatcagtgttttcagtgtgggcaccacgaaccatcttaagtcactcatataattgtctcttgtttcttctcaggttacagtccctggacatgatccacacatcacaaaggtgattattccggagaaatcccagaacttcagtgctcttaaaaaggatattctacttccattccaagggcaattggattctatcccagtatcaaatccttcatgcccaatgattcctctatacagaaatttgccagaccactcagctgcaacaaagcctagtttgttcttatttttagtgagtcttttgcacatattcttcaaataaagtaaaatgtgaaactcaacccacatcaccacctggaatcagggattgctcactccaggttactgcaaccctaactcactctagtgggaccttgactggagaaactccacgatcttcctgaagaagagaaatggatgtttccaaattccacaataagcaatatgtggtgataatgaaaagaatgattcagtcttgacggtgaatggaagacacttacctaacaagtactgctcatttacactcaaattaatcttgaagtagtcttaaaatgtgtaagaagttaaaacttgagaagcaaaaaaatgcctgcaaaaagaagatcattttgtatacagagaaccggatgaatataagcaatgaagatgaacatttattgatcttctacatacaagacttcaccataaggccaggagcagtggctcacaccttgtaatcccagcactttgggaggccaaggtgggcggatcaccctgaggttaggagttcaaaaccagcctgaccaacatggtgaaaccctgtctctactaaatattagcggggtgtggtggcgggcacctgtaatcgcagcctttcaggaggctgagacaggagaatcgcttgaaccctagaggcggagtttgcagtgagccgagatagtgccattgtactccagcttgggcaacagagtaagactctgtctcaaaaaaaaaaaaacaaaaacaaacaaacaaaaaaaacacctcaccatgagtgctacatgtgaatagatattaagtgccatatataattagttctcagaagaagggagaaatgatcataggactgggaattgttttgcaaacgttctaggagatgtgagagaaaatatgtaaccacatcttagtggcccaagaaaatacaggcctgaagggataagattgtgtctctatagagcttcaaagcatacaggtcaattaagaaagcccctctctctccagagccgtttccctagcttttggcacctggatgccacagtcctccattaggctgatgactccaaagatgtaactctagcctcttgcctgagcttcagactcgcgtcccactgcccacaggacacatccacctggatgtgactcacaggtacctccaacccatcatgtggagatactcatcctgttccccctagagctgctcttcctgctgcattctctctctcaattactgggaccaccaagctaggaacctgggagtcatccttgatactttctcttcctccttaatcctgtgtattcagcaagtaactaaaggttggtgttggccaggcatggtggctcatgcctgtaatcccagcattttgggaggccaaggcgggcggatcacttgaggtcaggagctcaagaccagcctggccaacatggtgaaaccccatctctactaaaaaaaaaaaaaaaattagtcgggcgtggtggtgcatgcctgtaatcccagctactggggaggctgaggcaggagaatcgcttgaacctgggaggcagaggttgcagtgagccgggattgcgccattgtactccagcctgggtgaagaagtgagactctgtcttaaaaaaaaaaattggtgctgataaatattgatgaattctgctctctgctctctatggttgtcaacactgcagagttgaggcctcatatctcacctgcactgctgcaacagcttactggtcccttgctcccagccttctcctcttcagtccatcgtccacacagcactggggaaggggagccacttgaaacaaaagtcaacaactggttgtagttcataaacacagagctgtttgtgtcccctgtatctggaatgccattatgacccactacattttttctttcctacccctcttaaaactcagttcaggtagcagctccactaggaagccttggctgaccataatcccattcaattccatttcacctcttcgcaggcagtctggggttagggaccctttctctttgctccccaaaataaactggttatctctactattggatttacaacattgtattataatcttctccatgtgtgccttctctagtagaatgtgagctctttgaggccaaggtctatttaatttgtttgaaaaattcattgttatatcctcaaagcctagcacatagtaggtactgaatgaatgaatgaacaaggggtgccaggagactgctactcccagtccttcccagaaactgcctagggctttgagtcattttatgaagctaggtcttaatgcgtaggcaacctcccagctcactatgaacgctgacagaagagtgttttcatgtctataatcaagaattccagatacattccttttactgaaccttgaattgatcctaagattggtagtaaaggtattatgttacctcctaacagcactacaaagtacctttttttatcagaaaaaaattttaccattaggactcaatttgaagtactaatgcttctcaagttctccactatgagagttaccctgtattagaccgttacctataagaattaaggggtaaagcactaaacagaaaagaaaaaaaaaatagcaactctggtgagcagatttctttcctttcttccttccttctcctcttcctaccttcctccctcctttccctctcctccccttctctccctttccctccccttcccttccttttcttctttcctccgctcccctccccttccctccccttcccatccttctttctcttttttttacttaatccccagtgtgacagtaatataggctgatttctagaagtgtggtgtattactcatggaaagtgagttgccttggttattactttcaattgaaagttctatgggatctagaaatgagacatactggcatggagagtgagaacgacaaaggaatgaagagctacaggagcatttaggccatttctatgccaagcttattctacatgcacaaaatcatacatgttaataaatataaacaaattggaggcttatttaaaccaattatgaaatctggtaatttgtgcagcagcaatagatgataaccaaaaaaaactcataataatctgaatatcttgatcatttgtatttaaagaagcagtaattatatacttgaaagtacataatatagtattgcaaaaatgactttggtatattacaaattaaaagtatataagatgaaacttgatttgctatcaagccccaagcaatttttcaactgggcattgaattctaacttttctaagatagcaatttttgaagagacacgaacaaaaatctgaattagttcatgagccttaatgtaaatctcttgctgaaatagtttttaaaatcagaatttagttatctatcagactcaaaatcatttaaagactaacaaaacacaatcatgatattctaactgtggtcaaaccaggtacccaagccacctccctgcccaacgcctttccggcttttcccctccctcttgggctggtggttatgctcctccagctctagttcagctataattccttttatagagaaaccaacctgatacacactttcatgatgggagaaaaatgtgggagtgaaatggtatttagaaagcagcagtcaggcacggtggctcatgcctgtaatcccagcactttgggaggctgaggcaggcggatcacttgaggtcaggagctcgagaccagcctggccaacacggtgaaaccccatctctactaaaaaaaaatacaaaaattagccgggcgtggtggcaggcacctgtaatcccagctacttgggaggctgaggcaggagaaatcgcctgaacccagaaggcagaggttgcagtgagccaagatcacatcactgcactgcactccagccggggtgacagagcgaacctctgtctcaaaaaaaaaaaaagaaaaaagaaagaaagaaaaaaggcagaagccctggattcaaatccgccacacattcagtttctttatctgtaaaatggagaccaccccccgccacgctgaacggtgattctgtgactggtaagagatgctacatttttggtgcttgttcaggtggaggaaagatgatagttaacactcaggtaataagtattttgaaggcagtataatataccttcttaaagagtatacctactcaaatgttggtaaatgttgacatgattgaatctaaatggcaaagagtattttagaaaaacattaagtccctgcagataaatgacagtgttgatttggatgcttaattacattcagacatgaactgttggatgtatctgaaatgttaaaagctttttctcaacatttccaaaagtctttccaagaaatcaatgttatgttttgttccagaagcaaatttgcatttgtgatctgtttctaaaaatggtacaagttagctctgtttagaaagtaaaaatatctgatgttagattggaagtatctcttcctggggaatccagaaagataagcatagcatattgtcttactgcaatagataagttgcttattgagaagtctggttgttattctatatggtaacaatacagttgatgtatattttatgatagatcctttatattttcctcatgactttagaagggggaagggggagaaaattatgatgaccagactagttaaagagcattgaaagtccacagtactgtagctaaagtagaagtttgggtttgttatagactttacattatatcaactaataagcagatactgtacagtattgctcaccattttatcatacttttgcatatgaactactccattgccttttatagatgttttatagctgatcttaccagttttcctggtaactttttttatttcttttttttttttttgagacggagtctcgccctaacacccaggttggagtgcagtgccgtgatctcggctcactgcaacctctgcctcccgggttcaagcaattctcctgtctcagcctcccgagtacctgggactaccggtgcctgtctccacgcccggctaattttttgtatttgtagtagagacggggtttcaccgtgttagccaggatggtctcgatctcctgacctcatgatctgcctgcctctgcctggacctcccaaagtgctgggattacaggcgtgagcccccgcgcccagccactttctttaatactataactaagaatttattaaaatgcacaaattgtctaagactgtaaagtttattggggagaggccatgactacctctgaatttagtaaatttaaaatatttctgattctcaataaagaactaatatccatataaataatgcttttttcccattatgttacctgaaaataagtacttatgcaagtataacaaagtccactaaaaataactgattaccaccaaataaagcttgggaaagaccaaacttaatgaccttttatgaggcaataacattgcaacaactcttcaaagtccagatagttcttccagaacaagttacatatgctatatgttatatatattatatataatacattccaaattaatttgtgttgtggggcagtgtgttccatggacaagatgatggatggaaagtatgccttctggtcagaaaaaatatttgaaaattcacaatttatattaatgtaataaagaatctgagaaatgcagaaaagaaatggatttcccaaacatgctaagctatgggaccatttccttaaataatacagcctcgtaccatccctttggattaacatacctatatttccaaacacattttgggaaatactgatatatagagaaggcttttgttctgaataacaaattttattgatttccaggtgcttttgaaatacagagaacagtggtaaacaaagaatttgcctccagtaggaactggaaaactaacagtcctaacccctgctaatatcgacttagtcataggacagaggatgggctcaagcttacatctgctctttgaaacacgctaaacaaataatagtttaaatgagacattgctgagtaggaaatggctaaattacaggtaccaatttttaaaaagtgacgtctcaatttagaaaataaacaggaaatagtttctctgttttcaagagaatttcattacatagaagcctcttaagcagaagttccctggtatatttacctagacttcaacgtttaaatttgcagcttttttttttttttttgggacgaagtctcgctctgtcacccaggctggagtgcagtggtgggatctcggctcactgcaacctccacctcccaggttcaagtaattctcatgcctcagcctctcgagcagctggaattaacaggcacatgccatgacgcctggctaatttttgtatttttagttaagacagggttgcaccatgttgcccaggttggtcttgaattcctggcctcaagtgatccacccacctcagcctcccaaagtgctgggattacaggggtgagccatcaccccccagccaagggttttttgtttgctgtttgacaactgagaatagaactattatttctctgctctcttggagtggtctctcagcgctgttaagagtctaccaagcgtagtgactcacatctgtaatcccagcactttgggaggccgaggcgactggatcacctgaggtcaggagttcgagactagcctggctaacatagcaaaaccccatctctactgaaaatacaaaaatttgccaggcatggtggctcatgtctgtaatcccagcactttgggaggccgaggcaggcagatcacgaggtcaggagttcaaggctagcatggtggctcatgtctgtaatcccagcactttgggaggccgaggcaggcagatcacaaggtcaggagttcaaggctagcatggtgaaaccccgtctctactaaaaatacaaaaaattagccatgcatggtggcatgcgcctgtaattccaactactgggaggctgaggcaggagaatcatttgaccttgggaggcagagtttgcagtgagctgagatagtgccactgcactccaacctggagtgagagactgtctcaaaacaaacaaacgaacaaacaacaacaacaacaaaaaaaaaaacggccaggcgcagtggctcacacctgtaatcccagcactttgggaggccaaagcaggtgggtcacctgaggtcaggagttcgagaccagcctggccaacatggtgaaaccccgtctctactgaaaatacaaaaactagccaggtgtggtggtggacccctgtaatcctagctactctagaggctgaggcaggagaatcacttgaacctggggggcagaggttgcagtgagccgagatcgcgccacttcagtctagtctgggcgacagtgaaactccatctcaaaaaaaaaaaaaaaagggtctaccgttagtggacacctttagtcttccaacgagatacttccacctcccaccttgtggttaaaaaatgcttaactttgggctgggtgcggtggctcatgcctgtaatcccaacactttgggaggcagaggcaggcggatcatgaggtcaggagttcgagaccagcctggccaatatagtgaaaccctgcctctattaaaaatacaaaaattagctgggcatggtggcaggcgcctgaatttccagctactcgggaggctgaggcaggagaattgcttgaacccaggaggcagaggttgcagtgagccgagatcatgccactacactccagcctgggtgacagaacgagacttcgtcccccccaaaaaaacaaaaagcttaactttgaagagatttggtcttctcagatgcctcctataaaaagaaacaaatgtgagaaaaggtagaaaaggccttttttgtagggagcaattttttctaaaaaggcttttcagccaagaccctctctcttacaattctgacaccatatcaacttttaagactacttttttcttagaatgcttcttttttgccatttattgcacaaacaataatttggggggggactttaaaaaatcataatcaggccaggcacagtggctcaatgcctgtaatcccagcactttgggaggccgaggcaggtggaccacatgaggtcaggaattcgagaccagcctggccaacatggcaaaaccccatctccactaaaaatgaaaaaattagctgaaataacacagctacttgggaggctaaagcaggagaatcacttgaacccaggaggtggaggctgcagtgagccaagatcacgccattgcactccaccctgggcaacagagcaagacgccatctcaaaaaaacaaacaaaaaatcacaatcagtgagattaatgtttaatgaacatactgttattttttatttttttaagagacaagtctccatctgtctcctaagcagagtgtagtggcgcaatcatagctcattgtaacattggactcctgggctcaagtgatcctcccacctcagtctcccatgcatgccaccacaattttttggatacagggtgtcattatgttgcccaggctgatctcaaactcctggcctcaagtgatcctccttccttggcctcccaaagtgttgagattacaggcgtgagtcacagagcctggcccaggatgttattttaaaattgtctttttgtcttctaaatcaacaagaacttgatagttgctttcaatgccaatcaacatcctttactactgtatacacaatgtatttatttgacatttgaaaggagatacggctgggcgcggtggctcacgcctgtaatcccagcactttgggaggccgaggcgggcggatcacaaggtcaggagatcgagaccatcttggctaacacggtgaaaccccgtctctactaaaaatacaaaaaattagccaggcgcggtggcgggcgcctgtagtcccagctactcgggaggctgaggcaggagaatggcgtgaacctgggaggcggagcttgcagtgagccgagattgcgccactgcaatccggcctgggctaaacagcgggactccgtctcaaaaaaaaaaaaaaaaaaagaaaggagatacaaaaggatgttacaacctgctatggcaagaagatacaaaggaacatattggtatgaacagaatacctcagagttgagtgtataaaaaaggcttaattcaccagatgcagtggctcgcacctgtaatcccagcattttgagaggtcaaggtcaagacacgaggattgcttgagcccaggagttcaaggccagcctgggcaacatagcaggactctgcctctaaaaaaagtatatatatatatataatgtacacacacatacatacataaacacatatgtattatatatatatatgtaatatatgtatattatatataatatatatattagccaggcatggtggcaacaggcctgtgttcccagctactcaggaggctgcagtgagtcatgtttgcgccactatactccagcctgggtgacagaatgagaccctgtctcagcaaaaaacaaataaaaaacttcaaggtggagtaggggttaattcaaggctacctaagctggatttggggtgattatggtcgagtggatgcaaacagaatattaaacttccattcattaaaagtgcttactacctgccagaccccatactaggctctatagatttattgtctctaaggtcactaggcgagtaagtaccagatctgtgactttgaacttcccactacaataagcttatgaactttgtttaagcaaaaaaggtttgaaaagtgaaaagcaagcacccatttcatagtgttctaaaagtctaaaataatccagtagaacatcagagataaaatccaaaaagcaagtttttcccccaatatttaaatcagggaagcaacatgatggtatctgtaaactataactgaaccaaaaataggaccaaacgtagtgaaatccatttagggagatattactgtgatcttgaaggaaggcctacttaatacaggacagtgggctggggaggtgtgaaccaaaaatagacacaggcaaaagcgctaaaatttaaccctgagaaataaatgaaattcacctacaaaataaatggaataaatttaaaaggtgaaattttgggcttggcgtggtggcttacacctgtaatctcagcactttgggaagccaagacgggcagatcacttgaccccaggagtttgagaccagcctgggcaacatggtgaaactgtctctacaaaaaatacaaaaattaggccgggcacggtggctcacgcctgtaatcccagtactttgggaggccgaggtgggcggatcatgaggtcaggagttcgagaccagcctggacaacatgctgaaaccccatctctactaaaaatacaaaaaaaattagccaggtgtggttggcgagcacctataattccagctactcaggaggctgaggcagaattgcttgaacctgggaggtggaggttgcaatgagccgagattgcaccactgcactccagtctgggtgaaagagcaagactctgtctcagggcgggtggcagcggggtcgggggaggtggggggaaggttagctggacctggtggcttgcacctgtggtccccagctacttgggaggctgaggtgggaggattgcttgagcccaggaggttgaggctgtagtgagtcatgtttgcagcactgcattccagcctgggcgacagagcaagaccgcatctcaaaacaaaacaaacaaaaggtgaaattttggaattaggaaagatgctatttttataaattggctttaagctgttggctggacatctaagttgtagcattctgaaggcagcagagatgtgggattgtaggactgaaacatgaaaatgcctatcgaattttttttaaagtctttaaaggagagctttaaaggaaagcaatacgaattcaagtatgtttcagtaccactcctctctctaaagacaatcaactatggttttcattcaaaatactattactctaacgttaaatatttgagtacagcaatcatttcagatgcattatgaataagttactgaacacgcctcccatctgcttgctttacggttttattttgcctttcgtttgttagctcattttataatttgttacttctgaacaccttccaagtgctggtgctttcagatatctacctcaaagtattatttgtaaatgtcaaaaagtccctcttacatataattgaaagctggctacatggtagacaatatgatcacaaacttttaaacaattttttaagctgaagaaatactttttctttttataagtatcaaatcaaaatgtaattcagcatccacccataaagcgcaactaaaaacttttcacaatgccattaacaacttgtggttaccatcataagcctacagacctacacactaattatctttaaaacccttattaggctgggcgtggcggctcacgcctgtaatcacagcactttggggggccaaggcgggcagatcacttgaggtcaggagtttgagcccagcctggccaacatagtgaaacttcatctctgctagaaatacaaaaattagcggggcgtggtgacagggtgctctaaccccagctacttgggaggctgaagcagaaccacttgaacacagccaggaggcagaggttgcagtgagccaagattgcaccactgtactccagcctgagccacagagcaagactccgtctcaaaaaataaataaaaataaaataaaacccttattaaggatttaaaaaatcttaattatataatgccaaaagctagtccccgtctggcttaggggcccacaagctcctgctttaaagccagtttttttgtttttttctgatgtacttacatttgtgcctcacaatcaagaggttcccagcttggtggaactttcaaagatgaggcagaaaactaaacaggcaattacaatcttacttttcacgctgacaagtggtacggtggctagcccaaactcccctccctgtcccagctacctcccttatagaccattcacgatcacttaggccaggctgccatgtgacctaagagaagacagggagaacacagcatttcttactcctactaacttgcaacatcattctctcaagttgctctcattggaggctcccaactgcttcaagctgcccagtgatatttgtatttctaaagtgggcaggcatggccattccagaaaaagaaacacattcagacttgtgccttttgttacccaaatatatgatattcaaataatttctattttaacaactcataaaaatttaagatcaaataattgcattcttgaaacaattcttaatcatttattttcaacacgtgtactataaagaacctaagaaatcagacaattttaataacccataaacatgttgaatccatttgcagatttaaattttgtaaaaatagctgtcactgcctccatatatcaagtgtactatgtttataatcacatttatgctaccgatactcctcagaaaaaaacagattctgcttggttctagcttcagtattatgaactccaataatgctttgaggacctccaaaggaaaaaaacagattctactaggttctagctgaaatattatcaactccaaattgaagctgaagtattatcaactccaaataatgcttcgaggacctccaaaaaaaagagattctgcttggttgtagctgaagtattatcaactccaaataatgcttggaggacctccacaggtaaactactaatccctttggccatttattgagacagacagagagagagagagagagttttgaagcaacaatgtaccattagtaaagttgctgtgcagaattacctcagtcctattctaagcttacagttcagttgattttattgtcttcacctaagtatatacaattcacatatgggagaaaaacactaaatcaagatggttattttcactgttttgcttaagattcatatttaaatataaatcaagaagttaatccacagtttgagagatacttatattagaaattttaaatgttaaatacataattgtaaatatggtgtatgtactgtttcacatacaatgggtattgatcaaatcagtgtaattagcacacccatcagctcaaatatcatttatttgtagcaagaacattcaatacattaactatagtcaccctactctctctctctctctctctcaataaatggccaaagggattagtacttttacctttggaggtcctcaaagcattatttggagttcataatacttcagctagaacttattccttcaaatttaactctgtacccattaaaagtggttttgtgtgcaattaacagacacatgttctacccatacattgttttccaaaattattgtgtggctttaaaaaaaaaaaaacccacacaacaaattgcaaaaggcactgagataacatctgcttctagatcattgctaggctcgaaaaataaagcttgttctaccaggaatgacaagttagaacttagtatttgccaaagcagaaattatatagtgtcagttatttcaggcaaaccttattcggctctcatccccaactatctgtcagaacaattaaaagagatcaaaacagtccagcataactaggcttcattatataaggccattttgttctaagacactaataaaccaaaataagaaatattaaaatcaaaataaaagatattatttgagctattttcatacaaactgttggttccttatatcctcccttctataataaagggcatattttactgcaaagaaaattttactttatatatatcactagccataaatttttgaatgtcattaattacatgttgtctagtaccattaaccaaatagcgtaactattttatgtccacatttcacttctgtatttacaaacatatcagtaaagagttaacaatgagatgcgatcaaacatccatattatctgttttgtagacagcaatgtagatgattttgtaatcacctttcatcggagtgaccttatataaaaaataagtcaataatttagaggttctaagtctccaaaggagattttcaaatgtaaatatagaaatggttatagataatgagatttttaggaaacctctgccatgtctgcatcctgttaactgttatatcatcttttcttccagctgcgttcctttgcctgcaacaggggtcaagatgagttttgcctgacttctttgatgtcctgaactttccgtagtcctttttcttgaatttgttcattataaatatagcttggcatttgtttgatcttttcaa

SEQ ID NO: 452 - DNA, 34927 bp, Homo sapiens
aagtcagggtgggacgtgggcgcggggagacaggtggtggctacgacggcgaagggagctgagactgtccaggcagccaggttaggccaggaggaccatgtgaatggggccagagggctcccgggctgggcaggtaaggagcgctggtattgggggcgcaggcgccggggtgagaggcctgatagcagacggctgcagctgtgcgggcccaggctccctagggatgcagcagccctttgtggctggggagagaagatcctcgctcaaggtcaggtgggaggcaggcagtgtagctgggtcgcctctttcctgcgaagctggtgtcgcttgcctctgtcgtgctgtccaccagtggccccacctgactgggagcgtgtttcctggacaccaggcacatggacagtcaggtgttaaaaaggcttccagaaaccaccaagcccagtccctcaggccatgaggatgaggctcctgaggcccagagagaacaaggcactcactgcccacggtttctcagcaaggcagtggcagggctgagagtgatggctgaggctgtggccaccccgcctggagcagggtgatggacaggctggactcagaggacccaggaatccttctggtttctggggcagaccccagtgacaagaatctcctgagaaagagagagagagagagagagagagagagagagagagagagagacagagatcacccaaggcatccagatggacatgcgaggagtgattttagcctcagcgatcgagggaagaatctcctgatgggcgtgaactgatatgtgtgggggtgtccatcatctgggatggagctccagggtggatggacatatctgatctgagtatgggaagttggaagtgaaagagaatgatgggagaaaggaagaggaagtactatttttatcccagacaggggtgcagttggtcctgggtgaggaagcgctgaacttccatctggaaagtcaccattcctgcccctgccaagcgtcacagcaggatgtcctcccctcgcccctggctccctcccgcttcagccctgcctgtgtagggccagttggttttgctgattcctgcttcaaaccccagggaggtggagagagactggggaggcatagttgctacctgctcacctcctcactttttaactctgagccttaatttttttgggaagtcctcactcagccagatttccaggtttcccctgcttcgttggagtttttcttgacacacactttccgcctagtcagctggtcccagcctttctcctgtctacagctccaagtcctgtagcctcttgtgggggctagggaacatggtggctctcctcgcacttcagggagggtcattcaccctggacaggcatgagcagttccttccacccagccctatgctgacagacgaatcagacagggtcccttgctcttgggccccaggaacagaggctcttctcaaagagagaagggccaagtggacaagggccaagaacaggctgagcattggttcagaggaggggagaaggtgtctcttaagatctggaaagcttcctgcaagagtcaagacagttctgagaaggagaaagacccattttcaagagtgcgtaggacatgaagccaaggtcactatccctggattctgttccttgggtaccacgagggcagagacctcagagcaagaccaaaggccagagagcccacaggtgtggtgtggagcagagaatgtgcatttcagagacaggccgacccagtcacaattccgctggaccatttccttgagcaagtggcttcatctctctctctgagcttcagtttacttatctgtaaagaggcaataatcaagctgggcacggtggctcacacctgtaatcccagcactttgggaggctgaggcgggcagatcatttgaggccaggagcttgagaccaggctggccgacatggtgaaaccctgtcttcgttaaaaatgcaaaattagccgagcgtggtggcaggtgcctgtaatcctagctactcagggggctgaggcagaattgcttgaacccgggatgcacaggttgtaatgagcagagatcgagtcattgcactccagcctaggcaacagagcgaaaccccatctcaaacaaaaatgcctcccgggttcaagtgattctcctgcctcagcctcccaagtgctaggattaacaggcgcgccaccatgcccagctaatttttgcatttttagtagagatggagtttcactatattggccaggatggtttcgatctcctgacctcgtgatccgcccacctcggccccccaaagtgctgggattacaggcatgagccaccgcacctggccagcacatagtaggtgtttaagggaggtggggcactccctccccctgcaaatgatgcaccaaagggagggctgtccacacccaaattatgcccactcagcaccttggtgggccagtgaaccacccattccctcacacttgtggtgtggctttgcaaatcagcctgtttcctgtatacagtgtgaggagtgtgagaactcaggcaggctggactctgagcggggccatgggatctactttagaagagggtctctcacgcagccacacacagacacacacacacacacacacacacaagccaaaacaccatacatatcatgggaaaatctacgtgtacagatgtgttcagaggcagggcaggggctacacataaaacacagactacatcctataactccatgcacacacccacgagctgatggcttcaaggccaagctcaattcagtgaaagtaattctcagtggggtggggtggggtaggtggtgaggagcaggtgggaccaaggtaccatccagtaatggggcctctcacaatcaacctcagtgttgattttaaagtatctggagctaggggtttgaggctgcagtgagctgtgatcgctccactgcactctggcctgggtgacacagctagattctgtctctaaaaaataaacacggcagagtgcagtggctcacgcctgtaatcccagcactttgggaggccaaagcaggtggatcacctgaggtcaggagttcgaaaccagcctggccatcatggtgaatccccatctccactaaaaatacaaaaaattagccaggcatggtggtgcatgtctgtaaacctccacctcccaggttccagtgattctcctgccttagcctccccagtaactgggattacaggcgtgtgccaccatgtctggctaagttttgtggggtttttttggtttgtttgttttttgtttttttgagacagagttttactcttgttgcccaggatggagtgcagtggtgcgagcttggctcactgcaacctccgtctccctggttcaagtgattctgctgcctcagcctcccgagtagctgggattacaggcatggaccaccacgcccggctaattttgtgtttttagtagagatggggtttctccatgttggtcaggctgatcttgaactcccgatctcaggtgatccgcctgcctcagcctcccaaagtgctgggattacaggcatgagccacctcgcccggctgtttttgtttctaattacaaaattagcacattgctgttttaaaaacactcaaacaggccaggcacagtggctcgcacctgtaatcctagcactttggggggccgtgatgggaggatcacatgggcccaggagtttgagacctgcctgggcaacataggcagaccccatctctatttaattatttaaaaaaaaaataaaatttaaaactcaaacagtaagaggcatataaagaaatacaagaaatgcagcctcctccaatcccacttctgggatatgcccatcgtgaaaaatttggtgtgtgtccttccagattttcccatgtatggctgctgaaaaacatggaggttaagtctagtctctgcaggctggcagaccgggactcacttcacaactccactgctcatttgtttgttatgaggcctcagacaaatcattttacctggtttgggcctcagtctttgcatctgtaaaatggggataataatagcacttcataggattattatgagaattacatgaaataatgcaaataaaggcttagcacagagcttatttaaaagaatcccctgtatacatatgtcaatgcaaataggcatatactctgcattctgttctgcaacttgcttgccatggtgtatgcgggatgtctttccgtgtcaatacatgtcaatacaaaatacctcatccttttaactgtttcactaaacgttagcttggtaaatggttaacggtggtgattttgaaatgttacttcctggcaagtgttgctgtcatgtgcggccatgttgtcggcagtcacagatattattgatcagtgagctaactacaagccttatagcctcctgtgaaaatgaagtgacccaccagaggggcacccacctctgtcacagagggcagggccaaatgcatgggacgctctctgtctgcttacttctgcatcctcagctctaggtcagaatctggcacataggaggtacccattaaatttattttttttttttttttttttgagacagtgtctcagtctgttgccccggctggggcacatggtgtgatcatagctcactgtaacttcacacacctgggcttgagtggttctcccacctcagcttcctgagtagcctaggactacagatgtgtaccaccatgcccagctaattataaaaaaattcttggccaggcacagtggctcatgcctataatcccaatactttgggaggctgaggcaggaagatctcttgagactaggcattcaagactagcctgggcaacatagcaacaccccgtctctattaaaacataataataacaatacaatttatttatttatttatttagttatttatagatggagtcttgctctgtcacccaggctggagtgcagtggcactatctcagctcactgcaacctctgtctccgggttcaagcaattctcctgcctcagcttcccaagtagctgggactataggcacatgccaccaagcccggctaacttttgtatttttagtagaaatggggtttctactaaactcccaacactttgggagggtgaggtgggtgcatcatctgaggtcaggagtttgaaaccagcctggccaacatggtgaaaccctgtctctactaaaaatacaacaaattagccaggcgtggtggcaggcgcctgtaatcccagttacttgggaggctgagacaggagaattgcttgaactcgggaagtggaggttgcagtgaaccgagatcgtgccattgcactccagcctgggcaacaagagcaaaactctgtcttaaaaaaaaaaagtgtgtggagataagatctcactattttgcccaagctgcactcacactatgtatggtctcaagcaatcgtcctacctcacccattacatttttgtcaataggccagctcctttaatccacaagcagcagcctaagcccaaagttctctcttgcagtgtggcatttcctaaaatatgacctgtacaccactcaggtgtgtaagtgattttaggggataatggatgaccatttacgaatgttaatttatgtgtttattttagtgtgcgctgttgtttcacttctatttatgtctcatgattctggttttccatttatggtagtaaagtttccattttaggtacatatatcaaacgtgaaaaggtagcccgtggaagtgccaaaaatcatgaaggaaaatgaaaatgatcaatcattttagcctgaaagatgtttaaggccagtgtctatgtagcaagcactatgttaagcattttattatatgagatcatctatatatcacgtataatgctcaccacagccagccttagatgcaagtcttatttttgtcatcattttgctgatgaaggaactgagggaagtgcagaggtttagtaagctgcccaacaaccttctgccagtaagtcttgttttttttttttttgttttttttgtttttttgagacaaggtcttgctctgtcgcctaggctggagcgtagtggcccaatcttggctaactgtagccttgacctccccaatctcaggtgatcctctcacctcagcctcccaagtagctgggaccacaagcatgggacacaaagtccggctaatttttgtattttttttgtaccgacggggttttgccatgttgcccaggctggtctcaaactcctgggctcacgtatctgtctgcccaccttagcctcccaaagtgctgggattataggtgtgaaccaccacgcctggtgcccttctgccagcaagtgattgggagaacctggattgaatttgggttgccatggcatggacatggtgaactgagcttccagagctgccagactcccagaaacgtttataaagcagtgtggattgccaagctgtaagtaaggctccatcctaataaaactgtccatgatacaaaaagcacaccaaagtacccaagggagcggactcagtaaaagggattatcaggtatattcacgttactggttgggggacttctactaaaataccaattagaataattgctctatatcccttatttatagcgatacttgactagcagaatcagttctatgttcaagacactcccaatttgtgaaaataaatccattttgtttgcatccaaaataatgcttttttttttgttctctctgtgtcgagaggctacagagttcattcaaaaaaggtattaagccaggtgtggtggcttgcacctataatcacagcattttgggaggccaaagcaaggggactgcttgagcccaggagctcaagaccagcctggggaacataggcagaccccgtctctacaaaaaataaaaaaattaactgggcttggtggtgtgtacctgtggtcccagctactcaggaggctgaggtgggaggatcacttgagcccaggtggttgaggctgcagtgagccatgatcatgccaccgcactccagcctgggcaacagagtgagatcccatctctaaaggaaaaaaaaaaaaaagagagagagcggaattaaagccaggtgcagtggctcctgcctgtaatcccagctattcgggaggctgaggtgggaggattacttgaggccagaagtttcaggttgcagtgagctacaatcatgtgctgtactactccagcctgggtgacagagtgagatgtgagactccatctctttaaaaaaaaaaaaaaaaaccaggctgggcgcagtggctcacacctgtaatcccagcactttgggaggcggaggcaggtggatcacaacatcagaagttcgagaccagcctgaccaacatagtgaaactaaaattagtttctactaaaaaacacgtctctactaaaaatacaaaaaattagctaggcatggtggcgggtgcctgtaatcccagctactcgggaggctgaggcaggagaatcgcttgaacctgggaggtggaggttgcagtgagctgagatcacgtcactgcactccagcctgggcaacagtgcgagactccgtctcaaaaaaaaaaaaaaaaaaaacccagcctgtgtgacgtggtgagaccctgtccctactaaaaatacaaaaattatccaggcgtggtgttgcccacccatagtgccagctactcaggaggctgaggtaggaggatcacctgagctatgggaggtcgaggctgcagtgagccatgattgtgtcactgcactccagtctgggccacagagtgagataccatctcaaaaaaaaaaaaagtattatgtatttaaacaaatatgaaaaaggaggtagcccaggacacatccctgatttacccactagaaattaattactgacggggcacggtagcccatgcctgtaatcccagcactttaaggggctgaggcagtggattgcttaagctcaggagtttgagactagcctgagcaacatggcaaaaccctgtctctacaaaaattaaaaaaatacaaaaattacccgggccctctcattcacagcttctcaggtaaaaaaaaaaaaagaaaaagaaaaagaaaaaaaaaatagctggaggctgggtgcggtggctcatgccacacctgtaatcccacactttgggaggccaatgcaggcagatcacttgaggccaagagttctagactaccctggccaacatggtgaaaccccatctctactaaaaatacaaacattagccaggtgtggtggcacacgcctgtagtcccagctcctcgggaggctgaggtaggataattgcttgaacctgggaggcagaggttgcagtgagccgagattgcaccactgcactccagcctgggcgatagagtgagacttcatctaaaaaaataaaaataataataataataataatgataataataatagccaggcgtggtggcacatgcctgttgtcccagttactcaggaggctgaggtgggaggattgcttgagcccgggaggtcgaggcttcagtgagctgtgattttgccactgcactccagtggcacaagagagcaagagagcaagagggcaagaccctgtctcaaaataaaataaaataaagaaagaaattatttgccatgcctgctagccctgattcttgatattgcttgatattgtcatgagggttctatgtgggcatgaatagctaaggctctttattgaacatgggcagctttgtcattaatcaagtctgggtcggggcaaaggcgaagaaaatgttttaaatgattcatttttttttaattttatttttatttttattttattttattttatttttgagacagagtcttgctctgtcgccacgctggagtgcagtcccgggtttaagcaattctcctgcctcagccttccgagtagctgggactacaggtgtgcaccaccacgttcagctaattttttgtatttttagtagagatgaggtttcgccatgttggccagaatggtctcgatctcttgacctcatgatccacccacctcagcctcccaaagtgttggggttacaggtgtgaaccactgcgcctggccttttatttttatttttacagagacaaagtctcactatgttgcccaggctggtcttgaacttctgagctcaagtgattttcccatctcggccctaggattacaggcgtgagcctccagccctggctattctaaatgatttctgacagattttgccatgaggtggtccagagtacaacaatggtctgcagtagaatagtctgcttgttcttttttcttttttactttttgtgctctacatgttcagagaaactgaactaaagaaatgatccctaaaggaagtatagtcttgtctgctgttttttgtgttgctttgtttgttttgttttgtttgagagaggttcttgctctttcccccaggctagagtacagtggtatgatattggctcactgcaacctcaacctcctgggctcagcgatcctcctaccttaacctcctgagtagctaggactacaggcgtgcaccaccacacctggttaatttttgtattttttgtagagatgagttctcaccatgttgcccaggttggtcttgaactcctggcctcgagtgatccttccactttggccttccaaaatgttgagattactggcgtgagccattgcatccgaccacctgcctgttcttgatgtaaagcattggcccaagaaactcagccacgaagctggcacacattttggacaaaatgttcaataaatcaataggtctatagttggaggagaaaaaatgttaacttaaaaattttttttaatttaatttaattaattttttctttttttgagacagggtcccctgtcgcccagactggtgtgcagtggtataatcacggctcactgcagccttgacttcctgggctcagtgatcctcccacttcagcctcctgggtagctaggactacaggcaaatgccatcacgccatcatgcttggctaatttttttttttttttttttttttttgagacagagtctcactccatggaccaggctggagtgcagtggcgtgatgtccactcactgcaacctccgcttccccagttcaagagattctcctgctggccgggcatggtggtggctcaagcctgtaatcccagcactttgggaggccgaggtgggcggatcacgaagtcaggagttcaagaccagcctagccaacatagtgaaaccccgtctctactaaaaatacaaaaattagctgggcctggtggaacgtgactgtaatcccagctacttgggaggctgaggcaggataatcacttgaacctgggagttggaggttgcagtgagccgagatcgtgccactgctccctagcctgggcgacacagtgagactctgtcctctgtctcaaaaaaaaaaaaaaaaaaagggccaggtgtggtggcttacacctgtaatctcagcactttggaggccgaggtgggcagatcatgaggtcaggagtttaagaccagcctgaccaacatggtgaaaccccgtctctactaaaaatacaaaaattagccgggcatactaggcgcatgcctccaatcccagctactccggaggctgaggcaggagaatcgcttgaacctgggaggcagaggttgcagtgaaccgagatcacaccattgcactccagcctgggcaacagaactagactctgtcagaaaaaaaaaaaaaaaaaaaaaaagagattctcctgcctcagcctcccaagtagctcaagtagctgggactacagtcacgtgccaccacacccagataatctttgtatttttagtagagatggggtttcaccatgttggccaggctggtctcaaaatccagacctcaagtgattcacctgcctcggcctcccaaagtgctggggttacaggtgtgagccacggcccccggtagccggacgccggccactaattatatagctgagcatggtcgggtgccgtggctcacacctgtaatcccagcactttgggaagccgaggcaggtgaatcacttgaggactggattttgagaccagcctggccaacatggtgaaaccccatctctgctaaaaatacaaaaatcagctgggtgtggtggtgcgtgcctataatcccagctacttgggaggctgtggcaggagaatctctttttcttttcttttttttttttttgatggagtctagttctgtcacccaggcttgagtgcaatggcgcgatctcggctcactgcaacctctgtctcctgggttcaagcgattctcctgcctcagcctcctgagtagctgggattacaagcatgcgcctagtacacctggctaatttttgtatttttagtagagacggggtttcaccatgttggtcaggctgctctcgaactcctgggctcaaggagtcctactgcctcagcctcccaaagtgctgggattacaggcgtgagtcaccatgcccagactccttctggtcttagtttgataaagattgctgagtagccaacatgatctaaccaggttaataaatgaggtcagtaaaaagaaaatcaaaattaaagcttaatataaatttctcattgtctgaaagaaagaagtggaggaagggagaaaaaaaaaaaaaaaaaaacagatgaaaggaatccccagggctcccagaaccagcaatgagggcagattctggggtgaatgaaacaggacattcttttctcccaatttaggaatccaaggtcacgagtaagaatttcatagattcgaggctgcctctgactagggcatgtaatgttctcagtcaaacttaaggctgcccgtggtccacagaacattttgtgatgattataaaaaggccacaggccaggtctggtgactcatgcctgtcatcccagcactttgggaagcggaggtgggcaggccacttgaggttgggagttcgagaccaacctggccaacatggtgaaaccctgtctctactaaaaataataaaaattagcgggcatggtggtgcatgcctgtaatctcagctacttgggaggctcaaacaggagaaattgcttgaacccaggatgtggaggttgcagtcagctgcgattgtgccactgcactccagcctgggggacagaggaagactccgtctcaaaataaataaaataaataaataaataaataaataaataaataaataaataaataaaaattagactgggcatggtggcccatgcctgccatcccaacactttcggagtctgaggtgggaggactgcttgagcccatgagtttgagaccagcctgggcaacatggtgaaaccttgtcactgcaaaaaagtaaaaataaaaggctgggcatggtggcttatgcctgtaatcccagcactttgggaggccaaggtggcaggttagtaatcccagcactttgggaggccaaggtggcaggttacttgagcccaggagttcaagaccagactggccaacatggtgaaaccccatcattacaaaaaacacaaaaattagtcaggcttggtggcatgggcctgcagtccccactactcaggaggctgaggtaagaggatcccttgagcacaggaggcaggagtttgcagtgagctgagacagtgccactgcactgcactccagcctgtgcgacagagcaagaccctgtttaaaaaaaaaaaaagaagaagaccggaaggatggggtatacccacattttgtataaacagatgtatgcctatatgacttcacaattacatagggacggtcgctgctattcatagtctcattctgttatatatccctctgcacacacagactcctgcaaacccacagatatgcacccataagcacagggctcactgcatatgttttcatatgcacagacttgcattcaacaggcaggtaaatatatacccagaaacgtgcattccaggtagaggggggattgtcttgaagagaaaagcctttgttaacagcacagtggtcaaatttttgatgggaaatggaccctaccctgtcagacctgccttcctgcctcacattctcctagacctctcagccctccccctccacccttagactttccagggagtgaaaagtagaggagaggatcttgataaaggatgtaggagccaagccaggcatatgccagcaatcccagctatttgggaggctgaggtgggagaagcgcttgagcccaggagttagagaccagcctgggcaacgtagtgagacctcgtctaaaaaaaaaaggatgtaaggttttgatatgagttttgcatctgccaggaaccctcagtgtattattgggacaatcactgaacctctccttttccccagttttaaaatgaggctgatgaactgtatttgtgtttcctaaactcttgtgaagacaaagtgtcttttaccattccctgttctacactccctcttccccacatggatctcatgattttaaagtttttacctactaagctacctcatttagatgcaaattttcttattttcaagttaaaaaaatttttcttttaatagagaaagggtctcaccacgttgcccaggctggtctcaaactccggggctcaatcgatcctctctcctcagcctcccaaagtgctgggattacaggtgtgagtcactgcacctggcctcaagtttacattttaatcaaagatttggctgggcacagtggctctcgcttgtaatctcagcactttgggaggccgaggcaggtggatcacctgaggtcaggagttcaagaccagcttgggcaacatggtgaaacctcatctctactaaaaatagagagattagctgggcgtggcggcacgtgcctgtaatcccagctgctcgggaggctgaggcacggaggttgcagtgagccaagattgcgccactgcactccagcctgggtgacagagtgagactttgtctcaaaaaaaaaaaaaaatgtaatcagcgatttaattaagtatgcaatgaagaaataaataatacaatttgtcaaaacaagaaacaaagtatagtggaatttcctttcagatttttgaaatattaaaataacctaaaggcctccccggcactagcctgggacttcctgggagcatgtaaacttcaggctgggagcctctgactacaaacatttctggcattgccagatcctatggacttacgattgctgccaggccctatcctccaaagctcacatgcttatagagggcaggaactgccacctgtagctggggggccatagaggaaacagtagaggccagataccctgcaaagctagagttcctctgatcttaatttaacataggctgactttttctcactttttgcccagtcttaagtcggggattttctggcccagattcagtccagaatctaggacctgccttgcatgctttcctggatcctagcccaaggccttgtgattccttttccctccccacctgaccccagcctggaccaggtaccagcttccagccccatgatctccaacctagattccttctgcttcttctactggccttttctcactgttgcaccatagtttatctcttctccttctcctcctccttcttcttcctcttctttttttcctttatatagagactgagtcttgctacgttgcccaggctggtctgaaactcttggcaattctcctgccttggtttcccaaagggattacagacatgagctacagcacccggccttgttttgagacagggtgttgctctcttgctctgttatccaggctggagtgcagtggcgtgttcacggctcactgccgcctcaacctcccaggctcaagtgatcctccccactcagcctcctgagtagctaggactacaggggcgcaccaccatgccctgctaattttcagattttttttgtagagataaggtctcactgtgttacccaggcactggtctctaattcctgggctcaagagatcctcctggccgggcacggtggctcacgcctgtgatcccagaactttgggaggctgaggcgggcaaatcacaaggtcaggagatcaagaccatcctggctaacatggtgaaaccccgtctctactaaaaatacaaaaaaaaaaaaatagccgggcacagtggcgggcgccggtagttccagctactcgggaggctgaggcaggagaagggcgtgaacccaggaggcagagcttgcagtgaatgagtcgtgatcacgccactgcactccagcctgggcaacagagcgagactctgtctcaaaaaaaaaaaaaaaaaagagagatcctcctgcctcagcctccaaaagggctgagattataggcctgagctactacgccctttcttcctcctcctcctcctccgccaccaccacctcctctcctccttcacctcctcctcctcttcctcctccccctcctcatccctctcctccccctccccttccccctcctccccatccccttccccctcctccccctccccttccccctcctccccctcctcttccccctcctcccctccccctccccttccccctcctccccctcctcttccccctcctccccctccccctccccttccccctccctttctttctcctccttcttcttctttcccatctctcccttcctcctatacattccctcttcttaacctcaaacttctacaatctttctcttgcctttttctaaaggctccaagaatgtcaagcctggcagggaccttactggtctaagtccacattccatctgatgttggtattctctttacaacacaaccaacttgtggtttcctaaggctcatacgactatcacaaacaacaggatgctcactacctcacaaaacagctcagcttatctgagaccagttccaggttgctgttagtcctttactgggggctcttgttgctaattactctcaggctataatagtcaaaaagtcatttgcagtcacagatgggtgcactctggtctagcaggatttcccaaatgtccacctccccccaggactcctaacagtaggggaaagagtgaatacgtacccttttcctggaaagtttcttgatttgatttaaaattccatgcacattttgcattttcctccataataggtcatgtttgtttaacttacatgaataaggtcaggaaacactcatgctctggaaaaatgcacaccatgacatgacttccggtacccatgggaggctgagtatctcagtttaagaaacaggagtcgagctgggcacggtggctcacgtctgtagtcccagcactttgggaggtcgaggagggcagatcacctgaagtcaggagttcaagaccagccagaccaacatggtgaaaccctgtctctactaaaaatacaaaattaggccgggcatggtggctcatgcctgtaatcccagcactttgagaggccgaggcgggcagatcacctgaggtcgagagattgagaccagcctgaccaacatggagaaatccagtctcttaaaaaatacagaattagccgggtgtggtggcacacgcctgtaatcccagttacttgggaggctgaggcaggagaatcacttgaacctgggaggtggatattgcagtgagccgagatcacaccattgcactccagcctgggcaacaagagcgaaactctgtctcaaaaaataataataataaggccgggcacagtggctcacgcctgtaatcccagcactttgggaggccgaggcaggaggatcacaaggtgaggagattgagaccatcctggcaaacacgatgaaaccccatctctactaaaaatataaaaaatcagccaggtgtggcggcacgcgcctgtagtcccagctactagggaggctgaggcaggagaatcgcttgaacccaggaggcggaggttgcagtgagctgagatcgcgccactgcactccagcctgggagacagagtgagactctgtctcaaaaaaaataaaaaagaaaaaagtaatgagagaaatgcaaatgcagaaagagaaatgcaaatgcctggcagtatgttgggcttcttttcaaaacttaaaaaaatttattattattattcatttatttatttactttagacaaggggtcttgttctgtcacccaggctggagtgcagtggtgcaatcgtagctcactgtggccttgaactcctgggctcaagtgatcctcctgcctcagcctcccaagcacctgggattataggcatgcaccaccatgcccagctagtttttataataataataataataagaggcttgcttgaggtgatggatagctcatttatcccttttgtgattattacacattgtatgcctctatcaaaatatatcatgtaccccataaacatatatacttaccagatacccataaaagtaaataaataaataagtaaataaataaatatacaaaattagccgggcgtggtggcacatgcctgtaatcccagctacttgggagactgaggtaggagaatcgcttgaacctgggaggcagaggttgcggtgggccgagatcgtgccattgcactccagcttgggcaacaagagcaaaactccgtctcaaaaaaaaaaaaaaaagaaaagaaaagaaacaggagtctagggctgggcacagtggctcattgcctgtaatcccagcactttgggaggctgaggtcaggagttcgagaccagcctggccaacgtggcaaaactctgtctctactaaaaatacaaaacacaaaatacaaaaattagccaggcgtggtggtgcacgcctgtagtcccacctgcttagggaggctgagggaggagagacagagcttgcagtgagcccagatcacaccactgcactccagcctgggcaacagagcaagtctaaaaaaaaaaaaaaaaggaaagagagaaaagaaacaggagtctaggctgggcatggtggttcacgcctgtaatcccagcactttgggaggctgaggtgggtggatcacttgaggtcaggagttcaagaccaccctggccaacatggtgaaacccccatctctactaaaattacaaaaattagctgggcgtggtgacacatgcctgtagtcctagctagtcagggggctgaggcaggagaatcacttgaacctgggaggtggaggttccagtgagccaagttcacaccactgaactccagcctaggtgacagagtgagattctgtctgtttttttttcttttgagatggtatcttgctctgtcacctaggctagagtgcaatggcgtggtctcagctcactgcaacctccacctccatggttcaagcaattctcctgcctcagcctcccaagaagctgggattacaggcgcgcaccaccacgcccagctaatttttgtatttttagtagagacagggtttcaccatgttggccaggcttgtctcgaactcctgaccatgtgatttgccctcctcagcctcccaaagtgctgggattacaggcatgagccaccgcgcccagccgagactctattaaaaaaagaaaaaagaaagaaacaggagtctaaagcaaaggagattaattacccagtcccattcttccaccttccaaagcaggagttggtaggacagaattgtgcactggtgaaagtgtttctaagcactaaactaagctaacattcatgtgagcttatgagaaatggatgaagagccccatttgacagaagaggaaaagtgaggcttaggaggaatgatttcagcaaagtcacacagtaagtgtcaaaattgctatttgaacttaggtctctaactatggggacagtcttctgagttttgctaatgagaaacttccactgctccctgcttccacttagacccagcatgaattctctctctctgtctctcttttgttttttctttttagacagagtctctgtcacccaagttggagtgaacagtgcggtggcagtggcaggatctaggctcactgcaacctccacctcttgagttcaagcaattctccagccaccatgcccagctaactttttttttttttttttttttgtatttttagtagagacagggtttcaccattgttggccaggctggttgtcttgaacttctgaccccaggtgatccacccaccttggcctcccaaagtgctgggattacaagcatgagccaccgtgcccagcctgctcttttgagatggagtctcgctctgtcatccaggctggagtgcagtggcttgatctcggctcactgcaacctctgcctcccgggttcaagtgattctcctgcctcagcctcctgagtagctgggattacaggcgtgtgccaccatgcctggctaatttttgtatttttagtagacacggggtttcaccatgttggtcaggctggtcttgaacacctgacctcgtgatccacccgcctcagcctcccaaagtgctgggattacaggaatgagccatcgtgcccggacttttttttttttttttttttttttttgagacggacggaatctcactctgttgccaggctggagtgcaatggcgcaattccggctcactgcaacctctacctcctgggtttaagcgattctcctgcctcagcctcctgagtagctgagattacaggcacctgccaccaagcccgattaatttttggatttttagtagaggcagggttgcaccatgttggccaggatggtctcgatcccttaatcttgtgacccacccgccttggcctcccaaagtgctgggattacaggtgtgagccaccgcgcctggcctttttttttttttttttgagacaggctctcgctctgttatccaggctggagtgcagtggcacaatcgtagctcattgcagccttgagctcctgggctcaagtgatctttttgcctcagcctcccaagtagctggaactacaggcatgccccatcacacctggctaattttttgattttttttctagagatgaggtctcactatgttgcccaggctagtctggaacttctgagtttgaatggtcttactgcctcagtctcccaaagtgccgcgattacagatgtgagccaccacgcccggccagcaactccagctttgctctactccaaataggttgtgtgactttaagcatacctctgtgggcctcagtttgctcatctaaaatcagaggtttagccaggtatggcagctcatgcctgtaatcccagcactttgggaggccaagaaggaaggatcacttgaagccaagaatttgagaccagtccgggcaacatagcaatacccccatctctagaacaaataaaaaatcacctgggctcagtggtgccagctacccaggaggctgaagttagaggatcacttgagcccaggagtttgaggttccagtgagttaggattgggtcattgcactgcagtctgggcaagagagtgacactttatctcaaaaataaatcaacaaataataaaattggagattaggcttgctggtttctaagacctttgcagatgggagactctatgcattaacactgcatgttccagttgacatttattaactaattttgggtgctggtggctttcagacaaataaactacagcttctgctcttgatgaacccccactctcatcaaaggtatgggagaggcagtgggaccctggggctgacatgtaaatcagtaatcatggaactctgtgtctaagttgattattgaggtctgaatagaatgttgcaggagactggggtgagagggaagcaaagagcattgggaagtcttcagactaggtgatatttaggccaggtgcctgtaatccgagcactttgggaggctgaggcaggagaattgcttgaggccaggagttcgagaccagcctggccaacatggtgaaaccctgtctctactaaaaatacaaaagttagccaagcgtgatggtgcatgcctgtaatcccaactactcaggaggccgaggcaggagaattgcttgaacctgggaggtagaggttgcaggaaaaaaaaaaaaggtaatatttcagctgagccttgaaggttgagttagaattcagcagttggacaaaagagagcatgccgactgggttcggtggtgcatgcctataatcctagcatttggggaggccaaggcaggaggattgcttgagcccaggagttcgagatcagactgggcaacatagtgagacctcatctctacaaaaaaataatcagctgggcatgatggtgtgcacctttagtctcagctactggggaggttgaggtgggaagattgcttgagcccaggaggtctaaggggattgcgccactgcacttcagcctgggagaggaagggagaccctgtctcaagagagagagagaaagagagagagagagagaaagagagagagagagagaaagagagagagagagagagagagagagcgagagagcgcacgcatttcaaagcagggagaaccacaagtacaaaggcattaagtaagaaaatagcatggggtgtttgggaaaggcaagaatagttcagaacacaggctgtgtgtgtgggggtgtgtgggggtgcctgtgtgtgggtgtttgtgtgtgtgtgagtgtgggtgtgtgggggtatctatggaggggatgcctgtgtgtgtgtgtaaggtgagtgtgtggatgtgtgcatgggtgtgggtgagtgtgtggaggtgcctgtgtgtgtgtatgaatgtgtgttggggaggggagaatgtgtgtgtgtggggtgagtgcgtgtgtgtgggggtgaatgcgtgtgtgtgtgtatgtgggtgtgactgtgtgggtgtgtggacgagtgtgtgtgttcctgggtgtgggagcctgtgtgtgtagggggagtatgtatagggtgtgtgcatgaatgtgtgtgtgggtacgtgtgtgagagtgggtgcctgtgtgtggggggtgagtgtgtgtgtgggggggcacttgtggagggtgagtgtatgtgtttactgagtgtgagtgtgggtgcctgtgtgtgggagggtgagtctgtgtgtgagtgtgtgggggagtacctgtgaggggtgagtgtgtgtgtttatgtgaaagtgtgtgtgtgtggatgcctctgtggaggtgggatagggggtgcctctgtgtgtgtgtgtgagagtgtgtgtgtgtagggtgtgtatatgtatagggtgtgtgtgagtgtgtgtgtgtgagagagtgtgtgtgtggcagaatagactgcggaggtggatttcatcttgatatgaaaggtctggaatgcatggtacattaaactttgaggacagcgctttccaagcactctgaggagcagccctagagaaggaggagctgcagggactccgggggcttcaaagtgagggccccactctgcttcaggcaaaacaggcacacatttatcactttatctatggagttctgcttgatttcatcagacaaaaaatttccactgctaaaacaggcaaataaacaaaaaaaaagttatggccaacagagtcactggagggttttctgctggggagaagcaagcccgtgtttgaaggaaccctgtgagatgactgtgggctgtgtgaggggaacagcgggggcttgatggtggacttcgggagcagaagcctctttctcagcctcctcagctagacaggggaattataataggaggtgtggcgtgcacacctctccagtaggggagggtctgataagtcaggtctctcccaggcttgggaaagtgtgtgtcatctctaggaggtggtcctcccaacacagggtactggcagagggagagggagggggcagaggcaggaagtgggtaactagactaacaaaggtgcctgtggcggtttgcccatcccaggtgggagggtggggctagggctcaggggccgtgtgtgaatttacttgtagcctgagggctcagagggagcaccggtttggagctgggaccccctattttagcttttctgtggctggtgaatggggatcccaggatctcacaatctcaggtacttttggaactttccagggcaaggccccattatatctgatgttgggggagcagatcttgggggagccccttcagccccctcttccattccctcagggaccatgggctgtggctgcagctcacacccggaagatgactggatggaaaacatcgatgtgtgtgagaactgccattatcccatagtcccactggatggcaagggcacggtaagaggcgagacaggggccttggtgagggagttgggtagagaatgcaacccaggagaaagaaatgaccagcactacaggcccttgaaagaatagagtggccctctcccctgaaatacagaaaggaaaagaggcccagagaggggaagggaatctcctaagatcacacagaaagtagttggtaaactcagggataacatctaaccaggctggagaggctgagagcagagcaggggggaagggggccagggtctgacccaatcttctgctttctgaccccaccctcatcccccactccacagctgctcatccgaaatggctctgaggtgcgggacccactggttacctacgaaggctccaatccgccggcttccccactgcaaggtgaccccaggcagcagggcctgaaagacaaggcctgcggatccctggctgttggcttccacctctcccccacctactttctccccggtcttgccttccttgtcccccaccctgtaactccaggcttcctgccgatcccagctcggttctccctgatgccccttgtctttacagacaacctggttatcgctctgcacagctatgagccctctcacgacggagatctgggctttgagaagggggaacagctccgcatcctggagcagtgagtccctctccaccttgctctggcggagtccgtgagggagcggcgatctccgcgacccgcagccctcctgcggcccttgaccagctcggggtggccgcccttgggacaaaattcgaggctcagtattgctgagccagggttgggggaggctggcttaaggggtggaggggtctttgagggagggtctcaggtcgacggctgagcgagccacactgacccacctccgtggcgcaggagcggcgagtggtggaaggcgcagtccctgaccacgggccaggaaggcttcatccccttcaattttgtggccaaagcgaacagcctggagcccgaaccgtaagtggggacccgtcgtgggggtgggtaggagcagatctagggatcctggagcagggagtaggcctggggtggcggtgaaggcttgagggccacggaggaagatccgacgacagccgacggccttcgttcgcttccgccctgcacagctggttcttcaagaacctgagccgcaaggacgcggagcggcagctcctggcgcccgggaacactcacggctccttcctcatccgggagagcgagagcaccgcgggtgagcgggcggcggtctcgaccgggcgcgggggtgccccggggtgtgcccgagggggggcgcagggtgagcccgaggtggagacacggggtgagtcggagggggacgcgggatgagcccgaggtgggggcgcgggatgacccggagttgggggtgctgggtgagcccaaggtgggggcgcggtggcgggccagactcactgcgttctttcgtcgctttgtccatccattcattcattcaggatcgttttcactgtcggtccgggacttcgaccagaaccagggagaggtggtgaaacattacaagatccgtaatctggacaacggtggcttctacatctcccctcgaatcacttttcccggcctgcatgaactggtccgccattacaccagtgagcccgacgggacccctcccccgtgccctatcagcctatctcccctcagtccccctcaggtgtcccccatccatctttcaatgccctactccattccccgcagtgggtgaggtgtggaacctgaccctacggccccaagtgtttgggtgacagccccacacccccttgctagtccacttcacctagatgggggcttggagaagtgggggaggtggtgtcaatacgaggcctgccctattgacagccttcacccctccctcgtcctcgcagatgcttcagatgggctgtgcacacggttgagccgcccctgccagacccagaagccccagaagccgtggtgggaggacgagtgggaggttcccagggagacgctgaagctggtggagcggctgggggctggacagttcggggaggtgtggatgggtgagtgtggcctccaggactgcctgggaagaggggaacgggaggggccgctgaggtgatgagagtcccaggacagctgcctggcgactttcccactccttcccttccccgacccagggtactacaacgggcacacgaaggtggcggtgaagagcctgaagcagggcagcatgtccccggacgccttcctggccgaggccaacctcatgaagcagctgcaacaccagcggctggttcggctctacgctgtggtcacccaggagcccatctacatcatcactgaatacatggagaatggtgggtgctacccgagtcggctaccaggggatactgctctccctgctgtccctgccagagggtggaaatacaccttttcttctggcccaaagctcaagcaaggagggtttcttgagctttcctgccccctggagactcacctccagccgggcgcggtggctcaggcctgtaatcccagcactttgggagccgaggcgggcagatcacgaggtcaggagttcgagaccagcctgaccaatatggtgaaactctgtctctactaaaaatacaaaaagtagccaggtgtggtggcacatgcctgtaatcccagctactcagaagactgaggcaggagaatccctttaatccgggaggtggaggctacagttgcagtgagctgagatcatgccactgaactccagcctgggtgacagagcaagactctatcaaaaaaaaaaaaaaaaaaaagactcacctccaggcatgagaaaaaggtgtatcctctgatctgatcctgtctgggggcaagcctaaggtggcaagaatgttctggaagagcattcaccccaaccttccctgacctgccattctgtttgccttcttcaaagccctaccttgatctcaggatgcttgatctcagaaagcaagtgggtccctagccctgtttctctcccttctgcccctgagccctaggagggcagatctgcccccaaagccctctttttcagttctgagtgagacccccacccctgcacccctcttggtctgttactggacagagtgagagccccaggaagaggaatatgagtttctagcttcagctttgttcacaccgatttgccgtgtgacaggccaagtgcctgcactgtctctggtgctcagtttccccaagtataacagcagaaatctaaatgggctcaccagaaataatacagagtattcatcaaggcctctagagtctgactgcctgggtcagaagcctggcttcatgattttatggctttgtgataattatatcacctctttctgccatggtttcctactataataacgcgttagtaacttcctcacagggtcttgtgaggatgaaataattaatgcatacagagcagttagaactatgcctacttccaggtgctgtggctcaagcctataactccagcactttgggaggccaaggtgggtggatcacttgagcccagaagttcaagaccagtctgtgcaacatagcgagacttcattcctacaaaaaaatgtttaaaaattagctgggcatagtggtgtatgcctgtagtcccagctacttgggaggctgaggtgggaggatcacttgagcccaggaggttgaggctgcactgagctgtgattgcaccactgcactccaacctgggtaacagagcgagaccttgtctcaaaacaaaaaacccacaaaactatggctaccatatagtaactgatcaataagtttgttgctgttatctggctctgattctttgggagtgtaagatctatccttttttcaggaagagaaacaagctgttcattggctaatgggaaatggcaaatagattatgtcatgtgtatcttttttttttttgagtctcactctgtcctccaggctggagtgcagtggcatgatctcggctcacttcagcctccccctcctgggttcaaatgattctcatgcctcagtctcccaagtagctgggactacaagcatgtgccaccatgcctggctaatttttgtatttttagtagagacaggttttcgccttgttggctaggctggtctcgatctcctgtcctcaggtgatcctcccgccttggcctcccaaagtgctgggattacagatgtgagccaccatgcccagcctatcatgtgtatcgactttgattggtagttgcttgtagtgctggagaaggattctgaggttcattggaagtgagtgccaggaatgattagtaacatctgccatggatacaatggaagaatggcagtatatctatgtctatgtatttgctgtgtgtaggtgaggtctttgtctttggtaactagttcagcactcaaagtggggacactcaggttgctgtcatccttttacagggttttaatctcttgggaagggccattggtcactcactgcatcctagcaactcccatccatgtccagctgccctccactattagagaggtggtccctcagacccccagaccccctctttcttattccatccaatatattcagcacatagttattgtttcttactctcggctgggcaccaggaacatggatggatgaaacaaggttcctgttgtcagggaaacctgattttagttacagctactggggaaaccagagtttgtgccatgggaaagttccagcatgcccatgggagtgtagatgatgatccagtttattatgcctggtaggatctagagaggcttcctagtggggcagtctagcagggccacgaaagaaaagtagaattttttttagcaggcagagatgaaacaaagaggctttggggtgagagcctagtggtctgagtgcaggatctcaaaattgctaaactgtttgaagtcaaaggcagagtgggggaaagagaagaagctaccagtgtggaccatgccaagcttaggatactagttgaggattctaggttctaccttattggtgatgaaaaacctacagatccctcccagcatgctctaccctagcccctctgcaaaaaaacctttacatatcctgggcatccttaccctgaacacacactcctccattctcactcttcaatcttccttttcacatgtcagacacacttctagactcccagttggaggagaaaggtctgggggcctccccctggggcaacttgggccagcaactcttgcttctgcccacagggagtctagtggattttctcaagaccccttcaggcatcaagttgaccatcaacaaactcctggacatggcagcccaagtaaggagactggggaggggggctgggcaagggaacagaccagtgacgtgaagacatctggctcaggaccgctgatctgtgtttggcctgcagattgcagaaggcatggcattcattgaagagcggaattatattcatcgtgaccttcgggctgccaacattctggtgtctgacaccctgagctgcaagattgcagactttggcctagcacgcctcattgaggacaacgagtacacagccagggagggtacgtgtgagatttaagggtggtctgggccctgcagggtctggccaagcagacccaggtgacctcactctgcctcctccttaggggccaagtttcccattaagtggacagcgccagaagccattaactacgggacattcaccatcaagtcagatgtgtggtcttttgggatcctgctgacggaaattgtcacccacggccgcatcccttacccaggttagagccaagggcaggaactgaaagggtgatgggaagggcaagtccatgtcttcccattcaattctttccagtctcagaatctgaaactttgtagctgcatctcctctatcttctcaggggtatgagtccaacgtccccaggcagatgccacatctcccagggctggcttccatctccgtatctctctttaataaccccagctcttttctttttctctttttttctttttcttttttttttttttttttttttttttttttgagacggagtcttgctctgtctcccaggctggggtgcagtggcgccatcttggatcactgcaacctctgcctcctgggttcaagtgattctcctgcctcagcctcccaaatagctaggattacaggtacgtgccaccatgcgcagctaattttttgtatttttagtagagacagggtttcaccatgttagccaggatggcctcaatctcctgacctcgtgattggcctgcctcggcctcccagtgttgggattacaggcgtgagccaccacacccggccccagctcttttctttagttctggcccaggcagcctggtatggtagaagaagatctagctcaggaacaagaggcctaccttttatcagcagatctgccactgttgctaactttctgtttggctttgttcagatcattactgtaactagtgaagctagtcacttcacttctctaagcctcagtttcctgatactaaaaataagagactaggccaggtacagtggcttatgcctataatctcagaactttgggagaccaaggtgggaggactgcttgagcccaggagttcgagaccagcctgggaaactggtcgaaaccccatctctacaaaaacaaaagttagccaggtttggtggcatgtgcctctagtcccagctactcagaaggctgaggtgggaggatcacctgagccagggaggcagaggttgcagtgagccaagaccatgccataacactccagcctagggcaatagaccaagaccctgtctcaaaacaagaaaaagagagactccatctctacaaaaaaaaaaaaacaaacaaacaaaaaaaacatttaaaaattagctgggcatggtggcacacacccgtagtttcagctatttgggaggctgaggtgggaggatcatttgagcccaggaggttgagggtgcagtgagccatgattgttctattgcactccagcctgagcaacagagagagaatttgtctcaaaaaaaaaaaaaaagaaaaagaaaaagaaaaaagaaaaaatgagagaccatttgtgaaagagcctgactcatagtaggttgtcagtatacactgactcctcccaccatctcctggacaaagccctttacccctgaattcagccaagacagggatggaatttttgaaaggaacttgctaagaaactctggggaaaggaaatggagcataaagacaggagtaggggggtcatgcggcacagtggctagatttgtagaagcttcccatatccccagagcaaggtgaacagacctttgctccaaggaaggtaaagacaccttggaaggccggatgcagtggctcacacctgtaataccagcactttgggaggccgaggcgggtggatcacaaggtcaggtgttcgagaccagcctgaccaacatggtgaaaccccgtctctactaaaaaaaatatatataaaaattatctgggcatggtggcacgcgcctgtaaccctagatactcaggaggctgaggcaggagaattgcttgaacccaggaggcagaggttgcagtgagctgagatcatgccaccgcactccagcctgggtgacaaagtgagactctgtttcaaaacaaaaacaaaaacaaccaccttggaaacaggtgaaaagctgaggggcttccctgccctgggcttgccccaaaccagcgtccaggggtagtgctggagctggaaatacagaaatattctccagttatcctgccaggggtcctcactgctccttcccggttcccacagaggcaaacccatagggaatgtatctattagaagaaaataggcagtgaaagcatgatgataaatggcaactgacatatagcattagggtcagggagacaatggggagaaatggggaccttggtaaacttgcagctgctccagcagatggctgcaattaaggcgtgggggacccaaaaaaacagatcttttgtttttttaagagaagcccaaacttggagttttaggaaaatctgttcatttccatttattggcgattgattcaaattgtttaaaagcactctaggggctgggcacggtgactcacacctgtaatcccagcactttgggaagctgaggtgggtggatcacaaggtgaggagtttgagaccagcctggccaacatggtgaaaccctgcctctactaaaaatacaaaaatattagccaggcgtggtgttgggcactggtagtcccagccactcaagaggctggggcaagagaatcacttgaaccctggaggcggaagttgcagtgagccatgatcacgctgttgcactccagcctgggtgacagagtgagagtccatctcaaaaataaatataaataaattaaataaataaattaattaaatgaataaataaataaaaccactctagggccaatccaaagtggatctgtgggctatactcaggctggatttagcctgtgggcttgcacccttaactctggccatgggtgtttagttccgtggcctatgtcctcctatgccccagttttaaaatgtgagagtcccagccaggcgtggtgggtcacgcctgcaacccagcactttgggaggctgagatgagcggatcacgtggtcaggaggtggagaccagcctgaccaacatagtgaaaccccatctctactaaaaatacaaaaattaaccgggtgtggtggcatgcacctgtagtcccagctactcgggaagctgagacaggggaatcatttgaacctgggaggcggaggttgcagtgagccgagactgtaccattgcactccagcctgggcaacagagcgagactctgtctcaaaaaaaaaaaaaaaaaaaaaaaattgtgagagtcccataggcagaggctcccttgtacaagtcctggggaaaaagggtctctgttgaccaggctttagtcccaagctttccaggagcaaaactttgattttgtaaataccctataaggttttggtctttgggaactgcttgtcacaatctttgttcagaagactgaaggagaaaccagacactacatgagcaatttagaaatagggaaggagggagctatgttactgctgtgatcatgtagttctccagagcagctcttcttggggtctacatgccaaaagcctgccagaggggccaggaccagcataaagggagggaaccagcccaaagactatttcatctgggtcatggaggggcctggggaaccttctcaagtccaagcaaggtctgctttgctaggcccagggtccatttggcttcgtgatgcaggatgtcatgtgcctggtcttaaaactggagagacctcaccactgtcttggttgtgggtgcccatcctgccctgggccctgaccatctcatcattcctaccaaataataataatcccaggtgccctttattatttatttatttatgtatttatttcagacagagtctctgtcacccaggctggagtgcagtggcatgatctcagctcactgcaacctctacctcctgggtttaagcgattctcctgcctcagtctctcgggtagctggaattacaggtgtgtgccaccacgcccagctaatttttgtatttttttagtacagacaggtttttactatgttgaccaggctggtttcaaactcctgaccccaggtgatccacccggcttggcctcccaaagtgttgggattacaggcgtgagccaccgcagatggcctcaggtgccctttatgaagcatctccgatccagactttctgtgcctggatagatttgatgctttctgtgatatatatatatatatatatctgtgagatatatatatctgtgagatatatatatatctgtgagagatatatatatgtgagatatatatataataatatatatattatttttatttttaatttttttgagacaagagtctggcttgagttgctcaggctggagtgcagtggcacagtctcagctcactacaacctctgcacctccacctcccaggttcaagcaattactgtgactcagcctcccaaatagctgggactacaggcgcataccaccaagcctggctaatttttgtatttttagtaaagatggggttttgccatgttggtcaggctggtcttgaactcctggcctcaagtgatctgcctgctttggcctcccaccatgctgggattacaggcatgagccaccatgcctggcctgtgcactatatttgatgctttctgtgcacaatctcatttaatcctcataacaattctatgaggtaggaacagttatttactctattttccaaataaggaaactgggctcgcccaaggttccacaactaacatgtgtgtattattgagcatttaatttacaccagggaagcaggttgtggtggtgtgcacctgttgtccagctatttaggaggctgaggtgaaaggatcacttgaacggaggagttcaaatttgcaatgtgctatgattgtgcctgtgaacagctgctgcactccagcctgggcaacatagtgagatcccttatctaaaacattttttttaagtaaataatcaggtgggcacggtggctcacgcctgtaatccagcactttgggaggctgaggcgggcggatcacctgaggtcaggagttcaagaccagcctgaccaacatggagaaacccgtctctactaaaaatacaaaattagcttggcgtggtggtgcatgcctgtaatcccagctactcgagaagctgaggcaggagaattgtttgaacctgggaggtggaggttgcggtgagccgagatcgcaccattgcactccagcctgggcaacaagagtgaaattgcatctcaaaaaaaaagaaaaggaaataatctataccaggcactccaagtggtgtgactgatattcaacaagtacctctagtgtgaccttaccattgatgaagaccaagattcttttggattggtgctcacactgtgccagttaaatattccgaacattacccttgcctgtgggcttccagtgcctgaccttgatgtcctttcacccatcaacccgtagggatgaccaacccggaggtgattcagaacctggagcgaggctaccgcatggtgcgccctgacaactgtccagaggagctgtaccaactcatgaggctgtgctggaaggagcgcccagaggaccggcccacctttgactacctgcgcagtgtgctggaggacttcttcacggccacagagggccagtaccagcctcagccttgagaggccttgagaggccctggggttctccccctttctctccagcctgacttggggagatggagttcttgtgccatagtcacatggcctatgcacatatggactctgcacatgaatcccacccacatgtgacacatatgcaccttgtgtctgtacacgtgtcctgtagttgcgtggactctgcacatgtcttgtacatgtgtagcctgtgcatgtatgtcttggacactgtacaaggtacccctttctggctctcccatttcctgagaccacagagagaggggagaagcctgggattgacagaagcttctgcccacctacttttctttcctcagatcatccagaagttcctcaagggccaggactttatctaatacctctgtgtgctcctccttggtgcctggcctggcacacatcaggagttcaataaatgtctgttgatgactgttgta

SEQ ID NO: 453 - DNA, 13912 bp, Homo sapiens
cactgaggtcaccctccaggctgtggaacctttgttctttcactctttgcaataaatcttgctgctgctcactctttgggtccacactgcctttatgagctgtaacactcactgggaatgtctgcagcttcactcctgaagccagcgagaccacgaacccaccaggaggaacaaacaactccagacgcgcagccttaagagctgtaacactcaccgcgaaggtctgcagcttcactcctgagccagccagaccacgaacccaccagaaggaagaaactccaaacacatccgaacatcagaaggagcaaactcctgacacgccacctttaagaaccgtgacactcaacgctagggtccgcggcttcattcttgaagtcagtgagaccaagaacccaccaattccggacacggtaagactggggcaagaggtggaagagatttgcaagattcatttggttttagaaacattctacaaaggataggatgcagcttatcctgatgtggtatatcagacctcagtaaagaataaattgtattcttatcagacaggcagcagaattcatcaagtaccagctgtgtctgcctcttgctgaattagacatcaatgtgtgtggtgactaaactaagagtttgaaatgccttcaaattatttttcttcctttgcaattttatgacttattcaggatcataatttccacttaagttaccttcgtccttcataaaatctgattaaactgactcgaacttcagcatgaaagtttcaaaaactatgatagctattattttcatgagaaagaacaatgaatatgatgcaatgtaagtagcttgcaaacattaaggacaagaaaaaaatgttgcccagagagaagtttcatgaaaacagtgatgtatttttagtcatagtcttgtactttgtttgaaagtagatttcttcctttagcaatagccctgacttaattcatgttggtttcttggcatctactcacttaactaaccccttttgtgttgggttctgcttctactactctattgcctttactattatgaatcacctaatttaacagttgcccaactggatccctcaatactgtctggcaactgttcactcgttgaaattctctcctttgaatttcttaccatgacacatacttcaagcattttgtactagtttgatttccatttatatccttaataagagccttttccttttccttgaaattcaaaccagaaactatgcaaaataagcaaaagcaagcaataacaactacatatacaaatgcaggcgcaaaacccaaactagaatcatatggctgaaaacagatgttttctttcagaaatccttccactaccacttctgagcattttctcttagtatttttttttgggcattttccttctttgcactttttaaaatctcctgcagctcgctcactctctttcataagccagcagttatactgatgttaataaatagttgtttatttacttttgcttttttagaaaacaagctgaaagaattgagtgaaatgccagagagatacagatagccagttgtagggctggggttggaaatcaagtctaatttaaggcaagggcaaaatgtgcattttgtgtgtgtattttgaaccattcttgcattgtttttatttgcaaaggttatagggctcaagcagttagggagaatgcatcccagaacactaagttatgaataacagagcaacagttatgtttgtggcttgaacacattaaatctgcaataatgttttagaaatttggctttactaaaagcattaaagatgctatccagatgacattggggacaacatgtcaaatactattattaatgtagatatacaatgctattgtcattcataagagagtctgaacactcagacacattcattccctcttccttagtgacatcatcccaaatcataagatcttgtaagctctcaatatctgcttatagatttggcttatgtatcttttgtttttctagctaattgttgtagatcatcacttcaaggtgcccatatctttctagtggaaaaattattctggcctccgctgcatacaaatcaggcaaccagaattctacatatataaggtactaatactacattgaaaatagattagaatgagaagagacctgccatttgagtctctaaatttgttgcaaaattgcctctttctgggtcaggcttgcactaggcatttcctgactcccatgtcctagtgctacaccatttgcaaatggatatcctattttctgctgccaagcagtttctgttttaatttatgtcaacataatgatttccagggcattagctatgaggaagcagggagaatgggtcttcataattgtaaaatgacagtttttgaaatttgctagtaaagagatggagaatccaaaccttttcattgtaagattttagtgaaagaactcgtcaagcggatagtgaagttttagcatccttagtaaataaccacctttaaaatggaagaaaactatcctttatgataaggcaaagtagaaaagcatatttttatggcatttgctttttctcatatagctcaaacattttttttaaccagagactctttaggttatagggattgatgctcagaagttagaaaaaaataggttaagtattattaaaggaagttgttttactcattcagtcaatcataaaataatcatgctttgaagttttggtttaataaagcacattagtaactatgtaaaaaatttcaagtatatcactaagaagcaaacagctatgatttgttagataatgctgcataatgacttggtagtatttaatgtaatgcagtttgactggacatagatctaactgaaaaaaatgaagttgacacaaagtaaaaggaacagtgtaatatattaataaagaacatcataaagaattaatataggaacccagggaggtaaaaactaaaaaacataactaagccaaaaaccaatggaataagagttagattcaaactagtaggttagacgcaggaaatggattttcgtatgcctatcaaatatttaagaaccagtagaatggcctatagtagacatataaagggcctaggacttacttttgttttaaaataaagtctctctattttacaggactctttttattttaaaactttttttttccagaaacttaggcagtgctggggagtagtatgtccccaggttcagtaagcaaaatgacttcctttgcttattaaacaaacaccagaaattccagcctatcccatctgttcccttgcaggcaaagtaacatcctagacatggctttagagatccacatgtcagaccccatgtgcctcatcgagaactttaatgagcagctgaaggttaatcaggaagctttggagatcctgtctgccattacgcaacctgtagttgtggtagcgattgtgggcctctatcgcactggcaaatcctacctgatgaacaagctggctgggaagaacaagggtgagtggtaccagcaaagctctgccaaacccttctgtccattcacacagtcaccatccagtacgaggaagcaaggagagagtaagacatgaggatgaatattaaaagccaatgtttaggctacagctggtctttttatcttttggaagatgaagaccagttctctgttcctgacatatcacctcttttttttttctttgccttgatttcttcttgtaaaatgtataatatattctccttgtaaggagtaagacatcaatgaagtaattcccgtatacataattataaactagcaacattttagtagcataatatttttttaatatcaaagttccaacctatggtatttgatattgtttttccatttctgcatcatcattcaaatcaatactggttgtacattctgctatctcctcatcttgctttccttaaactctagctgaatgatcaagcaaatccccaatttccagagtttctcttctattacaacctctcactccccctgacaggcttctctgttgcatctacggtgcagtctcacaccaagggaatttggatatggtgtgtgcctcatcccaactggccaaatcacacattagttctgcttgacaccgagggcctgggagatgtagagaaggtaaggaaggattcctttttttaacctcctaatctctgaactgtcttttcacagggagattttaggtttatttttctaaatttgtagttccacttgaccaatgtatacccccattgttttcctttgtatttttaatattcagagtttggaagcctgacatgagaaaatacatttataagccagaatcagtattagaagagcagtgttgatgttgagctaggcaattaacgcaaatgcataaacatgatgcatataaaatcactgttacaagcctgatcctgtagattatactagttaatagtgggttctgttcttaaatgaacttgtgttccaatcagagctctagcacttgtagctttctgactttgataagagaagtaagtctctccaaatgttttattttttctttggtctttcttattcaactcactacttaaaaacagtagatacatgggcctttcctagttatatgctggtaagtacttaacaaccagctcaaggacaaaataacaaaaacaaaaacaaccatgatttgtagcacttgactattttctgaatactcccatcataattgatttcaagctaccaaagttaattcactaaactcagacttgggaagacatgcacacaatttgctgtcatgagttggtatgagttggctccagcacacaactggatctttctcttgaacttccattgttttttttctgtgtgtgtgttttttgtctttgtttttgatttgccaggacttaaagatgacaagccacaatttgagcctcagtttccttacctacaaaatggagatagtaactataaacccatctcacagcactattttttagaattcgataagatcattaatgtgaactgcattattgatactggttattcaataaaataggtatatgtactgggtatataggccaattttgttttatgtgctggaaaatgttggttttaagtactctgatcaccccactaattttaactatccgttttgcaaatatgtagagggactggtgagttaataagatatggatgagtataaaattatcaatgttaacaagagaactattcaaagttaatatttctaacaatctttttcttttgtcttgttaaacatttatgacaagagcctatttttaaatatcgctcatctgggaatcccatgagacatgacttaaatttggtctgacttctaggctgacaacaagaatgatatccagatctttgcactggcactcttactgagcagcacctttgtgtacaatactgtgaacaaaattgatcagggtgctatcgacctactgcagtatccttttgtggtatgggatggcaccaaagtccgacagaactcctctatttaccagctgcatgtctgtgagaccttgtgaatcacaaaaatggaaacgtgataaacattgaaagtacaaagaaaggagcccttatatttactgataaaatgatgatttggttaagactcgtaggggaaaataaaggtttgggggaaaatggaattaagtatgggtttagatgtggtcctatttctgccagttttctttaattgcatctcagcaatgtgacagaactgacagatctgctcaaggcaagaaactcacccgaccttgacagggttgaagatcctgctgactctgcgagcttcttcccagacttagtgtggactctgagagatttctgcttaggcctggaaatagatgggcaacttgtcacaccagatgaatacctggagaattccctaaggccaaagcaaggtaacagggacttcagttttagaaagatttttaaaaaagtaatctaagaaattatctcttttgtttaggtggttaaatttatggttttctatatatatatatattcacccagctctcctaaaaaataaataataaatatttttgtttataatgaacaagtagattcaatattaaattgcattttcctcattcttagaacaaattttcttttttactttccctgattagttaccattttgctttttacttagggtttatgaagatatattaatctaagtgacatcaggtggaaggacatttattcaaggtaaataaatgaaaatgagtgcaaagtctatgctaaataaatcctattttttattctccaggtagtgatcaaagagttcaaaatttcaatttgccccgtctgtgtatacagaagttctttccaaaaaagaaatgctttatctttgacttacctgctcaccaaaaaaagcttgcccaacttgaaacactgcctgatgatgagctagagcctgaatttgtgcaacaagtgacagaattctgttcctacatctttagccattctatgaccaagactcttccaggtggcatcatggtcaatggatctcgtgagtattatttttaggattttccttcaatttaatgtaaactataagggacactttttataagattatccttgcattgtcaatgttgacaaatgcataggcaattgctactgtgaaaatcatatgtatcatatttattaagtttcagtgggtatcacatattactaagtgtgtgtagtaatacctttaaagttacataaaacaggaacaaaacctgaagataagataaaattaaagatctgttgaactggattaatccacatgggctggcagcatttgttcaacaaatacattggatttttattatgtgtcacagtatttgataggcacaagatgaacaagacatatatgttccctgtataagtgaaacgtggttgataacaaactttaaacaaaggcccaaattgtctaaaaccctaaatgaaatctaagcagacttttgggcctagtttttcttaagaactctgtgtaaataattgctacattatagaaggaagttgactggaaacaaaagtgtgcaaatgacaaggacgtaaaacaggaaagttcaaacaaacattaagagaaacctggtttaaattgcttactttgcacttttttttttttttttttttttttgaggtggagtctccctctgttgcccaggctggagtgcagtggcacgatcttggctcactgcaagctccgcctcctgggttctcaccattttcctgcctcagcctcctgagtagctgggactacaggcacccgccaccacacctggctaattttttgtatttttagtagaggtggggtttcaccgtgttagccaagatggtctcgatctcctcacctcgtgatccgcccgcctcagcctcccaaactttgcacttttttagaggagggtagcgctcatactagcttaactatactaaagtgaaatagaaaaaggaattctgtatcctagaacttaaagtataataaatatatatataaataaaaagaaaaaggaattctgaagagaacagaaagctgagagaaaaagggaagattgaagagacagaagcctatagcattgtagtcaaatgaatatgtttgacttttatatgatcatcttctcatttctccatcagagaaggatgaactgtagactatcacaaacaccttgaaatttcctctattttcttatttgaacacagtttcctttcccaaagaatgaaacacttggcttcctgatagcacagtttcccaaataaacttatttgggccacttgactactgtccataatgctaaacaatttcaggcaatgcaactattaaatgtacgttctcagaaattactgtatcaatcatgtcttcttcctttgcaaataatataaatgtttctttcttccatgaaggtctaaagaacctggtgctgacctatgtcaatgccatcagcagtggggatctgccttgcatagagaatgcagtcctggccttggctcagagagagaactcagctgcagtgcaaaaggccattgcccactatgaccagcaaatgggccagaaagtgcagctgcccatggaaaccctccaggagctgctggacctgcacaggaccagtgagagggaggccattgaagtcttcatgaaaaactctttcaaggatgtagaccaaagtttccagaaagaattggaggtgatatttttgtttctagttcatggggattaaggtcaagaaggcaaagtattgctttgaatgataaaataggacttagctaagaaaaaaaatactagattggaaaataataatatatagccatgacaccacttttattctgaaaacaaatgagcaaacatgtaattactctggaccttgtagattctgaagttttcccatatgcatacatttaccatgttatacccatgaactgaattttaattaattttctgtctttggccagttgcatttacaaagtattaaattttcttttttattaagcatatagaattaccagtttaatccactaaaatatgatgtatccaggattaatagaataagttggtatcattccagccaactattctgcttcgaactttatcattggaaatcccgagtaaaacactgaaatactggaaggaatgttgtaaactagtaggctgcatttaaaattaaagcatgaagctagaggtctgtggcatgaagattacacctatagcagaaataacaagagattcaaacccaaaagtaaatgtcatttttctatagagtatcatccttggaatttttccaggtttggtgggaaggatatagtcttgcttatatgtgtcttgctctaagtttgtagaaaaaaatatagattctttttcagaattatttccagaaatactgaagtattgctaacatcttttccatgggtttttgtctctttgaagactctactagatgcaaaacagaatgacatttgtaaacggaacctggaagcatcctcggattattgctcggctttacttaaggatatttttggtcctctagaagaagcagtgaagcagggaatttattctaagccaggaggccataatctcttcattcagaaaacagaagaactgaaggcaaagtactatcgggagcctcggaaaggaatacaggtatccctagttctacctattgtggagaattgctgagggacctctttgtaaaaccagtgagaacaggaaaattgccatgtatacaggcacacagatgaggtttatgtctctgtctagtagtaatccttttcttgaataagcatttatggaaaaacaatgtgcctggtgttggtgttcctcgcacagaatttatatctaatggtagcagtggggttaaactgaaccatcaccataatcaccagacttgctttgtgaccatcaacattcattgcaacaaagaggcctttttggttacattggacagaatgccaatacttgaaactaacctaagaaacaccagtaattcattggcttacacaaactaaaagcaaaagattttaatttagtttcaagtatagatgcattcagaattttaaacaatattatcccttttcctccttctttctgtcatttttctgtttcattttcctgactattggcttcatttccaggcaggctcaccccacatgacaataaaggtgacaccaacaggtccaagcttaactagtccttactgccctcagtctcaggggaaagagagcatcttttctccagcatatatctgtcattcaaacacaaaagcatcatcaattttcatactctttgcagtatttttctccctgtgaacaagtcctttgcatctagtggacttgcatgctctgactgaccatggagtcatggccaaacttgtgacaggagcaggtgttccacaagcctctccagtctcaattggcagttccaccaagtgcagggtggaagcctgtataggctccacctctcctatggagcctctcctatggcaagcctctcctatgaggaatagatgctgctggaaggaacaagacaaagatgtttacaacattcctaatcaccatttcctgcatctaactgcatgttttccgggttgctaggctgaagaagttctgcagaaatatttaaagtccaaggagtctgtgagtcatgcaatattacagactgaccaggctctcacagagacggaaaaaaagaagaaaggtgagaagaaagtggaaattatgcaagatagaaagaaatctataaattttaaataaatttggcctggccctcatgggatgttaaactagagcaagaatggcaaagatgcttcttagctcctcaagcatatctgactggcatgatcctgcattgtggttacctggaagggaaaaacaacccctgggaattttatccaggaagttggaacaatcacaaacaaaagtgggaggcagaaggaagaggcacattaatcctagagaagattatctttttctcctcagaggcacaagtgaaagcagaagctgaaaaggctgaagcgcaaaggttggcggcgattcaaaggcagaacgagcaaatgatgcaggagagggagagactccatcaggaacaagtgagacaaatggagatagccaaacaaaattggctggcagagcaacagaaaatgcaggaacaacagatgcaggtattcatcaattgtttcatctctcccctgcctgtaacgatgagagtatgtagcagtggcaaagagggagaggcagcaagatcttgtggctctcagcagggagtctggagccagaaagtctgggtatgaatccaagctccacctcttagtaagtatatggtttaggcaagttatctatcacctctgtgcctaattttcctcttgtgtaaaatggacacagtgatgatatctatgttatagggttattttgataattaaatgagttaatatttgtgtttaaatggtgcccgatacagagtaagcactatatgttgttaaataaaaaccaaggcatttctgggctgcagtaactggtctttcctgttgacttgttaattgtcctggatgatcttttgctttggtcatagatactttgttaatctgatttcatgttactgtgtctatgcccctgttcttgccttgatcatctctgttctgaaggcctttaatttgccagtttgtttcatccggtcctttacttttatttaccaatcactgtcagtagttaccaagcactctccagtagttattatttatcagtcactgtcatagcactttacatgcattatctcatctaatccattcactgtaaagcagaactactgtgtcctcatttttcagatgagataagtggggtttcaaagagataatcaatgcaaatatcacacaagcctagcacattaacaaaactgccttccaaatgagtggaatctgcagtgtttttgcttcttcagacctggtgtaaaattcctatgtcagcaccctaatgagacaaatgacatcctaattcttccccttggcttgccagtttgtaggtactagtttttcagaagttactctaaaatatttctgattgcagctccttcctaaagagcagtatgagcagcatgtggttatttatgtattcactcttttctcctacttctgtggtgacctggaacaaattctcttatgtatgtaaagattggacagcccacctgattccgatgtcacttagatacactgtttttgtatcagcctcttctcttagaaatatatctgagagtctcctgtgtgtgtatgagaattgaagtcaagatgtgactaagattgcccaaggagatcgtgtggtttaagggggaagggagctttggtttggaatcctagggacaccaatattccagggatgagaaatgaccatttctggagctagagaaagacaaggagggtgaataattacagaaataggttagatgcacgtgaatggaagagagatattcaggaactgtttactgctactgtagatgaaaagaagtaaggacaagtgagtgatttaggcaatcagtaagaagcttgatcttactttctatttatcactctttaggaacaggctgcacagctcagcacaacattccaagctcaaaatagaagccttctcagtgagctccagcacgcccagaggactgttaataacgatgatccatgtgttttactctaaagtgctaaatatgggagtttcctttttttactctttgtcactgatgacacaacagaaaagaaactgtagaccttgggacaatcaacatttaaataaactttataattattttttcaaactttcatatagagttataagattatgatgctggtatctggtaaaatgtacatcccagtagtccaatagtttaaatgtttattgcttcctttaagagattataaattgtataagggacattgtatcactgccttcatttatgcgtgatattgggatggtttcatcaggagatgctttccttgcatctcaatgtcatctgtctaatttctcataaggggattatgttacctagagcagggcttcccaaccctcaggccatagactagctctgatctgtggcctcttaggaacccggccacacagcaggaggtgagcagcaggtaagtgagcattacagcctgagctccacctcctgtcagatcagcagtgacattagattctcacaggagtgggaaccctattgtgaactgtgcatgcaaaagatctaggttgtgtgatccttgtggaacaatataaaccagaaaccaataacgccaccccacctccaacccccgccaaccctctgtggaaaaattaccttccacgaaactggtccctgatgccaaataggttgggggaccgctgacctagagggagttatgcacatgggcttataaggttagccaagagaaaggacaagaagacccaaagtcggcaagcaaatttattaacctgctgggctgctctacagaaatctgaggaggcagacaccgggcttacaggctaaggggtataagtaggtctgcaggggttttgtgtgtgtgtgcgggggtgtcgggggggcaaggccatttgtggagacttttcctcccagtatggccacatcctgcagtttgtcagtttttgcccccgcctggctcagggtaccaggatgtggtttagcttaggggtggttatagtggcacctaagttctgggaacttgcggtgggggcgaccttttggacgaaaaataagctgcagggcagctaggggagggggcttgttatattcctctgggggcagggtgtccctaactgggctcagtcggaaggaacttgaccaaagtctgggctcagttgggcatcactcaggctaatggtcgtgtgctggatgccatcagagggaagtaccaatggtaaagtggaaacaatgtgcagctttcaactgggtggaggctgctattctgtggacagtgagatgtttccttggcactgtcaatagacaatctgcgtagagaaattccaagctgaaagccaataatgttataataaaatagagattcttcagaagatgaaaggaattaccagcatggaaattgtgtcataggcttaagggctaaagaagaagccttttcttttctgttcaccctcaccaagagcacaacttaaatagggcattttataacctgaacacaatttatattggacttaattattatgtgtaatatgtttataatcctttagatcttataaatatgtggtataaggaatgccatataatgtgccaaaaatctgagtgcatttaatttaatgcttgcttatagtgctaaagttaaatgatcttaattctttgcaattatatatgaaaaatgactgatttttcttaaaatatgtaacttatataaatatatctgtttgtacagattttaaccataaaaacatttttggaaaaccataaa

SEQ ID NO: 454 - DNA, 7322 bp, Homo sapiens
actttcccttttgtaacgtcagctgaagggaaacaaacaaaaaggaaccagaggccacttgtatatataggtctcttcagcatttattggtggcagaagaggaagatttctgaagagtgcagctgcctgaaccgagccctgccgaacagctgagaattgcactgcaaccatgaggtaaatattttcccttcgtattcggtagtgctgttgagtcatcttgtccaatgcaaatcctgagaagctatgttcccaaagagggccagctccattttagtgtttgtttatagccttactatgcctctacctctgttggttgtaaatctgtcttaccaatggtggtttgttccctcctgaacaattttctgcttcacactggcaagcttcctaaattcatctccagaactgcacgcctggggagttgagttgcaatcagagaaagaaggcagcagagagggatgatgtttcatcggcctggtgcttcacttaaagatgggtctgggggcattgctcttgtgcactgaccctgtcttatttcatatttgaaaggattaagttggggacttgtaatacaattatttaacaaaagggttcttttcagcagatactgttaaagatatacacagaatagcaaaccccacttcctgcaaaggtgaattttacttttaatgtagttcttcatctcagatttgcacaagggctggtaaacttaaatattttcaccccaaaatgcctcctgagtatgaattagagatggagtgcttggagaaaatagttctgttctcacctctaacattcccttctatccccaaaacatgagactgccctggagaggaagtgttagctcattgaataggaagggaaatattttctccagtttgaaggtggggtggccggacctggttgcctaaccctcatcctgggagctctggaatcccgtgttaccaacccctgtgcttacttcctatgagacaccttgccctctgtctgtgaggttcctgatttctcttcttgaaacgatattatttcctgctagtctaaatgttctgcctgatttcaaaaaaaaaaaaaaagatttgagatatttacagatttcttttttttgtagtcacccagaatctatagaacccttttcttatttcttagaattttagcatggtcttatcttagaatttttcccattacaatacagacccatctgtcctttctttccttaattctttatctattgtgactttcactgggcattgcccttgtgccctaagacagtggttctcaaaattgagcatgcataaaaattgcctggacagcttattaaggacagagtcctagggttgactccccagagattctcattaagtgggtctgggttagagtctgaggatgtgtgtttctaaaaggctcctcagtgattctgagactgcggtggtagcattagttctgagcctggttgataatgtcactgtggctttcatccagataagaggcaaaggaagaaattgttgttgttgtgtatacaactggaacttctataggaatcgggagaataggtcctcacaagccagagcccaggaagcaagtgtctggcatcagcttctctaacttaccagtggaaataaaaacccaaaatcaagcagtgaagttggatgccttttaaatggctgctcaaagggcttttacctaagtgtgtatattaaatatctctatcctgcaaatgcacaatagactttatgttttatatggtggagataacctcaattctatttactctctctgtttcttttgtaaaatgagaaaggagctaaggagtttatgtgttaagggaatgagctcccaaactcaactggaagttggaaatagaattgagagggagcaaggaagctatagtgagtcttcaggtgttaggatgcgtgctgcacatgcttggggtctgagagtggtcatattctgtaggactcaccatattctgtaatgaatgcagtagagagtgtgactgagatgcacatggagaaaacacagggtctgagccctccaagctccccagtgtcctgttctgatcctcctggggtcactacagtcctacccatggtcctgtgaagcactctagtaactttaaatcagttcctgctcacctctgtttcttggaacaaatggagacttaactatcccaggcagaataaacaaacaaacaaacaaaaataggatggaaaataggcaggagtttataggaaggacccgccttccattcaaagctccaaataggtcttagcaaagagccaggttgtctaagtcccttgatgtaactaaccccaggtgcgggagccccggagagtgcttggcttggttatcaggcatcctaatggcagatgcattcccgttgaaaagctcatgtccaaacagatctgtttttattcttagtgaggttacaggaagattcccaatcaaaatgggagtgggaagcagtggtataaaaagtgggagagagaggggcagttagaaagaggggtcacataatcttctatctagacatatgtttcataagtgatcctgccacattgcatgacattccagatatctattggttgtataagaagccatactatttagaaatacagctcctgatacaagggttgctgtatagataccacgaaaaaaaaatttaaataagaaaaggcaacattacagagactccaatacacagacagtgttgagaaataatttggggcatagaatactatttatctccaaagtaattcgaaatacaggcttttgctcatttgtctgttctctgggttttttaggggtttttttgttgttgttttgttttgttttttggtttggttgattttggtttatttatttattttgaggaccaacactaaagggaatggaaaatctttccaggagagtcataagggtaccctaaagaaaaaagagctctttctataagaaaaggagctagtggccttgtgagccttccctgtagctgcacttcttgccccttattataaaagcaaaacccagaagagaaaaataaaatttcaaaaaaaaaattaaaacaataaagtacaaaattattaatagagcaactcaatgagatgtgttaagaacagaaatcaccagtttaagaaatagaggtatgggggggaggggaggaaaaaaaattacattttattccaaaataaatgtttaagacattgctaacataaataatacttgaaattaaatgagagaataatacaaaagcagataaaatgagtaaaaattaagaatggttgaaaataagattcaaatggttaaaatggaaaaattcacagaaaaaaatgagaatgtagcatgttaaagtaataaaccaatacaaaataaaaccaatctgataaaagctcagaaagtttgaatagacaaaataaatgaaggatatattaaaagctgaaatagacagaaaatcgaaagtgataaagatttctttaaaggcaaatgaaggagaactaaggaattaagaatatcaaagataaaatgaagctgcatttcggagggatgagaaattaaaatcaccatggcaaaacattaaaagaataaaaaattataaagctgaaattttcaaagtacaaaagtaaagctagggaagaatgaagaacagaaacagcaatgaaaaagacttacttctttaaaactacataaataaaaccaagcctccacagagaccctcgaaagcagagagggcagagctgtttaacaaaaactgtcttattcatgaaaacctagccacagactcagagaacaacccactgccctcgccctaattcttctgctgcccacagtccctaaactcctgctaccacatgcaggaattaacaataaggaaaaacatattatagaaagaaaagaaggggagtttctttgatttgtgttaacagcctttaggaggaggagcattttatttgccatgctcccatttcttgacatataaatctgtgtctcaaagtccatctttgtgtttttccctacagtgagaacaataagaattccttggagagcagcctacggcaactaaaatgccatttcacctggaacttgatggagggagaaaactccttggatgattttgaagacaaagtattttaccggactgagtttcagaatcgtgaattcaaagccacaatgtgcaacctactggcctatctaaagcacctcaaagggcaaaacgaggcagccctggaatgcttacgtaaagctgaagagttaatccagcaagagcatgctgaccaggcagaaatcagaagtctggtcacctggggaaactatgcctgggtctactatcacatgggccgactctcagacgttcagatttatgtagacaaggtgaaacatgtctgtgagaagttttccagtccctatagaattgagagtccagagcttgactgtgaggaagggtggacacggttaaagtgtggaggaaaccaaaatgaaagagcgaaggtgtgctttgagaaggctctggaaaagaagccaaagaacccagaattcacctctggactggcaatagcaagctaccgtctggacaactggccaccatctcagaacgccattgaccctctgaggcaagccattcggctgaatcctgacaaccagtaccttaaagtcctcctggctctgaagcttcataagatgcgtgaagaaggtgaagaggaaggtgaaggagagaagttagttgaagaagccttggagaaagccccaggtgtaacagatgttcttcgcagtgcagccaagttttatcgaagaaaagatgagccagacaaagcgattgaactgcttaaaaaggctttagaatacataccaaacaatgcctacctgcattgccaaattgggtgctgctatagggcaaaagtcttccaagtaatgaatctaagagagaatggaatgtatgggaaaagaaagttactggaactaataggacacgctgtggctcatctgaagaaagctgatgaggccaatgataatctcttccgtgtctgttccattcttgccagcctccatgctctagcagatcagtatgaagacgcagagtattacttccaaaaggaattcagtaaagagcttactcctgtagcgaaacaactgctccatctgcggtatggcaactttcagctgtaccaaatgaagtgtgaagacaaggccatccaccactttatagagggtgtaaaaataaaccagaaatcaagggagaaagaaaagatgaaagacaaactgcaaaaaattgccaaaatgcgactttctaaaaatggagcagattctgaggctttgcatgtcttggcattccttcaggagctgaatgaaaaaatgcaacaagcagatgaagactctgagaggggtttggagtctggaagcctcatcccttcagcatcaagctggaatggggaatgaagaatagagatgtggtgcccactaggctactgctgaaagggagctgaaattcctccaccaagttggtattcaaaatatgtaatgactggtatggcaaaagattggactaagacactggccataccactggacagggttatgttaacacctgaattgctgggtcttgagagagcccaaggagttctgggagagggaccagattggggggtaggtccacgggcttggtgatagaattatttctcgattgacttcttgagtgcaatttgaactgtaacatttgcttagtcacctttagtggagtaatctactgggcttgtttctatatttatataaagcagccaaatccttcatgtaatattgaagtccatttttgcaatgttgttccatacttggagtcattttgcatcccatagaggttagtcctgcatagccagtaatgtgctaagttcatccaaaagctggcggaccaaagtctaaatagggctcagtatcccccatcgcttatctctgcctccttcctcctccttcccagtctatcatcaaccttgagtattctacacaatgtgaattcaagtgcctgattaattgaggtggcaacatagtttgagacgagggcagagaacaggaagatacatagctagaagcgacgggtacaaaaagcaatgtgtacaagaagactttcagcaagtatacagagagttcacctctactctgccctcctcatagtcataatgtagcaagtaaagaatgagaatggattctgtacaatacactagaaaccaacataatgtatttctttaaaacctgtgtgaaaaaataaatgttccaccagtagggataggggaaaagtaaccaaaagagagaaagagaaaggaatgctggtttatctttgtagattgtaatcgaatggagaaatttgcagtattttagccactattaggaattttttttttttgtaaaatgaagactgaactctgttcaaatgctttcatgaacctggtttgagacggtaggaaagcaacaaaacgtgggaacctggtgactaagggcctggtgcaaggacttgggaaatgtcattgataatagatggtggggttttcccccctttagaaatgttggatattaagtgatataaacacttcttttaactccgaaaatcttctgagaaatcacaaaattcacggtatgcttggaacgattgagattttctaggtagatgctgaatagcctagacatcaaagttggtgtgaaccaaaatagagtcagctgacccagcatcagccacactctgggttggaaaatgtttgcctgttggaattaatttaagcttaagtatatatcaacattattttattgtgcaattaaaacaatacaaattcatggttttttaaagttaaaaattctaaccactgtaacaacagtttttgtgttattttctgtattaaacatcttgttgcacgcatttgaggtcatcagggtgcaaaatttgtattcctgaaaatgtcatatattttcattaataaataacctaaatatgataaaacataaagcagtgttctggttcatctggaattttgctgtactttaaatctttcagactcagctactgataaatgaaacgttacacaggtgtgaaccaaatccaaataacctcgactggtctactatcataatcacctgaacagaacaaaactttttcctcagctttaagagtccagggcttcggataacagctgccatctgccacctgctaccattgacctacgtgaacacagacattctgtctccaccttgatggtgggtgggctgctccccttttctttgttaaattttgtgctttcatcacattttctctattctgacctctgttatgagaaataaaagtcactgattccatttta

SEQ ID NO: 455 - DNA, 31493 bp, Homo sapiens
ggaaaaccggcctgactggggggtgaattcagcagggagtaaatctgatcggcatcaggtctgcggaaaggagctggtgagcacgacaccacccaggcattgcctggctctctccgcggcgggctaagttaaccgcgggtccaggtgcgggccatggtcttggggagggtgctgggtgcgctcgagcaggctagcgtcgggagccgccgctgctagtgagaggccggggccacacacgctcctccccggtacctcctccagcatcaccaggggaggagagggtcggggccacaaggccgcgctaggcggacccaggacacagcccgcgcgcagcccacccgcccgccgcctgccagagctgctcggcccgcagccagggggacagcggctggtcggaggctcgcagtgctgtcggcgagaagcagtcgggtttggagcgcttgggtcgcgttggtgcgcggtggaacgcgcccagggaccccagttcccgcgagcagctccgcgccgcgcctgagtgaggaggggccccgggggcgaggcgggagtgggaggaagggcacggtcgccgcgctggaggtcgggaccccggagcggcgaccggccggggtgggctcgctgagtcgcacccgctctgctggccggtcctgggctcacagtccctgcagccctcggaaacagcgctaggatccttgcggggagagggagaggatgacggtattagacaccagttcttccaaaccttttcccgaaaggaagcaaccctaagagctcagagctggggggagaatcaggacaggcagggaacacatggagttttcttttcttttttttctctctctctctctttctttcgttccttctttctttcttttgaggcggagtctcattttgtcgccaggctggagtgcagaggcgcgatctcgactcactgcaacctctgtctcccgggttcaagcaattctcctgcctcaacttcccgagtagctgggactgctggcgtgccgtatcacgctcggctaatttttttgaatttttagtagagacggggtttcgctgtgttcgccacaatggtctcgatctcctgacctcgtgattcgcccgcctccgcctcccaaaatgctgggattacaggcatgagccaccgcgcccgccccggagttttcttatctgtagatctcctacagggacaatctctctctccgtctctctctctctctctctctctctctctctctctctctctctctctctctctctctctctctctctctctctctcacacacacacacaccactacacacctctcactctgcctcctctctctctctccctccgctctctctctcacacacccttctccctctctccctctctctcactctccctttgaggagtattgcgtttttggagcccagttatgcgtggctgctgtaagaacaaaacaaagcactctttgtcctacctggagcatccccctgccggccagataagatcacagctgtgtcaccaagtcaagggagaggctcatttttaaaaaattaagcaaaatcagaaaacagagaacactgtcttcctcatcatctcctggagcttgtaagagaaatttctgtcaccaaaaacgaaaagttcgggcttttattcatgcctgtggttcttgggattactgcagtggtgatgaggaaggagaggtgcgtatggctcataaatggcagcttgccacctttaaaaggcacacggattcagatttgggatgtgttaacaaatcaggcttgcacaaattacttttgatccaaatgagaatgctgagctgggagactggtatatgggtaggagctggaaaatgtatcccctgaggtgttggcaatcccaagaggctcagcacgaaaccttgagcttacattgaattcagagatctgagcattaagcactggcctgatcaagaagaagcagatggccttctggtcacgaggcactggtgagcctccatcacccaggcagattccctcacagaggaattctgctggccctgcagaaagtggtgagacagcgcaccaccttggcattttccagcaggcctacttcagctccttgcacttgggcactgaaagtgctttcccctccccagatatttgtgcaccagaagctgctgctggccatgtggtgatgtctcaatgtctttcttcattgaactgggcccttcatacccaaggctggcaccatagtctgtgactgcctactgtacagccagcaagactgaaggagttgcagcattaggagtgttgtgaatctggttcagccactcattttacagttgagaaatcccttctgaggtgtggaagggcttgcttagcaccgcaggacttttccctcagacagaacctgggacagctgggtcctcatttcctctccattgtgtctctgtcccctttgcacttttgttgtgaggaacatacatgggcctaaacacattccctcactctcacctttgcacatgaatatgacttaccacactctttgaagctctgtcagcacagaacattaagaaaagtgctaactgggtacctgagcagctggagtgggagcccctgggaaagtcagtttaggagtcccctttatcttccttttcctgatacccaagaagatggctatttcctggaaaggaaggtggatattggattatttacactctgattcctcttaagcctaattttttttcaagattcgtgataataagcctgactgacgtctcaagatgttgagaaatttccataaaataaaagcattgaagagaaagtactgagtgaagggaaattgaagagaaacattcagttctaaaattgtattgtttcagaatatgattctgggttcttactgactttcttcatgacgccagccacctgttagacacattatgtgccctcactgtcattttgctcaattttatgggcgtgactcaacactaacagaaacaggctaatacatacaaacatgtaggtttttggtttttaaagaaacttagcagttgaggagaaataaaaagtctattgtaagagtagatgctcattgaattaagtgggctagttgattcctagtagaacttgtattcattcattcattcacttcaaaaaatatttattgatcagatcctaagtgccaggtactgagtacagcacagttagtaagatagatatgctctctgctctcacagtgctcacattctagaattgagggatgaacagggtgaattcatataatgagaagaaaagcaagcagattgctgcagtatagtggtgtgtgtgtgtgtgtgtgtgtgtgtgtgtgtgtatgtgtgtgttggatatatgggaggggcctagcttcttggattggattgtgaggagagacttctctgcaagaaggcctggagatgaaacctcaggaagatgggcagacgtccctgcagagggaaccacaagcacaaatgtcctgctcctgggaacaggtgtgatgtgttggaggcacagttggaatgccagtgtggctggagttaggtgagggagaaggagagttggaggagtgagctttaggggcaggagccaggtcaggaagaccctcataggccaagggaaacatttggattttactctttacaatgagagaagccaaaagagagtttgaagcagagatgtgacataattgatttactttataaagagatgactctgggtgctatgtggagaatggattacaggggaaggagaggggacagaagaaggccagaagcgagtttactgatggggggtggtagcagtagatgggcgtaggctattttttggagttacagtgggaagttaatgtttctctgtctcgaatttcccatctacaaaatgggaatgagattgctatacctggtccacttgtaaaaactaataaacaaatgaatatgccctgaagcataatgtaagacattattaccattattatttgctcatattgtattactttgaattccctgtgctttatcttaaaatttattttaataaatttgatgtcttattatattattttcagtaaacctaatttattatacataaaagtatctttctctgttcggagaactggaaactcttaactaagagttaccaataaaaacaagtcgtcacaaaatgcagggaaattattgctaaaataatagctggcttaatttcaaaagttgaatatggtcagataaaaattcaaaaatagaataattaaagctgggaatgggaaaaaaatattttggacagatttgcctttgtcctggctgtggtcatgcagatatctgtgagtgcaaagatttgtagataactgaaaatatctatatggcagcagaatttctggagaagtctgtggaccagagttgggtagggttgtttcccttagtgaagcattctctctcagaggaagctcttgaattttctctcgtttatcactaagttttagagtgtcaggaagttttaaagttgtttaccaactaggatagtgacgttcttcgcagagacaggacaagtaactgccacaataaggcaactctatttctctttcctgactcactctgatgtgcaagttactagaaggagatatgcctgcttagaggaaaaaaagctcttcctcatttgtattgtgggcagcagaaatgtcagctcgtgacttaatagtccctaggtcatgttaacttgccagatccccttaattatttattggtcagtgtgtctgaatttcagcttgaagtggctagtctggtgattcaaattgcagacaaaatgtgatagtaattctgggatctgtatgatttatctcttgccatatcaaccaccatatttttcttagggctggagagtgggggtgtttgggtatcttaaagggagaggttacatctctccttgaagccagaaatctatttgtttcactcacgttttgaaaggttgaattagttgctcctttaaaaatcagtggatattacatacaaatgtaattttccagtttttcttggaagcaatcagatgatctagtgacatggagctgccattcctacatggaagcaattaactggaatagagtggtagttgccttctttggatggtccagtttgcaccatccaaatagaataaggacagttcacgccagtccttattctattgcatgaacctgtttgattcatttaaattacctgtctggcccttgtagacttttgatttttaacttcaggtttagggcaatcaagtgtaacctgtctgttatactttcaccttcatgtaatgcaggaatctatattccagtatccctgctggtagtccccaaacctgtactttaactgctcctctgataaagaagataatgctaattgttgaaaagctactgttgatggagctgtacagtctgggcctacatagaacatgtttaggaactttgcacaggactgtggctgtcacatgcaacctaggttttccacattaaaagtaaacattcctcattccttcaacagctcctcatgtgacttgctgccttgttccctcatcattctggttatttttgggttactgtcccttgtcctgaacctttatttgttaaaatccttaaatccccaccaattcaataagatgtggtctaactggtgcagaatgcagtgggagggtggcctccctttctctatgatgtcatacttttgtcatgcaactgaagatgtctttagatttttcctggcctatccattgtgtttttaaatttactttcagggcttattttccagttagattgttcctgagagtttacaggagaactgctcaatgtacagcttgagagcaatggttttcagctgaggatgatttatgcccccactccaggggacatctggcaatgtctggagacgtaatatttagttgccacaactggggtgtgctattggcatctagtgggtagaggccagggatgttgctaaacaccctgcaatgcacaggacagcccccacagccaagacttatcagcccctagtgtcagcagtgctgagcttaagaattcctactttagggtccgggtctaggttcagatcctggtttagctacttcctatccttgtgaacttgggcacgttatttaacctctttgtcttcattatctcaactgtatgtcaaagaactctgaggactaaatgagttcatttatatgaaatgcttagaagggtaactgtatgtacaaacactatcttatttttctaccatattttattcattttggtgtgtacatatgacatcagataagtgggtgggtaaagtttgagggatagcacttcatttctaatcttgcctatgggatgggcactagtgcatttggatgttttagggagctaacagcttttctcagaaatgccttctctctatggtccccattatcatttttccggcttcttttagtattttcctccatattggggcatatatgtcagtttaatactgcatcctcctggagaatatggacactgagttcctttagcgggagagcatctgtgcctgttgcttgtacatcccatttccggtgtgccccaggctcctccacaccccagtcaccgtggcttgcacctgcacaacagattcctggggctgtgtagcaattggtagactttggataataataatagcatttctccaagggctcacatccccataagaaccccattatcagggttcctctttgacagatgaggagagaaaagcagaaagtaggtaagaacttaactgaagtcaccaaactagtaagtagcagattcaagattcaaaccttggcagccagaaactggagctaaatttctaaaccactttattactctgatacaggtaagttttctcaagaagtatacccatgaccttaacctaaccatcatgtagccatttatgcatacaacactcaacagatccagttactcttactcttactattgtgagtaatatagttgggggactgagtctgagagtaagatcaggaacttacagtatagcagcaggctgcccattgatcttagacaacttttaccttttatgacctttaagccatatagaacaccaaacatttggacatttgcacatgggatgcagattaattcccatttccaaaattgtgagtagaatcaactaattatatgttacttgcaggttttgcatctcatgcatctgcctccctagaatgaaataaatatttcttccttattaaacaaggatagagttgccccagcattttcttagaccagggtttctcaacctcagcattattgacattttgagattcctctatgttgtagggctgtcctgtgcactacaggatgcttaacagcatccctgactgctactcactagatgccagtagcagccccctcctggttgtggcaaccaaaaatatctccagacattaataagtgtcttcttggggggcaaaaatgccttagttgagagacactgctgtagagtgatgttctagctgcattctccagccttcatcctattgtaaaatatccaaagaagattttatcttcttcagcaatcatttggtgtggtaatgggtcagttttgaggtatttaagccactttctttgactttagttgaaactgaattgggctattatttgctttttgtctcattcagttactttatatgctccatattagttttctattgctgctgtaaaaattttctacaaatttagtcacttaaagcaacataatttattatctcatggttctgaaagtcagaagtctgacatggccttactaggctaaaataacaggttcagtgaaccttcagaggtcagctagtctgtgttgctttcctgaggctctagagagaatctgtctccttacctttccaagattctagaggccatccacatgttatagctcatgcccgcttccttcattttcaaaaccagccatggtgggttgagttctcacatcacatcattcagatctcttcttctgccatcctcttatacttttaaggactcttgtgattacattgggtcagataatccatgataatctccctattttaaggtcaactgattaacattaattccatttgcatcttaattcttttttgccatggaacattacatattcacatgttctggggtttagaatatggacatttgggtgggagtgcattattcaacctgccacatgcccccattccaaaggtcaatcaggaagaatttggaaagagagtactgatacttaacaaatgagcattttcttttctgactctttactaataacacaagagctaaggcccacctgccctaatctcttgccaggactgggttttacttggatggtttatctgtcagcttttcacagagatttcaaactcgagattggacattttatctattgttttgggttgtcttttgtttcgaaaagggaaatgatgcctgatgagaatttaacagtgacaaataggggaaatcgggatttgtggcagttatggttgtgtatggagactacaactgagatctgaagaacaggtagggcactgtggtttcagtgggagaaatgaagtctgcaggagagaggcagaaaggtagaatccgtttaaatggaatgtattatctgagtgctcattgaaagtcttcttgattgccaggatgatattttatctagtggtcaaggggccaaattgaagatagttattttcaggccttactatttgaagaaaatcattgatttttaaagtgaacattcccattgatttagaatgttggtggctcatgcctgtaatcccagcactttgagaggtagaggtgagcggatcacatgaggtcaggagttcataagcagcctggccaacatggagaaaccttgtctctactaaaaatacaaaaattagccaggcattatggtgggtgcctgtaatcccagctactcagaaggctgaggcaggagaatcacttgaacctggaaggcggaggttgcagtgagctgaggtggtgctattgcattcctaggtgacagagtgagactccatctccaaaaaaaaaaagtttgtgtttttgtattgaccagtgattggggttatggtaatagattttcatacaatatgatgatgaagacggctgtatcaagggttttagtgtagtcctgttggattctctagttctaagagaatgtctaaagttaccattaagtttttcagggtcctagttcttaaatataaatacatttctagctaactcatatcccatggttgagaaaaaggcacttatctgtgtaaagagaactttaaaagttaaaagacttcttatgaattattcctgtgtgttcatattcagaagcctctgtggtcattgtgattattacatgttaatatggttcctggctcataactcccgttgcccttgctacagtctttggttataatattggagtgctttagaccccagaagcaggtctcagaaagcagaatctttctctctgaccttttcctgccttcctttcacctgcccaaggcaggactctaatctgattgtaggttataagacccttattcagggaagggtcctcttaccttggaaaaaggaatgctgcacagacagaccaagaagaatctgaatagacagggcttgctgggttgcccctctgagtctattagcattagagcttacccttactgtccagtcatatttctacacagctgttcatactttgttgaacctatgcataaaaatagacagtttcccctgtatctttgggtcttcattctgaaggctccttgtgaatacacattaaataaataatctgccttttacaagttgatttttcagtgacccttcagaggtccaaggggaatgccacccgtggcccccttggccccttcagtgtgcatgtattcgagcctagaaatgcctctggaaaaaaatctgttagcaagtcattatttgcgaagagataactcaatttacctttttctgttatgtttggatttttgaaatcatgtattaactttataatataattaaatgtaatactgaaataagatcaaataaaatcaaccaaaattataaataatcttaaagagttgcacatatataccttttttttctgatcaaaagaaagatgttgaataaggaaatacagtccctctgcaagtagtttaagaagttttggctggacacggcggctgatgactgtaatcccagcactttgggaggccaaggtgggcagatcatgaggtcaggagatcaagaccatcctggccaacatggtgaaaccccatctctactaaaaatacaaaaattagccgggcatggaggtgggcacctatagtcccagctactcgagaggctgaggcaggagaattgcctgaacccaggaggcagaggttgcaatgagccgagatcacactactgcattccagcctgggtgacagagtaaaactctgtcaaagaaaaaaaaaaatttagagctccagcaacacatttaccagctgcctatctgggtctttctagcctgtacaataggagctgcccttacacgaaagccccatctctttgaaatctttctgtctacattcctgttgctctcagaacttgtaccatatcatctaagaattataaaatgcccctgtaatttgctttcttcctgtattatattgttaatatatgctagtcttgtctctgaaacacaattgtaaactctctgagagtagggattgtgtcaaattctctggtacttaccacagttgttgccataggagagggcatatagtatttgcttaagaaataccctttgattgaatgactgcagatctgataatcaggataggccatgctgtgctccattaaggcaataacagcttcacctggaaatttcagtggcttaacacagcaaaggtttatttcccatttgtgaaaggtcatttgaattggcaggggctcttctctgttcagtgactaggtatccaggcgtctttcacttcaagactgcactacatcagcacatgatttctaagtttgctgtgtcagggaaaggaaggcatgaaggagatacagtgactctgttgcagacgacttctgttcaaatttttgtttctcaggaattagccccatgggcccagcccaaccacaggggcggctaagaaatgtagggaagcacatagatgttcaggagcactcattgtctgtgccacacatctatattacatcttcccgcaaaatagctatactaacgagtgcttcattagtgtcagtgggacaccggatcattaaacttggctcggtttgtattagtaaccagatgtgctagatttattcactcagcaggcatttactgagtgcctctgtacaccaggcactattctaggtcttgggaatacagcagggggaaaaaccatcaaaaatccttacactcacagaactaagtttttagtggaaggtgataaacaactaacaaataacatacaaggtacgttagttggtgataaatattggagaaaaataaagtagggagggaaatagggaatgtattggtgtgaagaaggaggttagattgcaattttaaatagattgaaccgggaaagtgtcactgagaaagtatcactggagcaaaaacccggaggtgagaggaccagtcatttgggtgtcagagcaaagagcattcccataaaagggaacacattcaaagccctcaaagtggggatggaaggtgggtgtggagtacttggcatgtttggtgaatggcaaagaagcaagtgtgattgcagcaggtgtccaagaggggctaggggaaggattgggagtgtgttgagtaaaggttatgtagatcattataagctattttgggtgaatggcttctcccccgtaacatataacaccatttgggggttttgtgcagaagggtgacacaatcactctggctgctgtgttggggatagattttagggtcaagggcaaaagcagggagactcgttagaggtgatggcaaattttaggtaagagatgatggtggcttggaccttttctatcccccacaaaagttgaagggccaaattttaggggggaaaatggatgcacaaatgcaagatagtttttgctaataagatgttagcatacagactaattataatttattattaccacacatctcatattctcttgtttcatttactgattcaacaagcatctatgcaatactacttcttccaggccctctattaggcactgagacaacaaataagacctgacttctgctttttggaaacttatatcatagtaggattatagaaattagcaagaatataacatcatattaacacccaaaacaaccacagcagcagaaatatagtcactatataattaaatgatggaaatagccaaaatttatgaattatttactatgtgctagacatacctatggatattattatgatgatgacagatggttgttatatttgttatattttgttggctatttttatagctgaccatactgttataaagttagaaaactagtgaccaaaaacttaatctaactgtctgaaagtattatttctctgctctacaatccaatgtaatccttagtaatgtaggtaatggtaatcctacattaccaaggattttaccattgtagtaccaatctaaaacccagcacagaaaatacatgttttattttttccaagtgttactagtacctcagcctttcttgatttgtcagcttatttaaggcctcttcattgcatacttcttttttcttttaatcatctgcttcgaaggagactaagctgaaactgctgctcagctcccaagatggtgccacccaaattgcatgtgcttttctgcctctgcggctgcctggctgtggtttatccttttgactggcaatacataaatcctgttgcccatatgaaatcatcaggtaagaggtgtatttgttcaaggtcttgagcaactgatctgtcgccatacttcaagtgggccccaagaagttgcacatctgcacatctaaacaagtcctatttaaaggcttatggagatcctgtattctcctggagtaggggagaggttctcactttttcctcatttcaactgaaattgaagaagcacttgtgttcttcagtatcaggactgcaggacagaaccaggatgggacattttaagatatactggacgctcagcttgcaatcaccacggagaacctccttaatgccaccccttctctctctgactgccctaacgcatgcccacacaagcatagtaatgcaactggtctggagtccactccaagacagcctcaaaacctgcttccatgaggtgaaaaagaagcaggtgtcttgttcaacaggcatactcctggttaatagtggaaagtcatgtgagataacaatttcaggtcttgggatccaaaaggaaacaatctttcctacctgataatagagagaagtagggacaagtaggtgctagggagttccagatgagaatggatgtgatcactcattctttcttgccttgtggtaagtggggaaagaaagaggtggaaggcatagactaacccaggaggagtggccaaaacgggacagccatctttagacggctacatttaatgtcactaagagagaccttaattggaaaaagattgtttctggagctttgcaaattcctgctcatcccagaggattgtgatgcataaacttctctttccagtctcctatggagagcagtgtaggtggcttctgaatggtgtcatactgactatacctacagagctgtgcacctggatagttgtgggtcactctggatctaattgttcaagcttgatgggtgactccttacgatagcatttgcaaaagagctttcataattcagtaccttaaattttgccctactacataagcaggaaaatgaatgcattaggagaggttttatatcttatatctacatttgcataggaaatagaataatatctcacaggtccattcatcctataacgcatcaggaagttaagtcatcaaggatacactggtgactaagacaataaatgtgtagtcaaattcaagggtcctgcatcctagatgacattaagttcatttttcctactacctttttcatggattgagaacaggtaatatcttagatggtgggaaaatcatcattcgggaaacatttatatccttcacttttaattggtacagggtaaaaatttaaacatttttaaaatccctttgtctttaaaaataattggaaggctgttgctggactgacagaaacttgaggacagggacgttgctttatctttatagtcccagcattgagcccaatgcaatgcccattctaaatgttcaaaaatgaatgcaggccgggcatggtggctcgtgcctgtaatctgagcactttgggaggccgaggtgggtggatcacttgaggtcaggagttcgagaccagcctggccaacatggtgaaaccccgtctatattaaaaaaaaaaatacataaaattagctgggtgtggtggtgcacacctgtagtcctagctacttgggagactgaggcaggagaattgcttgaacccagaagaaggaggttgcagtaagctgagattgcaccactgcactccagcctgggctacagagcgagactctgtctcaaaacaaacaaaaaaagaatgcatatatattggtttaaagtattagaaacagtttattaaataagattaaaataataggtgattctttataatttcttactaaatgaatacacagaaaatatggctatgcaggttaaaaggtttgtaggaatgggctagagatatcctctttactaatggaggacataaagccatataagagtgtaattgtcctagcatgtatacagttcatctccaaacccaagactgaacatcaggaatatttgacaaatgaaaaccaccaaaaatatgtaataaaattaatagcatgccataggttccaatcctcctattaaaataaagttgaagaaaactaagaagagacatttataaattctgaaccacaaaactgtgtgagtggtcatttgatctgatgagtctcctccttccacttccttaatgatgactcctgacagatggttagagaatgggaaatccaggcccataaccgggtcagctgtaggctatggagcctgttccacagccacccccaggcaccctggcactggtgcataggaccccatagacctataccaaaacctggatcagcctgatgattcctgaggtcttctcagaggtcaggtgtcctggaacaggcagacctcaccttgacctgaatgctcctgaatgctgagtgaggaaacttcccagggagaacaggtgttggacaaccagggcactcctaacttattggaaaatgttcccctgtcctttggaattgagatctcacaagcggaggcttgtgttgggtgaaaccctcccatgcctccagaactgagcctccaattctagaggtagtgtctccaacagcagctgtggccctggggctccttagcgagttgtgtgagccagaggtctccctgcagcaagccctgcacaggcacaccatgcctgcctaggggtggggttgcagtagcaccaggctgcttaccacagaagaagaagcaggtgtccctaccttaaggtcctcctccttgggacttcacatctccctgttacaccagaagcatggctcagtagatactcttttaatggaagaagagccttttgtaattcaaaatagaccctgaaagttcaccttgcaggtaaagtttaaaaaaaaagtttctggggtttgaatctacctggggagaggttagacctgctaaaacttccctaaggactcagcacagatttacctagcaagagtaaatggactctggggaaggagtaaacagcattatttgtctaccccttatgtgtcatgttttgtactaagaacttgacctacattctcacctcatctttacaactgtactgtgggctggtcaagtgcttttatgtcattttacgaatgtggatcagagaggggagcaactaggccagaggattatagcttgtaagaggtacacctgaaatctgaaatagaaccatgtccctccaattcacagggtttgttcatctccatcccctctccccttgcctttcttgaaactacctcctaccatttgaccatggattgctgacctgtgtgtcaggcaggtggtctggaacttcagcccagtgtctcttaaactttaatgggcactccttttctgattgagtggaattgtggtgaagtccaggagcctgcatttccaagctccagctggtgccagtgatgctggtccatggatcagctttgagtagctgagccttatgtattgaaaggcttcatcatgggcaggtgtttcacacatgagtcaccagtgtggaggctgtaaattggtttcttcccatgactcaaaacttttctgggcaatgttccatggtattgatgcagacgctttatctaacatagctcttgatagctggctagcagagagtaatcaactcccaccatccaatggaaggaatgggtggacaagctgaatatgtcaagaaaagtgagagtctgaatacactgatattttgtaattaaatatggatttgattgaggtttagaaaggagaacggatgaagctgctggtgtgtggaagattgcaccagagagagaaaagtagttttaggagtggatgagtaaaatactgcatgtgataaagggtttaaaggaaaacaagagagaccagtggccattcaagttaactgagcttattttcacaagtatttgttgagcattgactatgtgccagacactgtgttaagaggatgcaaagacatggatatggctctgaagaaagagcctagtgtagcatgcagacacataagtttaatatgtgacaggaagaatgattacatgtgtgtatacacacatgcacatagaatctatgtaatattgaggatgaaatgattaagtctgtctgggaaatcagggaaggtttcagagaagacaggacatctgaccaaggtattaaagtgtgaatgggagtttgctaaggggatttaagcataggcagtagcatttacaaaggtgcagtggcatcaaccagcccagtgtgttgctcaggagtactgtagcacaaggaaggggtataacttaaggggaagaagaagaggaagagtatgaggcaatgggcctccagtggagggtttctttgcagtgcccagaaacttgggatttaacttgtgcacctgtgaacctcagtatgtttcaaccccagagcactggaaggataggccacatttttgcaagtagcagagtattggcttaggaaagcatgtgtagatttaaattcctcctacaaactgccttccaaaaagattacaatacattcctccttcaaggaaagaacacttgctgatagggaggcattgaaggattttaagaattgtctggtgtgatttgtgctttaaatccctccaggagctgtgtaaaggatgcatttgaaggggtcaagatccaacgtgggtagaacagttaggagagagagcaacagtctggtcaagagacagtgagggcataaatgagacagttgagctagagggtcagcgatatattgtggagatcattctaagctaaaaactaatgttagcaatagaggtttggggctgggcgtggtggttcacgcctgtaaacccagcactttgggaggctgaggtgggcggatcacgaggtcaggagatcaagaccattctggccaacgtggtgaaaccccgtctctactaaaaatacaaaaattagctgggcatggtggcacatgcctacacctgtaatcccagctactcaggaggctgaggcaggagaatcacttgaaccagggagtcggaggttgcagtgagccaagattgcaccactgcactccagcctggcaacacggtgagactctgtctcaaaaaaaaaaaaaaagaaaaagaaaaaagaaagaaaatagaggctccgttgaatgtagggtggttggtgagaaagaggtaggagaataggatgattcccaggtttctggcttgtggtgcaggagatgaggagttcttgagttgcaggctgtgtggttggaaagtgagaagggagagttgaaagatgatcatttagtttcattttggaaactagtttcattttgacattcttatgggaaggacatcaggtagagatgctcaaggagaagttataggcacaaatctgaaatgtgaaataaagttcatgtttaggaaaaacagatttgtgaagtcatctttaatttactctggatagaagtagaatgagagggcaaggctgcaaacattaggaggtaacagtccaaggcagcttgagagaaaggctatgtctactttcatctctttaccctccaaaacccctacacagtgtttcaaacagagcagaccctcaataattgcatatcttacttgttaggttgagaaagaaagaaggccagaaactatgggaagtaacttgattccgttggaattcttttgcataataaaatctgatatgtaatggatgacaaatgagataatatttacctgtttttcagcatgggtcaacaaaatacaagtactgatggctgctgcaagctttggccaaactaaaatcccccggggaaatgggccttattccgttggttgtacagacttaatgtttgatcacactaataaggtaatgctttgatttatacaacttatcctgatactctaatattgtctgtcgctatggaccactagaaggtgttcaaatgtgaccttgccctcacctgagaatgactcattttgcaatttgtattgtttcatatgaaggcttttactagtttggccattcctcaattctttgttattgtctgattaatttctctataaaccttatttttcacttccttaatacctgaagccaggctgcttgtattttcctttcactgagatagaatattgtttttctgtttctctttcatgactatcttcaatcaccacagcagcctaaaaagttctttagacctttttgtgaacacagaggtatttgagtccccactaattaaatatgcaaaatagctgctggaatatgtttgagacacaacttctctaaaagtgcattaatttctttcttaacagggcaccttcttgcgtttatattatccatcccaagataatgatcgccttgacaccctttggatcccaaataaagaatatttttggggtcttagcaaatttcttggaacacactggcttatgggcaacattttgaggttactctttggtaagatttctgttgatccttctttgtaggctcttgcatgtatgaaaaccttgaaaacaacaagaacttcaagtagttaagaccaaagtagatttttcttcagtccaaatagctcctaaaatgataaggaaagtatttctttaaagcccaggcaactacgacagaatcaaggttctcattttgtccattctgagttggatgggagtggccgagagtatcagactgactctgacatctttctgtggctgctctttagttttcatctgacataccatggagaaggcaataccgtggtgagaatagcaggttatttggtgtggccactatcccgcatgctctgtgctaaagttagacaaaaagagaaagaaagtagaagccatcaaactctccagatccaaaacaaaggagtcaaagctaatgcctttcttgtcatacatgaagagactctactctcattcccatcacctacccccatcgctaagacaatctgatgtgtattcttcacttactgtctacattctgctaatatagacttttccttccttatctgtttgactagacactactgttggactgatgttaactgtgtcttcacatttacccctcaaaacgatctacaaattttgggattcatcttaaacatcggcttttaattttcttaaaaaccacttataacagacatgaaaatagcataactctgcatatttatgttgcaaaataatttataaatcacttccatagcaatcatcacattcagtctttatgactgcatctgcattttatagatgagaaaatgaaacacaaatgattgctgataataatggtgacaataaaaattgagaagtgaaagaagacaatatttccattttttgagccccttactatgtgatggattgcaccactgctttacatatattacctaattaaataaaattctcacaaaaaccctatgaaagagatatcattttctgaagtttacagaagaggaatctgaagtacagaaagtttaaggaacttgcccaagatccatagttaggaagtggcagagctgcatccatgactcagtatgaagtcagtggtttctctaccttttcctgcatgattatgaccaaatcataatgaacagagtctctgtttcttagattctggctcttagtgtaatgtatccaaggttttatgggtagtttggtttcagaacattccctttaaaatttttccaaaacctgggaatggcagtaagtagcagcctttatgaatacacctataagtgggaaaatctctcaccttaagtccagagctgtcagtaagaactcatcgttaatgatcctatggtctgaggaaagaacttacgccgggtgcggtggctcacgcctgtaatcccagcactttgggaggctgaggcaggtggatcacctgaggtcgggagttcacgaccagcctgaccaacatggagaaaccccatctctactaaaaatataaaattagccaggcgtggtggcgcatgcttgtaatctcagctaatcgggaggctgaggcaggagaatcgcttgaacccgggaggcagagtttgcagtgagccgagattgtgccattgcactccagcctgggcaacaagagcaaaactccatctcaaaaaaaaaaaaaaaacttacagttcagctctttggttggtgggtatctagtagcagtctttttaatgaatctactattcatccataaaaaagtagatataaatcagatgggtctgcattttatgctaatgagatatgaattaaattcactagcaacactcagagaaaaccttaactataaccttccattgttgtctaggttcaatgacaactcctgcaaactggaattcccctctgaggcctggtgaaaaatatccacttgttgttttttctcatggtcttggggcattcaggtaatgtttgagaggttgaacaattttggcttccaggaataaatgacaatttttttattcaagaaagaaatagcagagtttggaatgtcatgcaggcccttgtctggaggagttgggtttcctcaataattggctgtgggtctattgatcagtcctagacctgtctggtcaagtagttttttccctactatcagctcattgggattagcctcacagcagagaagaaagggtgttgcattttctatagttgtccttcattattgtaatatttacactcttaaaattatcctctgtaaagtttagaacttttgagaaaccaattttagattagctgggaaagactgttattaagagaaatatctgtgaaggcaagagaaggagcaggaaaagatggggagaacctttggaccatgacacaggttggacacctgaaaaggtgatggggaagggagaaggattggataagaagagcttcagaatgaagcatggttctaagaaatattgagccaggccaatggaaggagtgctggactatatttgcttatcaagagtcctgtatctcataggaatgggctaatgttagtacccatgctgtgccaagtctctgggagcagctcactggatgcttagcttccacttgaccatggtgatggatacagaggggcaggagctggatagggtctttagtaagctatgcagtctgtagcatgatagctgagtggcacattttcataacaacaaccaccctcttcactttcttccaccactttctcacctgtcacccctcttctacttcaagggattgtaaaactcagaaaataagagagatggcttttagctgggaagaagttgggtagcacttgcaataaagaattctcttcagcactgtaaatgtagttcagctagctatttgatttctcctacattagtgactggcaaattagaacccaagggccaaatccagcccactgcctatttctataaagttttattagaacacagccacacccattcatttttgtacactgtctatggctacttttgtcctacaacagcagagttcagtagtggtgacaaagactatggcccacaaacctggaaatatttactctctggccttcaacagaaaaagtttgctaatccctgtgctatatcattcccccctcttgaaaaggtcctgtatcttcagcaataaataaatagtttctagctacctcctttttattctctgtggacatttcctattgaatgcatggtatgaggaaaaggttgtgcaaatgaagctgtggaagagggcataaatgcagtgcttagcacatgatttttcaactatttcacccagtccaatcatttaaataatagctaacatgtgttaagtatttacctgtttctaatataagtactgaaaatgtattaattcaattgatcctcactgatgaggtagcatactattatagtgtcaccattttatagataaggaaccaaggcagcaaaaatattgtgacttattaaaggtacacagctaacaagtggtagaaccagggttcaaactcagtggtcagactgcaggtctcattcttgtaactacaatactgtactgctttcctatatacattatcttagcaaaaccttacaactaccctaaaacaaatgctttactcttaggcccattttacaggtgaggacaaaaatgcagtaattacctaaaatcatatagctgggaagtggcagagccaagattaaaaacccaaaactctcaaaggcaatatttataatcactgccctgggttttctcaactttagtagtcttgacattttggaccagataatctcttgttgtgaagggttgccctgtgcattgtaggatgcttgacagcatccctttacccactagacaccagaaataccctcgcccacattcatgataatgaaaatacctccagacattgtcaaatatcccctaaggaacaaaatcaccctcctttaagaaccgtagctctccactccaccccagggcactactacaggggtgtaatggcctccatgttcccagttttattagtggactcagccttgtaatcatgactggtagttgtaattcttccctctttttgttttgaaggacactttattctgctattggcattgacctggcatctcatgggtttatagttgctgctgtagaacacaggtatgttacctgatataattgggctctttggccaactacagggaatgtcaatgctcataactatgtttctaattttcataaaagtttatttaaaatgttgatggaactttcaagtatggtaacatcatgagcaaaaaaggagattgagtttatcgacttaaaagacttaaaagcacctaacatttctagagtgtttattgcctgccatgtcctatgcgaaatgtttttaatacgccatttcattcagtcttcataacaatcctatgagatggttattattattattgttgttgttttaaggaagaggaatatagaggtgataaagggtaatttgcccaaagtcacacaactagtaagtggcagtgccgggatttgattcctgagactgagtttcaacatggctaacattgcctcccagaattaggaagatagaatggattgagtttacctgcaacttgatgatagacaataaggtttttttcctggaactcttttacagtcttctttaatttaagagaaaatatagagtggaagaagaaagggaagtcaaaagatcagaggaagttgagtcaaggatggaactgagaaacatgggtcagatgaggaagggaaggagcatgcataaataataattttgcttgtattatagagatagatctgcatctgcaacttactatttcaaggaccaatctgctgcagaaataggggacaagtcttggctctaccttagaaccctgaaacaagaggaggagacacatatacgaaatgagcaggtacattgcagtgaaaggagaggtggttggtgacctaaaagcatgtacaaaaggatgacatttgttaatttaattttacacctggcaagttatgctcctagctctcctatttcccattcccaaaagatctgtcaatagattcctggagcagtaaaattcccttaatggaatatctagttcatagtaaaaacaaaggcaaatacaaaaatttgggagatgacagtgaatattcagaattcccttgaattaaaacttctaattttagaatctaaaaagtgctagaaaataaattaatagattcttcctcacagacaatataaaaagactacttttcagagaggcagtatacaatagaattaagagtatgggccttagaacccaactttctatgtttgaatcctggctccaccacttaattttgttatagaataatgaatagaaacattatttgtcttacagagctattagggcagttaagttaagtgaagcatattggcttcctctttatagtgggtgttttacatgtgttattatgtttgagtccacccacatttcctttaggtaggaattattatacaatcaatggaaactcagagaggttaagtaaatcgtctgaagtcacatagtaggtaagcaacagagccaggatttggactaagctatacctatgtgcaaagctggggcctgtgtcattatggtagcaagtaatagtcactaatcagatttccagtttataactgaccaacgatttttcccaaatacagcttctacctaaactttaaaataagtgttataactttttactttgtcatttccttcttctaataattatattaggtacggcaaagagcaaaagaatgttcccaagctctcagtctgattcttgacattgatcatggaaagccagtgaagaatgcattagatttaaagtttgatatggaacaactgaaggtaagctataaaaagtaatttttctcttgtcctacagttctttattgttttttgtcatttaattttctgctatattgcaaggtacaatatgataaagggctgcaaccagccccctccccaatgcgcacacacagacacacaaagcagtacaggtaaagtattgcagcaatgaagaatgcattatcttggactagatatgaaattgccaaaagttagtcagttttgatctacaaaaacagcaatgtcatatggttcaactcaactcctgtggaagtattattatttcatggacagctcctgcatgtttttaagcttgatcttgaaaacttgacacaagtttgggagcgggtggaaaaatatcagacagagtgggcagcatgaacaaagactcaaaagtgtgtgtggcatgtgaagtgcagggattagggggaactagagaataagatgatggtctgttctccagatacaatgaagaaatttgttatccctcaagcagccactctcttctgtatccttgcctttgtacatgttgtccccttggcctgacacacccttccccttgcctaactcctacctaatttcaagactccagttgagcatcacctcctctaagaagctttcttggaccccaatacccacttctggactgggctcgctgtctgtcatgtgtgctcctttgtaccactgtactgtattgcatcatgcctctgtataactttcttccctgatggactgcaaactcactgaaatgagactgcagtacctggcacagagtaggtactcaataaatactcatggaatgaacaaacaaataaacatggggtgaggagaggcagaagtcagaactgatgttgaagtttccagtgtgggtgactacaaagaacattaagtttactttcaaacctttacatatgttatatatatgtgtaaatgtgttttatatgtgtatatagatgtatatgtgtgtatggtatgtataaatgtatgtgtgtatatgtatattctattttataagaaatcaatgtatttaaccatccccatgaaatgaacaattatatgattgacaaaatcatttcttctaacaccacgaaatagctataaatttatatcatgctttttcaaataggactctattgatagggaaaaaatagcagtaattggacattcttttggtggagcaacggttattcagactcttagtgaagatcagagattcaggtaagaaaataagatagtaaagcaagagaatagtaaattattggaagaaattatattgtgagatataattttttattcaaattcttagtgaagaagggatctcttggagtttataaggctattcttttgcccccataaaatactctatatacattttcctaggctaaaacatctacctctcctgctattaaaatctccccctactcccataagttttccctcattattcttgtttacccaaggggttaacacttttcactgaaaaatttatctttatataattttttgtgacataatgattgtgataataatattgtcatcttaacagtattgccagacttctccagtgggcaggacattttttaattaggtttttcccccttccacctttaagatggagctggatctaaaattacaattatttgggtaagagttgggacaagaccccagttttctagcttgcaggaacattttctttcttaaaccttcattccagactgatgagatcacatagaaccaaccgtacagagagtgggcaggatcatttttgaaacttcacctcaaatttcttaaaagtccatttcagtgtaagaattctcttctttgatccatttaccaaaagatcaggaaacataggataaacttacttttaaaaaggaagttagtttcatcttcaaatgatatgctccatatgtttttcttcaaccctcagacagtttttcagctgaagtgcctctaaatataaagtaatgggcccaattgttactctaataaagctataataaatacactacaaggtgcataaaagctctgaaaacaaaggtgtatttattatactttttcagatactccacagtgttgaagaaattattatgtattctaaaatttattttgaataaaaagttttaaggatatatcactcaaatggttgcaattcctaaaggcatataaagaaaatgattatataaaattccaggtctgctactttacaaagttaatcatatccctttcccacattgaagtatgatacctctttattccaatgagataacccataataaactggtatggtgcgtgtccaccaatcctagcattattaggatgtcctcaatgttggctagtatgtaaccagtttaatttcatcattgtcaacaaatatctacagatgtggtattgccctggatgcatggatgtttccactgggtgatgaagtatattccagaattcctcagcccctcttttttatcaactctgaatatttccaatatcctgctaatatcataaaaatgaaaaaatgctactcacctgataaagaaagaaagatgattacaatcaggtaagtattagtgacttatttcattatgtgaaacaaacttgaagcttgggtaaatatcaatcgatatcatttggtaactattaaagaattgctgaattggttgtttagactttcaataaggagagaattagataatctcagtttctaagtacatttagtcttactctttttaaaatgggaatgttaacgtatatagtatatatactggttatattagtctgttcttgcattgctatatggaaatacctgagactgggtaatttataaagaaaagaggtttcattggctcacagttctgcagcctgtacaggaagcatgatgctggcatctgctcggcttctggggaggcctcaggaaacttacaattatggtggaaggcaaccggggcatgagcacttcacatggccagagccggaggaagagagggatgggtgaaggtactacacacttttaaataaccaggtctcacaagaattcactgtcacaatgacagcaccaagggggatggtgtgaaaccatgagaaactgctcccatgatccaatcacctcccaccagtccctgcctctgacactggggattccaatttgacatgtgatttggtggggacacagatccaaactatatcactggtaattaaaattagcattatactacatgctacttcaatctaaacaccagaatatgcctacagatttttgggggtagagctagggggaagtattccatcattaggctggggtaggaactctttaaagaaaaagtcagattatcgactgagacctgcaatatactaacctgttgagaaagaatatgagtttataaattccccaaagctataatggggtaccatgacgtgttggcaattcttgtatcctggaggtgaaaaagaactcctgataaggttttgaactctcgatgagatattacaaagcaaagatggacctgaactcacccctttcctatctgaaatctggtttatttaggagaagagaagaggcaggaaggaaatatatggagtataggcaataaacactatgggctcagagaatagaggggtctcttccaacagaaaaggattcatagatgacactaaaattggattttgtaagatcaagagagtttagatagtaaggaagggtttaggtatttcaggcaaggacttcatttagcttatgtgtatgtgcaactctttctaattctaaaacggaaataatacagaacacctaaccttccctcaaccctatttccttactaagctctcacctttgcttttgtcccttctctgctagaaaccttcaaagaatagccaatattagtcattgcatgtgcttacttctattcactctttgactcttgtggtctagcttcctgggcccccacgggcatgccaaaacaaagacactaaaggcctgctgcctgccacaccagcagcctcttcagagtctcaaccttgctctctgcatctgttcaacattgctgaccacccctcttcctgctcccttggctactatgacccacctctttgctgcttctcctgtcatttataccactccttccatttcttctcctctggcagttctctacagtcagatcatccaagcttctgctcgcaattctcttgtattcctgctgtttatcttctttatgtttctgacattcaagtttcctactacaatgtggggaagagtgagagggagttaagtggccctgttttgagcttagatgactaaaagaatgatgggttgcttataagaaccagcagagtcaagaggcagagcagctttgggcaggactgggaagatgtcttttaacttcacaatttcttagcttgagaactgaggaatctgtacacagatgtctggccacacattggatgattacataatttacatgataacacagatgaaacatttgaagtagaagagattgcaaagtgagaaaagagttggtctgccagtagaatcctaaggaatgcctacattcagccaatgggaaatgggtgaagagccagtgaagaacatagagtggttagcgtcagaagggaaggtgcaatgttaaggaaacgtaaagaaaaaaagtgcaagaaggccatcaagtgtcaaatgtcccagtggtggtagaaaacgaggacttaaaaaaggccattctatttgacgttaggctattgatgaatttacagagcagtgcaaatgatatttataaagtgcttacagtttaatactgggaaaagtggtgtttgaaatctgtttcctctaaggcttaaatctaaagtgatttaaatttaaagtgactagcatcaaatacataccacgttcagtggtgagggcaggtagcaggctctggctctgagttcagggacccttcaatacagaacacattccagtattcaaactggaagtattccaattcactaaaaagcaagaatcatttcttctaaaatcaagataccaagcaagaacaagattctttgagttgtatttctagagggaagaagaatatactctgggatccctaaacaaacagcctgtgacccttgaaacacatctaagtagatcaaattacaagttttatttcttctttggttttcagtaaacagaccaacaagaccagtacctttcttacactctaactaaaaaaataataattttatcaaacaatgtgacttttaaatgtcttgttctcttttaggggttcagtccaccagaattttgctgacttcacttttgcaactggcaaaataattggacacatgctcaaattaaagggagacatagattcaaatgtagctattgatcttagcaacaaagcttcattagcattcttacaaaagcatttaggtaagaaactatttttttcatgacctaaaccagatgaatctcaggacaaagctgtctatcttaatacagctttagtactatttaaactatttccagttggtttacaatggaacaaagcagtatatcaatttgaaaacagaaatttgagaaagtcaattttgctgctttacatcctctatatcatagaaagcaaatccaactgttaaaggtaatattctttgtatgaagcctagagtggacttccatgttgaggatactgacagcaggttgcctcactcctatcccgtttgcattcagctgctaaagcagccatgaggcagctgatacagagcacatcgtctctaccatcctaacggaacttgtgtaatttgtaaatctttattgccacctaggggcaccaaactgtttaatgctctcaaaagtttaatatgttgattaacactttatattttataggacttcataaagattttgatcagtgggactgcttgattgaaggagatgatgagaatcttattccagggaccaacattaacacaaccaatcaacacatcatgttacagaactcttcaggaatagagaaatacaattaggattaaaataggttttttaaaagtcttgtttcaaaactgtctaaaattatgtgtgtgtgtgtgtgtgtgtgtgtgtgtgtgagagagagagagagagagagagagagagagagagagaattttaatgtattttcccaaaggactcatattttaaaatgtaggctatactgtaatcgtgattgaagcttggactaagaattttttccctttagatgtaaagaaagaatacagtatacaatattcatatcagcctaaattttaattttaaagatgattccttttcagtgtcgaagttaaaaactgtttttacattactttgacagacaagtagattaaaacaggcaaaatcccagtgaaaa

SEQ ID NO: 456 - DNA, 33329 bp, Homo sapiens
agttggtaaactcactgcaaggggcagggcagagcctctgagcttaagttagttttgtttccctgtcccggatacaagagttggtaagctcgctgcagtgggtggagagaggcctctagacttcagtttcagtttcctggctctgggcagcagcaagaattcctctgcctcccatcctaccattcactgtcttgccggcagccagctgagagcaatgggaaatggggagtcccagctgtcctcggtgcctgctcagaagctgggttggtttatccaggaatacctgaagccctacgaagaatgtcagacactgatcgacgagatggtgaacaccatctgtgacgtcctgcaggaacccgaacagttccccctggtgcagggagtggccatagtgagtccagggctgaggttgggtctctgggaggcaggagattccacggcggcagcaaggccgagctactgggtgctgggtgcctattatgtgcgaggcccacacttgggtgggatgtggtgtaggagtctcaggctctggagcaggcgcttgctccagagctgtgtgacactgggcaggctacttaacctctctgtgcctcagtctctgactctgtaaaatggggagaggcataatacccacttcagagtatcgtaaggcttgagcacatcatgttcttagcaaaagactggcagtgctcagtgaattcactgtgattactcactgcgattttcttctatcctctccacagtacagaggagtaaacttagggaggctagagaactttgttcaaactacccaggttgccttgtggtttctccgcagcaagaaggagtggcttttatcagttagaaatatttggttttgtggacacaaatctcaggactgaggctgaaaattctggacctctggggaggaagggggactggggagatgccaggaccctagaattgggggcgtgggggtcctgatggcccaatactatcctcttagcctcctgagctgctgacgtcccttctctgctgctgccacactttttggtctctaccccttgcacacatccgctagtgcctcaataaagaaatctagacacgtggtgtccccagccctggcccaggccagcaagctaaggcaagtttggttaatagctattgtcagaactgggattttaagcctgggtaattggcttgagggcatgcatgtttaaccactacactatcctgcctctcaatttttttttcctcatggaagtaaaacagaaaaagtgcccagatcaaagtgtccagcttgataggtagccacaaacaatgtaactgtgtaacccccacccagatccagaaacaaaacattctcagccccccagagccctgggcccccgatccagtcagcacctccaaacccaggtaggcaatctcctgacttctaacagcatagacacgttttgcctgtttttaaacgttttacaattatagggtgaccaactatcccagttcatccaagattggggtgtttcctgggatgtgggactcttggtgtgaaagctgggaatgtaaaccaggatgcatgggtgaaccctacataaatggcatcatgggctctgtgtgctttagtgcgtggtttctctgacctatgatgtttatgaaatttatgttgtggggtacagttgtttatcttttcattgttgtgtcaattccattatgtgaatattccacatttgtccattctactgtgtttttttatttttacataattgtgcatatttatatggggtacatgtgatatttggacacatggatacaatgtgaaatgatcagggtagttaggatatccatcacctcaaacattgatcatttatttgtgttgagaacagttcagatcttctcttctaactattttgaaatatataataaattattgttaactatagtcaccccattgtgctatcaaacactagaatttatcccttctatctaactgtatgtttgtatccattaaccaacttctcttcatttcctcctctacttcccagcctctggtaactatgatcctactctctacctccatgagatcaactttttttaacttccacataaacacatgcaatattgtctttctatgcctgacttatttcatttaacataatgacctctagttccatgcacattgctgcaaatgacagaattccattctttttgtgtctgaatagtattctattgtgtatatatactacattgtctttatccattcagctgctgatggatacgttggttgattccatatcttggcttttgtgaatagtgctgcaataaacatgagggtgcagttatcccttttttggataaatacctagtagtgggattgctggattgaatggcagtgccatttttattttttttagaaacctccatactgttttccgtaatgactgtgctaatttacattcccaccaacagtgtgtaagattccctttactccaaatccttgctagcgtttattttttgtctttttgataatagctattctaactggggtgagatggtatctcattgtggttttgatttgcatttccctagtgattagtgatgtcaagcattttttcatatacccattggccattttgtatgtcttcttttgagaaatgtctatttaggccctttggctgctttttaatgggatgggttgttttctttgctgttgagttgttcacgttccttgtatattctggatattaaacccttgttggaaaaatagtttccaaatattttctcccattctacagcttgtcttttcactcttgattgttccctttgatgtgcagaagctttttcatttaatatagtcccaattgtctattttttgtttttgttgcctgtgcttttgaagtcttagccacaaaatacttgcatagaccaatatcatgaagcattactcttctgctttattctattaattttatcatttcaggccttatgtttaactctttaacccatttttagttaattttttataagatgacagacgggggcctagtttcattcttctacatatggatatccagttttcccaacaccatttattgaagagagtatcctttccctaatgtgtgttcatggtgctttctcaatcagttggctgtaaatttgtggatttgtttctgggttctcgattctgttcctttggtctatatgtctgtttttataccaatcccatgctgctttggttactatagctttgtagtatattttgaagtcacgtagcatgatgcctctagctttgttctttttcctcagtactatttggctatttgagatcttttgtgtttccatacaaattttaggattgttttttctatttctgtgaaaaaaaatgtcactggtatttataaggattgcattgattctgtagattgctttgggtagtatggttattttaacaatattaattcttccaatccatgagcatgggatgtctttccatttgcttgtgtcaccttcagtttcttttatcagtgttttgtagttttcactgtagagatctttcacttccttagttaaatgcattcctaggtatttttgttaaatactataagattgctttcttgatttctttttcagctagttcattactgatgtgtagaatatgttggtattttggtatgttggtatggtatgttgattttggtattttgattttgtatcctgcaactttaccaaatttatcagttctaagaggttttcttggtggagtctttaggtttttctgtatagaagatcatatggtctgcaaagaggggcaatttgactttttcttttcctatttggatgccttttatttctttatcttttgggattgctttggctaggacttccaggatacaggctgaaagcctttcccaattcagtatgatgttaactgtgggtttgtcatatatggactttattatgttgaggtatgttccttacatgcctaatttgttgagggtttttagcataaagggatgttgaattttaccaaatgttcttctacatctaccaggataatcatatgatttgtccttcattatgttgatgtgatgtgcaaatgttcaacatttgttgacttgctcatgttgaaccatccttgcatccctgggataaatcccacttgatcatgtgttatcttttcgaagtattattggatttggtttgctagcattttgttgaaggtatttgtatctatgttcatcagggatattggcctgtagttttcttttttgttgtgtctttggtctagttttggtatcagggtaatgctgacttcatagaagtggttaggagtaattccctcctcttcaatttttttggaatagtttgagaagaattggtgttaattcttctttataagtttggtagagttcagcagtaaagccatctagtcctgggctattctttgttgaggagttttttattactgattcaatctactcactcactattggtctgttcaggttttctgtttcttcctggatcaatcttagtaggttgtatgtgttcaggaatttatccatctcctctaggctttccaatttgttcacatgtagttgttcatcatagtctctaatgaccccttttatttctgtggtatcaatggtaatgtctccttttttatccctgattttattttacttgggtcttctctttttttagtctatttagtctaagtagcggttcatccattttgtttatctttttaagaaaccaactttttattttgttaatttttagcctctattatgtttagttctgttctgatttttattatttctttccttctactaattttaggtttggtttattcttgcttttttgtttgtttttgagatggatttttgcttttgttgcccaagctggagtgcaatgacgtgatctcagctcactgcaacctctgccccctgggttcaagtgattctcctgcctcagcctcctgagtagttgggatcacaggcatgcaccaccacgcccggctaattttgtatttttagtagagacggggtttcaccatgttggtcaggctggtctcaaactcctgacctcaggtgatccacccgcctcagcctcccaaagtactggaatttcaggtgtgagccactatgcctggcttttcttgcttttctaattccttaagatgaaccgttaggttgtttatttgaaattgttctactttttttgatgtaagcatgtattgcttcaaactttgctgtatcccttaggttttggtatgttgtgtttccattttcatttgtttccagaaattttttgatttccttttaaatttcttcatcagcccagtggttgtccaggagcgtgttgtttaattttcacgtatttgtacaatttccaaagttcctcttgttccattgtggtctgtatccattgtggtaagtatccattaagatacctgacagtatttcaatttttaaaaatttgttgagccttgttttgtgacctaccatagggtctatcctggagaacattccctgtgctgataagaatgtgtattctgtagctgaataaataatctgcaaatattcattaggtccatttggactataatgcagactaagtccagtattctttgctgaataaataatctgcaaatattcattaggtccatttggactataatgcagactaagtccagtatttctttgctgattttctgtctacgtgatctgcccaataccaaaagtgagatgaagttcccagctattactgtattggcagtctctcggtctctgtttagctctaatatttgctttacatatctcagtgctctaccgttgggtggtcatacatatgtgtataaatatacatatacatatatatgtctatatacatatatacacatacttatatcctctggctgaattgatctcttgatcattaattataaaatgaccttctttgtctctttttatgtttttgacttaaagtctactctgtctgatataagtatagctactcctgcacacttttggtttccatttgtgtggaatattttttccattccttcacattcagtctatatgtatcttcacagatgcagtgagtttattggaggcagcatatagttggaccttattttttatccattcagcttgtctgtatcttttaactagagaatttaaaccgttgttaaattcagggttgttattgataggtaacaacttactcctgtcattttgttatttgttttgattgttttgtacattctttgttcttttctttctctttattgcctacctttccaattgttgggggttttgtaatgataacatttgactcctttctctttgtcatttgtgtatctgctctaccagtgagttttatacttttgtgtgttttcatgatggtagacatcatccctttgcttccagatgtaacactctcttaagcattttctgtagaactagtctagtggtgatgaattccctctgtttttgcttgtctgggaaagactttgtttctccttcatttttgaaggatagctttgctgggtatcgtattcttgtctgaaagggtttttttttagcactttgagcatatcatcctattctcttctgacctgtaagttttctgctcagaaatctgctattagtctgaggagaattcccttatatgtgactttatacttttgtcttgctattttcagaattatatgtttgtctttgacttttgacagtttgactataatatgcctgcagaagacattttggggttgaatctatttgagaatctttgagcttcctgtatctgggtgtctaaatctcttgtaagacatgggacgttttcagctattacttcattaaatagattttctatgcctttgcccatctcttctcctagatctttccaaatttaaatatttggttactttatgattaccaatatggcacataggctttcttcactcatttttatttatttttctctccttttgtctggctggattatttcaaaagaactgtcttcaagtttagaaattctttcttctccttgacctagtctattgttaaagcagtgagttgtatttttattttattcattgatttcttcagtttcaggaattctctttggttctttttagcaatatctatctctttgttgagtttctcattcagagcataaattattttcctgatttatttgtattgtttatctgtgttttcttgtatcttactgaatttctttaatatcatggttttgaatttttcttaaccattgcacagatatcattttctttgggatctgtactaaagaattattgtgctcctttggaagtgccatgtttcccttgctttttcatgtttctgtgtccttacattgatatcagcacagctaatgtaacagtcacttctccaattttatttattgactttcatagggaaagacattttcctctgctgggcatgatggctcatgcctataatcccagtgactcaggaggctgaggtgggaagattgcttctggcaggagtttgaggttacagtgagatatgattgtgccactatgctccagcctaggtgacagagcaagaccctgtctctaaaaaattaaataaaaataaaataaaaaagatgttttcctgtagatgtgtctatagtgttggttgagtggagcgctttggctttgattctgtgtgggcacagttagtggagcctccacatgatttcattagcatcagtgttgtctgtgagctcctcagtggctgacagtgtagttgttaatggagtctgtggaaaggctgtgctgggaacagggacatcaggcaggttggtcttcaagcaccagtggtgacagcagtatgccaggcatgctggtcctcaggcccccaggcagtgtatgtgggtgtcaatgctggtgtgtccaggtgggcagggtatcagacttcaagatgacatgttcgggtgccagtggtagcagcagtggactgaacaggcaggtccttgggcccccaggtggcttgtttggaagcggcagcagcaggccaaccctcaggccctcaagtggtgtacacaggcatcagtgatggcaagctgggtaggctggtccccaggcccttgggagacacatgtggtcactagtggcaggcagagtgggcccatccttaggcctctggatggtgtgtgcctgtgctgctggtggtaaagaggacgggttaatctcctggcccctgggcagcacatgtggatgctggtggcaggtggggcgagcctgtcttcaggttccctaatggtgtgtgcaggtgctggccgcaggtgggacagttttacccccattcccccagatgcgcacaggcaccagcaacaatggcaggtgaggcgatcctatcctcaggccctgggacagtaagcacaggtgctggtggcaggtggggcagttcaatccgtttctattgccagcggccatttgagtcacctccaggttggggctagtatgaaaagtgttactatgagcatcccaatcaggtctttgtggggcaaatggatgcctgccactcaatgttaagaccatttttggcttttacttgagttgagaaataccactgcctgctagagatccctgtaaccccagaatctagtgtctcatatctgcttctttgtcactggcagggtggctcctatggacggaaaacagtcttaagaggcaactccgatggtacccttgtcctcttcttcagtgacttaaaacaattccaggatcagaagagaagccaacgtgacatcctcgataaaactggggataagctgaagttctgtctgttcacgaagtggttgaaaaacaatttcgagatccagaagtcccttgatgggttcaccatccaggtgttcacaaaaaatcagagaatctctttcgaggtgctggccgccttcaacgctctgagtaagcattgctgggtgtcaggagagaaaagccaaagaagcgggtgccagacagctctgtgcaacctctaggccatgagtgggatagataccactgctgctttaaaaaatgggagaccatagaccctcaggagagaagaatcccttctaccctggactcgctctcttctctggaactaacttctcccccataccctgattgtctttggagaaaatgttctggattctagaatctaaggcagagccttttaagccatactgtacacataaatcacctggaaccttgttaaaatgcagatcctgactcaggaggtctgagttagagcccaggatttcatatttctagccagctccatgatgagctgctggtccgcagatcatgcttgcaggttttgaccagagtcagtgttggttagagtaagaggatgaggcagacatctgggaaaagtccagctggggcaagcatttgaagtctgccttcctaccaggtcaaaatcaaggcaacgaccttccatagataactatcaaagcttgagggggtgccttgaacccaactcctaaatccctaagacctgcccacctcttgtgtctcctgtctcagcaaacattcccacactcttgcatattgttaaagtaacctctgcttaccaggcttctggtttaataaaagatggctagagtgactccatcttaaagcaagtagctaggcactcaaaaggaacctacaggcttaatacttgggtctgaaaatagccacagtctaagctgaccaccaattataattgcagaatatttaaggccatacaaaacatctcccactaagcctacaaaatgtccaggtgtcctaaaagttcagcccacttaaaggcagcattaatgagcaggtttaggttgaaggattaatggtcatcaataccactgttaagaagaaaattcttggccaaattgaatttaatggagtttaactgagcagacaattcacaaatctagaagcctcctgagccagagtaggttcagagagtcttgaacacagccacgtggtggaagaagatttatggacaggaaaaggaaaatgatgtactgaaaatgaaagtgaggtacagaaacagccagactggttatagctcagcattggccttatttgaacgagatttgaacagttggccacctttgattggccgaaactcagtgattggcacaagagtaggttgcagtctgtttacacatccttttaggttatagttcaccatgtacagagaaattttaggccaaacttaaaatatgtaaggaggcagctttaggctaaacttgatttaacagcaccaataccccctacctttagtgagcacatctgcacattccaattttaatgacagctccttagaatttcttatcaacgaagacactaacaaagaatggcgcattcctccttctcctttctgaggatgccctaccctgtaacaaagtcgtttctaataaatttgcttctttcaccatactctgtacctgccttgaattctttcctgcatgagatccaagaaccctctcttgggatctgaatcaggaccctcttttccagcaacgctatcacctgtaaaccaaaagtatctgagacaggtctcaatctatttagaaagtatatttgccaaggtgaaggatgtacccatgacacagcctcaggaagttctgatgacatgtacccaaagtgctcagggtacagcttggttgtatacgtggtatggtttggctgtgtccccaccaaatctcatcttgaattgtagctcccacaatttccacatgtcatgggagggacccagtgggaggtaattgaatcatggaggcaggtatttcccatgctgttctcatgataatgaataaatctcacgagatctgatggtgtcataaaggggagttcccctgcacaagctctctctggcctcccaccatgtaacatgtcccttgctcttccaccatgattgtgaggcctccccaaccatgtggaactgtgagtcaatcaaacctctttcctttataaactactcagtctcaggtatgtctttattaacagcatgagaacagactaatacaatacattttagggagacatgagacatcaatcaatgcaggtaagatgtacattggtttggtttggaaaggcaggacaactcaaagtgggggcttccaggtcattggtagatttaaagattttctgattggcaattgatggaaagagttatcatcaatagaagggaatgtctgggttatgatgataaagggttgtggagaccaaagttttatcatgcagctgaaaactccaggtagcagacttcagagagaatagattgtaaatgtttcttatcagacaagagcctgttctatcactaattccaaaagagagggaggtatcatgaggcatgtccagctcctccttcccatcatggcctgaactggtttttcaggtcaactttggaatgcctttgctgagaggagaggtccattcagatgactgggggtgcttagaattttgtttttggtttatatacctaagccaggattgtatctccagctcccccacctcctcactcacagcccatcactaagtcctgccagttctgcctaacttgctcctaaatctgcatcatttctctcccttcccactgctacttccctagtcaacgtcaccaccagggatggggcaatggcttcctaattgtctccctgcctcctgtctcactccaccctgcagctggtgctctctttccatgcacaaatattgtgtcacacactctgcctctaatggcttttcactgcatttaggaagttgaccaaaaaggccaaactctgtaaaatattttaagaggttttttctgagccaaatatgaggaccatgacctgtgacacaatctcagtagttcctgagaacgtgtgccccaggtgattaggttacagcttgatttgtatacattttagggggacagaatttacaggcagaaacgtaaatcagtacacataagatgtgcattgattcagcctggaaaggcaaaatgtctcaaagcagggtcttccaggtcatagatggttataaagatttcctgattagcagttagttgaaggagttcagcttaagaaaaggggagttgtggaagacaaggttcttattatgtagatgaagcctccaggtagcaggcttcaaggagaataggtggtaaatgtcccttatcagaccttaaagatgtcagacgattagttaaaatctctcctgaatcaggaaaagatctggaaggggaaggggattctccacagaatgtgaatttttccacaggacacagctttgcagggccattccaatatatgtcaaagaaatatattttggggtaaaatacttttgatttcctttagggcctgttatctgtcaggtgatgccagagttaggctggaatttggtgtcatactgctacaaagagtctgttctgtcagtcttggggtctctattttaatgttagtgtttgtcgattgtgcctgaattccaaagggaggagggtataatgaggtgtctgagctcccccttcccatcatgacctgagctagtttttcaggtttctttgggggttccccttggccaagagaggggttcattcagtaggttgggaaggcttagaattttatttttggtttacaaggataaggatcaaactcctcagcaggacaggactttgatgatctggcagcccctacttacttacctctccagctgtaccactcaccaccaactaactctctatgcttcagccactctggccttccctgagctcctcaaacccacatgatgctagctcaacttgagactttggcctatactgttcctttgcctggaatatacttcccccagccttttatttttggataactccaactcatcctttaagtcctctggctctctatgtctgggttagatccactttccacatgctccagtagcaatttgtgctgtctgaatcatgggatttatcactttgcaaaccccaactatctgagacaggtctcagttagtttagaaagtttattttgccaaggttgaggatgcgcacccgtaacacagcctcaggaagtcctgatgacatgtgcccaaggcgctcagagcacagtttgcttttgtacgttttagggagacctgagacatcaatcaacatatgtaaggtgaacaatggttcactccggaaaggcgggacaactcgaagcaaagtgggacaattcaaagtggggagagggcttccagatcataggtagataagagaccaatggttgcattcctctgagtttctgattaacctcttccaaaggaggcaatcaaatacacatttatctcagcagagggatgactttgaatagaatgggaggcaggtttgtcctgagaagttcccagcttgacttttccctttaaccgagtgattttggggccccaagatttattttcctttcacaacttatatggaaataatgtatttagctttctcctctcctagactataagctccatgaggacaggtatcatgagtatcttgttcttctatggtctctagtacaatgttcattattaataatagttgttggttggatggatggatggagcatgatggataaatggatggaaggtaaatggatggaaaaatgaatgtagatggatggatggatagatagatattaaatatatgtatatatttatggatgaggtagatagatggatagtctcaagcacaaagtctcaagtacaggtgcacatataatcacaaacttaaataattccaggctgggcacagtggttcttgcctataatcccagcgctttgggaggctgaggcaagaggattacttgaggccaggagtttaagaccagcctgggcaacatagtgaaaccccatctctacaaaagaattaaaaattagatgtggtggcatgcagctgtattcctaactactggggagactgaggcaggaggatcacttgagcacaggagttcaaggttgcagtgagctattattacaccactatactccagcctggacaacggagcaagatcttgtcaaaagaaaaaaaaaaaagaaagaaagaaaagaaaaggggaggggaggggaagagaggggaggggaagggaaaattcccaagctgaaacttaagccatcattaaacaaatggggaaacagaaaagcccaggtcttctaagcccatggccagagtaccttccatcacctatagttttaaggaatttctgggttaccaggaaccatgaagaacaattagcccaggcatcactgataaggaggagacatacagacatcctgataactcacattcacagaaaggtggcctggcttggggaaacatgtaccagtttgggaggttggcagttctgagttcttatcctggtcctactactcacttatgcctgccagctgtacagtcagactagaaactagattccagggccattaggatgctcagggttgggggtgggggcctgcttcaaacaagggctggagtcaaggagggagacaggtgcatcataattctcataggaaagtcctctcttcctgttccaagtgccatgctgggagacctggccagagcgccctctactgggttcaccccatcatgcaaggatggtgtgagaatgagaaataaactcttccccacatgtgctacccagaagctgccactagatggtggtaaagctgcacattccaaattattataagctcctttttctgcaaggaaacacagggtcactttctgagaaaagcaacctacaggggaattggtaacttgcttttcgttttgttttgttttttaaactaaatattagcctaactaatctggcctatttttacaccaggtccaggctggctgtctccaattctgcatctctttccaccactgtgtgccactacaactctccccctagggcctttgacccaaagcaagaagtacctatttacttgactggctggtatttccattatcctcatctgtaaattagtaattgcaattgcacttgccagctaagagttttgtgaggcttgtatgtttcactgtacataaaaggcttagagtaaacacaccataaacgttagctatttattatcattatgggggaagatagaatgctctttccgtcaacctccctgcatgccaagtgcccagaaccatgcctagggagtcagtaaatatccactggggtgtatgaaaggaacaagctagctgctttctcctggtttcttatctaaatgtgtttatgggccagggagctggctcacgtctgtaattccaacactttggaaggccaaggtgggaggatcacttgaggccaggagttcaagaccagcctgggcaacaggcttttttttttctccaaaaaaaaagccaaacatggtggcacacgcctgtggtcccaggtactcagaaggctgaggcaggaggatcacttgagccttgaaatatatttgagggtacagtgagctatgattgtgccattgcagtccagcctgagcgacagagaagactctgtctctaaaagtaagaataatgatgaaacaaactcagtagtcctatagaccattttttgtttgtttttgtttctatttgtttggttgtttttttgtgggggggggagggttgttttgttttttaatgaacatagaaattgacccttctgatcttaaagcttgaaacttacatttgttttatctaagttccttcctcagaaaaggaacctcagacctctcaaaaagtatcaaagaactgaaactcaccagtcactgcatccagacaatgggatgtcaaatcccttattcctcatgattacctccttacccctccctaattcccgttttcccacacatagttacatttcttccctgctatatagaaccctaactttagtctgtcagggagaaggatttgagactgatctcccatctcctcagctgcagcacctgattaaagccttcttcttggcaacacttgtttccgccattggctttctatgtggtgagcagcaggacctagactgaacccctggtgtttcagtaacagtaatcaatcaataaatgtgtttattttatttttatttttattttgagacaaagtctcactctgtcacccaggctggagtgcagtggtgcaattatggcccagtgcaacatccacctctcggggtcaaggagttcgcatgccttagcctcctgagtagctgggattacaggcacctgccaccacgcccagctaatttttgtatttttagtacagacggggtttcatcatgttggccaggctggtctcaaactcctggcctcaggtgatccgcctgcctcagactcccaaagtgctgggattacaggcatgagccaccgtgcctggctaaataaatgtgtttataaacagtggaactcagctagcaagaatggaaacccattgattaaaccagcccctgtccccagacctccagggccctgctgccaccttgcctgcctcctcaaagtccctgtaccctgacattctgaagtaaaatattcacaggatggactcaatgacagaatatattgcatgtaaaatataaactttcctttcttccagatgtatgctaactatgccaacacaaacaattttttaaagaacccacttgctccctactaatttggataattccctttctcgtttataattccatctcttgtccctccattaggttctgctgatcttgtcttgggttaacaccatactgttttcattacagtcagtttagactacactttattatctaatgggccaagtcacccttccctactatgttttatgtaaaggtacctgtcctctgaccgattaagcaagagtcgtgtgctatcaaactataactgaccttcattgtagagcaaccctggctctctaaaaccaggttacataaataacaacgttccaatttctgtttcacatcaggcttaaatgataatcccagcccctggatctatcgagagctcaaaagatccttggataagacaaatgccagtcctggtgagtttgcagtctgcttcactgaactccagcagaagttttttgacaaccgtcctggaaaactaaaggatttgatcctcttgataaagcactggcatcaacaggtaattttccaactgtctatatatggttatcattcatttcctttttatcgagataattgacatccagtaaagtgcaacaatcttaggtatacagctcaacgcattttttacaatcttaccagcaacacccaaatcaacatagggaacgtttcgtgtaccccagaaggtgcctcaagcccattgtccccctagtaatcctcccaaacaaacccctattctaacatctattaccaccgcagattagttttgcttgattttaaacaaacaatgtaagtgggattatatggtacatacttcatgtctgccttctttggctcaacgggatgtctgagagactcattcatatggttgcagggtcttgctctgctgcccaggctggagtgcagtggtgggatcttggctcactgcaacctgtctcctgggctcaagcaatcctcccatctcagcctcccaagtagctggaactacaggagtgtgccaccatacctggctaatttttgtattttttgtagagatgaggtttcaccatgttgcccaggctggtcttgaactcctgggctcaagctatgtgcccacctcagcctcccaaagtgttgggattacagacatgagccatggcacccagccatagtagcactttttttcattgttttcccatattcaattgtattaatgtaacacacatttatccattctgctgctttgggtcattttcaaattggggcaattttcaaatagatgattgggtcattttcaaattggggcaattatgaattaggttactatgggtatttccctacatgtctttttgtgaatgtaagcattcatttctcttggataaatatgtagcagtagaattgctgggctatccagtgcacatatatgaatgttgtgtacatatatgcgtgtaaatatataaaatatatatgtagtttgtttttttgtttaaccatagcaaatcttgccgaatcatttccaaaatcttaccaaattatactcccatcagcaagatgtgagtttcaggcatattctcaaacccaactggggatctgcccacccagcgcagcaaagccaaacagactttgggattgcagtgagagagtgaagcatttattgcagggagccaagcagggagaattgggcagctcatgtttaagagccgaactccccgatggcttacaggtaagggttttaaaggtgaggggacagaggttacaggcaaagccataaatcaacacatggaggctgtacattggtttgacctaaaaaggtgggacgtctccaagcaggagggaggaggaggatgggtggcgctggtcacaggattcaaagactttccaatttgtgatgggtgaaatgggcgaagctttatctaaaaatttcagatcagcagaagggaacgttagctctggctcgtaggtgtgacctcctccaaaaccctcaggaagaaatttagaacaaagaacgaggtcagggttcaatcctcagtttcccctcatctgaggtctacctgccagtggatttgcttggtgggggcctgagtttctgaaaatcaactcagggacatatgctaagatgttatctttagtttctatagggaacaaaacatcttttgactctaacttccttggctactgttttaagtgactattaccttcttttttgttgtttttgttttattgggttttttttcactgctcctgtagaccctgaactactgtatttttgcttatcgagttgctcattgacttttcaaggctagtaaggtgcctggaatttccctcgaaagaactccagattttcctttattttcatgcttgtgggatgggagcagtgggtggcctgcagacacctaagagaggtccctgctccatcccagttgttccacatctttgtcaagacttggtattgtcagtccactgaactgtaggcattctagcaaaggacaatgacttcctgtagacctctggtttcttgatttcagatccctgacatggtaagaactagatcccccaatgagctgctaccctttccttatcccacagtgccagaaaaaaatcaaggatttaccctcgctgtctccgtatgccctggagctgcttacggtgtatgcctgggaacaggggtgcagaaaagacaactttgacattgctgaaggcgtcagaaccgtactggagctgatcaaatgccaggagaagctgtgtatctattggatggtcaactacaactttgaagatgagaccatcaggaacatcctgctgcaccagctccaatcagcgaggtgccaagcttctcacaccctatccctgtacctcatcatccgcatgccaggcatacctctttggaatgagatctcagccttgccctatcaagccagtgctggaccagaagaatggcagccaccatgggtggggaggcagatgggtctgtctgaaagaggggaggtccagccagtgcttttcacattccaaaccatagtcacattttgtcccctaaacaaacactggagagacacttccccttatagaaggaaggagctaagagagaaaggggatggggggcaggaagaggagaccactttgttattttattaatagaatgtctctgtaaagcagcaaacccagggccagaggggcttgatgtcgtagacaaaatccctcagcagcttggaggagctgcaggaatccaaattcaagttgccggattcccactccaggcctctttccccaaaacagattttgcctcccacaagcagctcaactgactttttttaatctaatggaatacacaggccagtaatcttggatccagttgacccaaccaataatgtgagtggagataaaatatgctggcaatggctgaaaaaagaagctcaaacctggttgacttctcccaacctggataatgagttacctgcaccatcttggaatgttctggtaagagggttttccaaatacagggtgtttcatgctgcaggaaggtcttcctgacacccaggctaggtcttatctgagagtactctatattcgtttcctgtattgctgttacaaagttccacaacacagatggcttaaagccacagaaatttattctcttaccattctggctattacaagttcaaaatcagggtgttggcagagccaagctctctgcaggccctagggaagaattattccaggcttcctgcagcttctggtggttgccagcagtccttggcttgtggctgcatcactccagcctctgtccctgaggtcacatgcccttctccctacatgtcttcacatcaccttccctctgtgcatgtctgtcttatcatctcctcttcttctaagaacaacagtcatactgaattagggcccaacataatgacctaatcttcactagatcccatttgaaaagacactatttccaagtaacacacattcatcgatactgtaggttggaaccccagcatcttttagggagacacagttcaacccatcacacaccatcagggcaatgactgtgaagtgcaaaatggaacaaagagaaaggggggtacccaaagatgcgagatctcaattaatttttgcaagagagaaagctggtgagcaggtggagacatgaaacggagcattgctcagagaagggggtggcagtcaggcctgtggatgccaggacaggctctgagctccgttcaggcaggtgccgggggcaacagtcagaagtgcggccgaaacaagagaaccaattaaggcaccagctgtgaaacaggtgcactggccttccccctcccatccccaaaaggagaagtaaatctgtcaacacaaactcccctgcatgctcagtgcttattagagaaaagccatccaagaagaaccttcccaggttagaccactgagccctctcagctttcctgggaaccgcactggagacaactgtattaattgaggccaaagaggccaatcaaattccacagttcacagacagattaatttatattcaagttatgggaggcggaatctataccccgtttgcacagaagtttgaaggctaactgagtaccaatctggcatgtaaatgaagatgtaaatgagtttagcaaacttcacagaggttggggagtctatgaatggggaacttccctaactggacccagaaggatcaggacgctctgagcagtcacccctgtgcccaccctaacccctactttcactggacccctggtctttgctctctgaccccaattttcccggcttcttcagacagattttttcaaaaaattatccccccgacctgacatcttattctgaagctttgaaacatttaaaaagttagaaaaatgattcagtaaactcctatgatcccctcacatagatgcagtacccatgtgcaacatttgctatgttacagtttgtgtgtgcacacgttattattgttgttgttacagttgtttttaatctttttttaagagatggggctataactcgctacattggccaggctggtctcaaactcctgggctcaagtgatcctcccacctggcctcccaaagctctgggattacaagcgtgagccacctcacctggcccattgttatagttgttgtttatactgagccctttgagagtagactgccagacatctctttacccttaaatgctttcatagggatctctgagaacaagaatattctcttcaataacctccatgccatgatcaaattcaggagactaggagtcatatattattgtcccaatacagcccattgggatgatttcgacagtcattccaagaagggcctttataggacattcttttccaacccagaagcacatgtggcatttagttccaaacatctcctaaaccatcttttgatactcactgtggctgtttttgttctgctatcccatcaacttctattttgagaactgtgagaccatccctgtctctgcagttgttgaagaaaatttaggcccaggaaccactgcataaggcggtccaaacattgggggctcatgcacacatacacacacacacacacacgtacatgcatacacaaacatgcacacacacactcacacatgcacacacatgtactcacaccatgcacacacgcacacacgcacacacatacatgcatacacacatgcatacatgcactcacacacatgcacacacgtactcacaccatgcacacacatgcactcacacacatgcacacatgcactcatgcacacacatgcatgcacaccatgcacacacatgcactcacacacatgcacacacatgcactcataccacgcacacatatgcactcacacaccacaaatattctgccctgtggaaggggcagtgttggcaatgaatattccttcaataggcaccgtcctcagcaactataaggccaacttacaacatctgagaacaaccaaggttggccttcaactttcaagctgagtgcccttccccacctccaggtgagctagcccatcttgtctgtgttgccagcaaaagtacaatatttgtatagaacagtaattacttgcctcttactgctgttttaaaaaaatgccctaaacttagtggcttaaaacacatgaatttgagccaggcacagtggctcacacctgtaatcccaacactttgggaggctgaggcgggaggatcacttgagaacaggagtttgagaccagcctgagcaacataacaataccccgtctctacaaaaataaataaataaattagctgtagtcccagctagttgggaggctgaggcaggacgatcacttgagcaagggagatcaaggttgcagtgagccatgattgtgccactgcattcagcctgggtgacagaacaagaccctgtctcaaaattacttttgcaccaaccaaaaaatatatatatacatatatatacacacacacatatacacatatatatacacatatatacatatatacacatatatgcacatatatatacacatatatacatatatacacatatatacatatatacacatatatacacatatatatacacatctatacacatatatatatacacatatatatatatacatatatatgcttcctcaccttttcaagctccttgaggttgtccaaatttcttggctcatggccccttcctccatcttcaaagccaatagcatagcatcttccagcctctctctctacttccaacatcacaccacctaactctaactccaacaccaccacactccaactctaaccctcctgcctccatcttataagtacccttgtccttataagcacagtggctcacgcctgtaattacagcactttgagaggctgaggtgggaggattgcttaagaccaagagtttgagaccagcctggggaacctagtgagactcccatctctacaaaaaaaaaaaaaaaaaaaaaaaaagctaggcgtggtggcacaaacctgtagtcccagctactcaggagactgaggctggaggatcccttgagcccaggaattggagactgcagtgagctataatggcaccactgccccccagcttgggtgacagagcgagacactatttctgaaaaaacatgggttagaatcatgggttggaaggctacctgttgggttctatgctcactacctaggtgatgggatcattcatacaccaagcctcagcgacatgcaatttacccatgtaaaaccccacacatgtacctccttgaacctaaagtaaaagtggagaaaaatgtattaattaattcaattaaaaattaaaattaagaggaaaaagacccctgtgataacatcaggccaaaccaggtaatgcagaataatcctcccatctctagagacttaaccacgtgtgcttcagagggagcacagctgtgccaaaacctggactttgaactgttggcctccagaactgggagagaataaacttctgttgttttaagccacctagttgtggtcacttgttatggcagcctttggaaaccaacacacccgcacatggcgtgtttaacgcaggctgatacaaccttaagaaaggaatggatgtggtcatcagcaatctccaatacctacagcaaatgggaagacagggaaggaccagaggtgtaggtaaagcaaaaagccacaggtcattaggaagtgatgctccaactgggcatggaaaaggagtttggagttaggaacacgacagatctgtctggacaaggatccagatctctcctagggggaaggaggggcaactaggacagtttttgtgtctgtggggggtcttgtgtgccactccaaactctcaggtgtgttcttgggatgtatttgtgcaatgacaaaagacggaaaagatgccagcccacgagcaggagggcagttgggagaggcagggtagggggcccagtacaggcaggaaaagaagccttgggtgggcttacaggtgccactcacacttggggtcttccttccttccccagcctgcaccactcttcacgaccccaggccaccttctggataagttcatcaaggagtttctccagcccaacaaatgcttcctagagcagattgacagtgctgttaacatcatccgtacattccttaaagaaaactgcttccgacaatcaacagccaagatccagattgtccgggtgagcactggcctttctcatgtcttgttggaatgatgtaatattgggcattcctggaagggaggtaagtgggcattgtagctctccaggatccatctaccttcagaaacttgaggaagggaagccaggagttaagggaactaggacactagttttcaggggggttgtggatagactgcctaggtcattaacaacacaactttgattctgtattgtttttcttggagctgttggccgtccttggggctcttgggcctggagacacatcactcccgtctctgcctctgtcatcaccttttcttctgtgtcctcccccttctcttcttttctaagaacacttgtcataggatttagggcccagcctgatccagaatgatctcatctccaggtccttaactcagttacatctgcgaagaccctttttccaaataagggcacatccacaggcccccagagcatgtatttttaggggtccaccattgaacccactgcagattctaaggagcttagaatctccttctcctttgagtgactggagcccggcttgccccatcagctgagctagagatttagaggcttttgtcattcttgtccgtggctcaaaggccacggggctgacatgtttctctctgtttactggtcacacgaccagataaacgtgtccccgtggtcacaagaagggaaggaggaaaatgttattatgtacgcgtaaatttctgcgttgatgccagaacaaatctgtgcaactagagaagaggggcctgggaaatggcaccaatagccccagggcaatgagtgaactgtctcattgaaggtcactggagtgaaaacaggactgagtttctgatcagtgttagaattgtcaaagcatgtgctttctcctctccttcctgaaaccccattcacatgatagtcagtgaaaaataaaaggtatatgacacatcaaagaagaaaagagagccatcggcagataagacattgctttccatcttcctgaagttggttgaaggtttctctgcttaggccagaggaaggtgacacctagagattgtaaggaaggggctacagtctgagaggagccgccgaagcccacctcttaaagacaaaggtggcctgcatgaatgaagggggctggaacagggatgaattgaggatctgcatacaggaaatagaacataccctttcctcacctccttaacccatgtaatcaggcatttaatacccatggataaaataaaacatttttctctacagaaactaaatggaggagaaagaggaggaagaggaggagggagggaagggagaagccttaatggcagagacataaatagcccacaaagcctaaaatacctactatctggcccttttgcagaaagtttaccaaccctgtacctcaattatggatattcacccaatgatcgccagacctgcaggagaaaacacacatcaaagaacagatgagcaccttcaccataattattgcattccgctcgatttatttggttacaggaatccaaataaagctaaatatgtctttaggaaaatctttaggaaattgacctgagaagcaggtaacttgtaactagcccatcagttgttcatgtataaaaggcaggagaataattgccttgggaactgtattgtttaataactgcattatctattagtttgtaaaagaaaaccctttgctttggactcagccctcactgaaccctaacgcagaacttggccttggaaacagtgtcagttagcccaactggtgccagcccacgggggcacgggactcctcggttaaggaaattctggatctcaaccttcctttcttccttagggaggatcaaccgccaaaggcacagctctgaagactggctctgatgccgatctcgtcgtgttccataactcacttaaaagctacacctcccaaaaaaacgagcggcacaaaatcgtcaaggaaatccatgaacagctgaaagccttttggagggagaaggaggaggagcttgaagtcagctttgagcctcccaagtggaaggctcccagggtgctgagcttctctctgaaatccaaagtcctcaacgaaagtgtcagctttgatgtgcttcctgcctttaatgcactgggtaaggctccccagaccttagcttggaagtgatggtggacagaaggtggagggagagccacgtgacttgattacgggctctgaaaacatgtgccactcatgggtccctggccccagcaagtggcattagtcatggcagtaatacttcacacttgtagacaattttggtcccatttctcttttccaagcatggggctgtgtgcctataatcccagtaatcagggagactgaggcaggagaattgcttgaacccgggaggtggaggttgcagtgcgagatcgtgccactgcactccagcctgggtaacagagtgagactccgtctgaaaacaaacaaacaaacacacaaacaaaacaagcagttgggctgggcatagaggctcacacctgtaatcccagtatcttgggaggccgaggcgggaagattgcttgatccaggagttcgagaccagcctgggcaacatagtgagacttcatcccaaaaataaataaataaataaataaataaataataaacaaagttagccaggcatggtggcacacgcctgtagtcccagatacccaggaggctgaggtgggaggattgcttgagcccaggagatggaggctgcagtgagctgtgatcatgccactgcactccagtctggggcaacagagcaaaactctgtctcaaaaaagcaaaaaacaacaacaacaacaaaaaaaaaaaaaaaaaaaaaaaaaaaaaaaaacaagaagcagcgcaccagatttagcccagggggcggtagttcacaaagtccagatcagtgtcgtcccagagatctttctgtgatcatgaaaatgttctatgtctgggttctacaactactgagagcttgacatgtggctacagcaactgaggaactaaatttttaattttcattccctttaatgaatgtgagtgcaaatggccacattgctggtggctgctctgttagtttaagtctagataatactttaataataccagctgcacctgtgtagaccacataatttttacatatctcattattctggagatgctccctgtgtcttagacatcagtcttttaaatatgctaatactattcacagtaatttccaagaattaaatcatatttgtcaaaaatgttttggaatctgttacttactatgtgtattaaagcaggatgtcaatctctccctcatgccaggtcagctgagttctggctccacacccagccccgaggtttatgcagggctcattgatctgtataaatcctcggacctcccgggaggagagttttctacctgtttcacagtcctgcagcgaaacttcattcgctcccggcccaccaaactaaaggatttaattcgcctggtgaagcactggtacaaagaggtaaggacagtctttgttctgaccatggggttattatttttaccagtaagccatgaacattaagccctgttgcccacaatctcccatgctgagggctgagccactttggagaatctgcccactggatatctttacgacgttcccatcactaaccctattcatttgggtcaggcgttgatggcttctgcccatcaaagctgctacatgtggtttactttgccctcacactggccaaagaattctgcaggaatccaagtgaccttgcctacagagggtgggtggaagctgggattcacatgcccacacattgccaataggacttttctgcttcccggcgcacatgctctctctcagaaggcaggttgaagctgtaggtggaaccggggctgcattttctatacacccagctcacaggagcttgaacaactggtcagcccctgagcccctactacaagtgatcctcaggcaggtaaccccagattcatgcactgtagggtgctgagcagcatccctagtctctacccagtttcccctcacttgcacacaaagtagcttctgaacatcctcatgacagtaaacatcaagcacgatatcagctcttcctgagatgcctcctttctgtgtccagctccctgaaatgtgaaaccaagaccaaactctgtagttttcatcccagaaaatcagagagctggcatggcgtgtcagaagacttggggctgtggcgtgaccttgagtgagtcactccacttcccgcagcttcaaagtcttcatctaaaatgcaggtcatgctgcctgcattgtggggaagattaggaatgatgtgggtaaatgcctgggcccatagctggcatgcagtgggtttctagtaaactgtagctatgttattgtcctaggaaggcatatatggtcaaaagcacaacaaagaaactcaaatgtgctgctgccaggtggactcctgtaggctgtacaatttagacatccaagctgcagagtgtgagcacaccagcacgacactgtgactcagttgccttgctgtggtccctgtgcggctctcactgagctcctaggctaaccagttcgtctgatgttcccactcttacctagtgtgaaaggaaactgaagccaaaggggtctttgcccccaaagtatgccttggagctgctcaccatctatgcctgggagcaggggagtggagtgccggattttgacactgcagaaggtttccggacagtcctggagctggtcacacaatatcagcagctctgcatcttctggaaggtcaattacaactttgaagatgagaccgtgaggaagtttctactgagccagttgcagaaaaccaggtgccttcaccctagccccgtacttttcttaacctgattcccttgaacactgtctcagcaacctggattttcctctgctggggtcacgattcattccttgcatgacgggggaaagtgctagccaacagaacctgtcacagtctccagggataaaacctagcaggggcaggagaaaatgctgttcagaaaaaatagagaaggaaggttcaagataccacgtccctgagctgctttcatctaagaggtgttagagttggaagtgtgtccctaagaattaacgctatcattcacgggccgatttatcctgcagggtttttattgggttagggtttatctactctttcagaccttcaagaatagtaagaaatcatatccatctgcttagggccaccagcaagggacaaaaacaatggaaaccagaggaaaggaaagagagaaaataaaggagcgttgaaaaagaatagaggagaagtaagagagaaggagacccccggtgggttgcctaccctgggttcttggcaacattgtatttgattaaattatgtatcatattttagctgacatagcaaggaggagatatttagactatgccttcattatgccttcatgagtatagcaattaacagctttcaaaacgcttttggcaaatacaatttaattctaggaagttgctttggttttggcttttgtttttgtttttgagacagagcctcactctgtcacccaggctggagtgcagtggcacaatctcagctcactgcaacctctgcctcccgggttcaagctggttctcctgcctcagcctccgaagtagctgggactacaggtgcgcaccaccacgcccagctaatttttgtatttttagtagagatggggtttctgcatgttggccaggatgttctcgaactcctggccctcaagtgatcctcccacttcagcctcccaaagtgctgggattacaggcatgagccactgcacgcggcctctagaaagttactttgaaccctactagtaaatttgagttgctgacatctaagctgtaagaacacattgtcttattgctgaaagtattataggatggaccccaaattctgaagtcactgggatttggaatctcctaatgccttctaacctctcattcaggcctgtgatcttggacccagccgaacccacaggtgacgtgggtggaggggaccgttggtgttggcatcttctggcaaaagaagcaaaggaatggttatcctctccctgcttcaaggatgggactggaaacccaataccaccttggaaagtgccggtaaaagtcatctaaaggaggcgttgtctggaaatagccctgtaacaggcttgaatcaaagaacttctcctactgtagcaacctgaaattaactcagacacaaataaaggaaacccagctcacaggagcttaaacagctggtcagccccctaagcccccactacaagtgatcctcaggcaggtaaccccagattcatgcactgtagggtgctgcgcagcatccctagtctctacccagtagatgccactagccctcctctcccagtgacaaccaaaagtcttcagacattgtcaaacgttcccctgggttcacagatctttctgcctttggcttttggctccaccctctttagctgttaatttgagtacttatggccctgaaagcggccacggtgcctccagatggcaggtttgcaatccaagcaggaagaaggaaaagatacccaaaggtcaagaacacagtgattttattagaagtttcatccgcaaattttcttccatttcattgctcagaaatgtcatgtggctacctgtaacttgaaggtggctacaaagatgactgtggacgtgggttgcactggccacccaaggatgtctgccacacctctccaaagccctccctacctaccaagatatacctgatatattccaccaggatatcctccctccagatatacttggttctctccaccaggttctttctttaaagcaggatttctcaactttgatacttactcacatttggggctagacagttctttgtttggaggctctcttgtgcattgtaggatgttgagcagcatctctggcctgtacccagtagatgccacccagttgtgacaattaaaagtgtcttgagactttatcatgtgtcttctgccctaggtgagaacccttgcactagaggaaccctacaccccaaccctggggggaatgtagggaagaggtggccaagccaaccgtggggttagctctaattattaagatatgcattataaataaataccaaaaaattgtctctggcaatagttaccttcccagatacaggtccccccttttttcccctaactcttttaagcaatgattgtaactattaggagacattgctctcccacgtatgtttttctttttagacaatgcagacaccaggaagttgtggagctaggatccatcctattgtcaatgagatgttctcatccagaagccatagaatcctgaataataattctaaaagaaacttctagagatcatctggcaatcgcttttaaagactcggctcaccgtgagaaagagtcactcacatccattcttcccttgatggtccctattcctccttcccttgcttcttggacttcttgaaatcaatcaagactgcaaaccctttcataaagtcttgccttgctgaactccctctctgcaggcagcctgcctttaaaaatagttgctgtcatccactttatgtgcatcttatttctgtcaacttgtattttttttcttgtatttttccaattagctcctcctttttccttccagtctaaaaaaggaatcctctgtgtcttcaaagcaaagctctttactttccccttggttctcataactctgtgatcttgctctcggtgcttccaactcatccacgtcctgtctgtttcctctgtatacaaaaccctttctgcccctgctgacacagacatcctctatgccagcagccagccaaccctttcattagaacttcaagctctccaaaggctcagattataactgttgtcatatttatatgaggctgttgtcttttccttctgagcctgcctttctcccccccacccaggagtatcctcttgccaaatcaaaagactttttccttgggctttagccttaaagatacttgaaggtctaggtgctttaacctcacataccctcacttaaacttttatcactgttgcatataccagttgtgatacaataaagaatgtatctggattttgtgcctagttcctagcacacagcttcaaaaattctagagtttcctgataggagtgtcttttgtattcataacaagcccttttcacccatgcctgggtttatgctaacaaggttacccatggtgggcccttagtttcaaggaaggagttggccaagccagaaagaccaagcatgtggttaaagcattggaattttcagccccatcccacccccaatctccaaggaggtgatggggctggaaattgagttcaattttaacatggccagtgatttaagcaatgctgcctatgtaaagaaaccccaataaaaactctggacagtgaggcttggggagcttcctgattggcagacattccaatgtactaggaaggtagcgcatcttgattccacagggacaaaggctcctgagctctgggcccttccagtgcttgccaccctacatactctttgtctggctcttcatttgtattctttataataaaatggtgattgtaagtagagca

SEQ ID NO: 457 - DNA, 32434 bp, Homo sapiens
gaaagcgaagcgttgcggggaaacgaaagccggaggcccaggcggggcaggagccctggggctggggcgcccttccggcctctcctcctcgccgcgagatgtgcgcgataaacggccggcgctcgggagcagacgcttggccccggggccccaggtgcgcggctccgcgggcctgcgcggtccccaggcgccggctcccggggctgacaccgaatgaggccccgcgccgtcggccccaaggtagctccgtgtgcgttctgcgggtggctggcggccccgaccctggtttgagttcctcctctgcggcttatgccgggtgcatggaggggggcgggggtgcacgcgcgagggacagagaagtcccttcccggtgtaacgggctcttcaacgcccacttgcaggcgcactactgcccttggatgactgaccaggccctgcagaccatgggctccctccccgacctcaactcctagctctgaccacgcgtccccgcccctctaatcctgcagagctgctttcctgcgggaacagggcgcagttctggctcttccctctcctgtatcttatctcacctgtgcactcactcacctgtgcacacactcacctttgcacacactcacctgtgcacaagcttttccctcttcttggaattgccctctcccttttgctgactctccaactgggaagtgtcgcccagattggcacctcgaaatcgcctttcttccaccaaattgaagtttcctgcactaaggtgaagtgtgtcaggatagcaccctctgcctgccacagtccagcatcagcactgttgctgcctaacagtgtaactgcctaacagtgtaacagtgtttgcgcagttatttggatattttattctgtgtttactcattaactgatgccttttaaaaatgatgtcaagcaaaccaaaaacaaacaaaaagataatattctccagggaaactctctcaaaaaaatagaattgagacgaagattgaaaacattagatgagctgaaagcagttttttttttatgtcttaatagtattggacttaaacttgggattatatttaattctgaaaaaaaaagtcttaacaaacgtgaaatatagataggtggttggagtgtgggttaataggctaagaagaaagaagaattaggagtttaaaattttttagctctttgagaatagaatagtttttattctttctcaggaatttcacttttggacatttagcatgtaccggtggtttcacgtgtatgtagtatatggaagtaagagtcttctagttactcccttttcttctctaagacagtactgcatcctcaagcctgcttgaccttttccctatgccatccacctctctggatgtattagtctatcctggctgccataacaaaataccacggactgggccgcctaaacaatagaaaatttgttttctcaaagttcaggtggccagagaagctggagatcaagttgccagcagggtttgctttttctgaggcctctctttctagcgtgcagaccgcctccttctctctgtgttctcacgggacctttcctttgtgcttgcatccttggcgtctccttgaagttccaaatttcctcttctgggaaggacaccagtcagattgggttagggcccatcataatgttctcattttaatgtaatcacctattgaaagccttattttgaaatacagtcatactgtgaggcactgggggctaggcctgagcatgaattttgggggacatgatatagcctataaccccccacatatctgggttagtagcctctcctgtgtcccccaccaaggctatttgtatcctcggaccttgacactccacagtcacgtgccagtctatttcccaccactgagcaccttgagggtaagtaggaagaccagcttcttcctaacttttctctgagcctccaactgaaagaaaacctgacacacagtttgctaaatgaagcatcttaccttttttaatttaagttttcctctctatttttcacctaccttcgccctacgaagagatgtaaagttaataacactgcagtatttgggcttagtcaatattatataagtgttgaagatgttgaagatatatcttcattcataaataaaaatttctgttagattttcaagccccttcaaatttgtaggacagagactctgagagccacagctggatgtttatattgactaaacatgcctgtagccacccatcgttgcaggtggaaaggagagaagctgcaggctgggaagatacttcaaagaggtgtctttaaatgaatgaacagcacagctatatcataggaaaagccataatcttcaacacttacagtattaaacaagagaaaatgaaacttttctagccattctgctcctaagaaaaaaagaaacagaatgggagaattaaaaatataaatagcaattaataaataataaaatgaaaaaataacactttgaaaaagagcttagtttttgaaaacatgtttaaacagatatgtttctaggtagtttaattcaattggaaaaagaaagaaaatgcaaatcagaataggaataaatgagatgatagaaccacaagttcaaaaggatacccaaaagagaatattacaaacaattccacattcataaaagtgaatattataaaataaatgatgagctcagaaaataagaattaataaaatgagcccaggatagaatgttgagtctataactctgtaacccaaatcctaggctagaagttaatgaaagggctaaaaagcactgagcaagtttcagagatcacttagttatcaaggaacagataagctctctcccgcataaccttctgtttcttttttaaataaaaattcattctagcaatttgtgggcttacaatttgaagagtattctcctctctcttggagttggttttctcacaaagaaatgctgttgatacagctacctttgagggaagagttgccataacaggtccagctgctcaccccttgcatatctccacaggagcctcaaaccatgattgctgttgggccaaactttggaaagatgaccctccagaggctctttatattcatggttggtgattctgttatgtacacctggagcaatactccatgacatgccagcttgcgatcattttgcacaaacgtcaagattaacgatgtgcacctcattcattgtcggggtcctgagatttggttactatagctgggcacatggcaggatgtgcctgcatatctagcccttcatataatggcagaccctgagactcaaacaggcttttcctggccagtggtttcaaacacgtcctggtagttcactgctggagggagcacaccctgtgcaactcaggtggtgaaggactcaaaagcttatggctaccctctccagactgcttgacttacacctttttcctattgttcttgctctacagccttttagaggaataaagcccagttgggagtctaacatgctcctgagtcttatgagtcctgtttgtgaattatcaagcataaaggtggtcttgagacatccacacatgcacacacacacatacacactcatgaaaagaaaaaaaaaatttccaagattagagcccactcttatttcagagcatgttgatattccattttatgcatgtaaatacacagacacgtaaacccaaatacaattttgggcccatgaaggagtgaaagggaaagccaaagaggttaaagaagatgtctgcaaccaacatttgtgtacaatcactaacaaagtgtacaatatacaatgaatttctacaaattaatgataaaatgcaggaaacctaataggcaaaggattggaacatgcatatcacacacaaaaaatattcaaatggctaacagaggaaaagatacttaatatcattggtcataagggaactggaaattacaactacaatgataggaacagcacgcctacaaatctgtgatgtgaacaaatgtggaacagaaatagtccttcaagacggagctcaagtggccaactaggtctgaatttaaaataaaacccagtagccatttgctgactagaggtcacacgagtactgtgacttcctggaaagcccaccctttctaactttggggcttgaagagctctcctgggtcaaccaatcaaaacacaatgggattgattcatcagagctcagttgtataaaacaatcaggatgcagccatgtcacccaatcagaactaagtgagtttcaatccttcatttgcataaatatacctgattgggaccctaggtgggatttttgctgtaaaaccctagacttccttttgttctctggaaaatacctttgtttcacactgaaggctggtgcaaattattcactggaataaaatctctttcttccagattccttttcggagaacttttgttcacatttatagtgtcagaagcggaataagaaaagaatcctgatttttctcccagcacagtccttaacaaactcatttgtgcctccaagaagtccttgagctcagttgtcttaaataatttcaaggaacagtactcactgttattttagagtattttgatatttcatttcatgcatgtaaatacacagacacacaaacaggattacaactttgggaccatgaggtgggggtaatgagggtcgagaggtcctctggtaagtcttcccgaattcataccttccatgctttggatgaggtctcagagactattttttcccccataggtctcatctattggaacctcaaagagaaacttcttttagccatgggcttgggtaagggagcattctcagccagtccccccatctagactgcaaaggggaaatttcctcttgaccccaagtttaggaggaagcctttccagccagttctctccatccagacgctggagaggactttccctgttggcccagggtttagcaagggcttctcagtcagtctatgccagtctataaggttttgtggggatgctcacagtaagggcactgaaaggagcaagtttgtcaggtcactgcaatgagtaggccatgctttcagttcttcctatctggtcagctgccttctggcactccagctggatttacgagccaaaattatggtttgaggtgttgtaattggctaagtctctggacaaaaattacccaaaataatctgaaactttactggccaaagtgggactcctttaaaattccaaaacttgccagtctacacacacaactggaaaaaagaaaataccaaacctcccagagacaatgggaagcctttttcagttggtactttgaaagtcctcaatggaatcaaggcagtcatcatctctcttcgggaaaataactacaaagtgagtgagcacattagtgaaatagaaagattagcgcttgcaggaccaacaccaaagctgtagaaacaacattgaaaccattcttccactagctgccttgcctgttgctctacctgtcttctgcacctttcttcaccagctttatccttcattccctccttcctctttcaggttttcacctagttattttaagaaaaggttctaaactatttctctagactcatctgtgtgttttcttgtcctgtgatgaattcctgtgatttatgttactttggcattaattttaatcctcctctagcacacgcagactccttgttgagaaagcttaaattctttctgtatttgagatgtaaatttgccaccctcttttctctaaaatttggtaagggattttgctatgtgggacagatacatttcaacttactttatttacagaaacgctggttgaatctaactgtcttctaaacaagggggttttacccgactcatggctcaagttttaaaataaaagctaaaagatcattacttgtgcctacctgtatttttttgtgtgtgtgcatatacatgtctgttagtatattgtctaccagattggcttctaaaaatgagtactcataaattaagcaaataagtcaaaatgcttttcaagttcatatcacttagtaatttttaggtggataagactagtctaatattgtttgtttgatgagaatggctatgtctttgagttatcagaaaaatatgcatatatttaacattaaggtttttaattttattatacttgcctgccattcagtaatataaagttggttgatagaaaacagcttgagattatgctagatttgcctgaagtatcatgaaattttccaggcataattattaaaaatgaatagatggggtggatgcagatgggataaaaatttttaaattaactttcggtaatggttatgttttgtaatatgtttacttaggagggcttctccaaatctttttagtaactatagctatagaatttttctgagctaaattaaatggttaatattcattgcatgtctagatcatttagaaataagataatactaagacactattgctaaatatgagtttaggcttacatacttttggcttcttaattcagaagaacaagagttctttggatctgttagtaaaaatgaactttttcatattaaaaagatgttctgttagaaagcttgtgtctgttgaaattgtaaaacgtgtattcttggattgtcggtatggcagattttcactgaaaattagagttgctaagaaatagtatggtgattaaagtgtgtgattaagctatttagggcagagggcattctgtttgcaagtgtatgaggagggtagaatgtgttttttgataaggaaggttgaaaagaaaagagaaatgagaaagaaccttgtgtgacacatttttgtcttacagtaaaatgactggttatttaagaaagaggaagtatggaacagagaagaaagtctaagcatgtcatcaaaggtctaagtaaatcataagctgcatgaaaagaaagttgataaaagcaattttctgtgcactcaggttggctacaattgaaaagaaatcgtatatgagtctttctcaggattaaactttgatgttaaaaatacactgatacagaactttaaaatttgatctccagtattaaaacaagattttcttaaaatactgatttgctcttagtaaaattgcaagaggttttaatttttaatttgcaaatctgttcccttaatagtaatcctctaaactacaaacagtttctgtttctggcatatttcctcctgagatctatataattttcctgttttcaggttgtaaatgcagctctctttctcttggtccttgaaaaggtaaattctttttgcgtggccacaatgataaccatctccttcaacctttttgtcatctcctgtaactttttctcttgttctgacactgctgtcatggcctgatgctaagatgtttattttgaagatctagaaaaccaaagttttccttcattgtaacttgattttacactcttggcttttcttgatgtgtctgaattgttccatgtaaccaggaagcttcctatgctattcctaagaaccaaggatttccatgttcaacgtactagttttcttgtttacatttctctataatagcatatgcttagaattctggatacattctttctgtgcctgattaaattcaaatacccttcacaccaggtttaactttcaggttatgcaaatgggctttccataaggagaggcaatcatactaaaggaggtttgtttcccctttacctattaggtaactggcctagtaaactaagagtctgtgttttgctgagatcattcctttgcttcatgttgtttttattaggcttttgattacttggggaaactgaactttaaaaagttcagggttttcacatccatgtaaatctgtattcttttcgaagtcttctgattatcactttgcttatttaggagtgacatatgattctgcttaatcaagtattttgaaccttttgacatctttggcaggtttcctcaatatcaaaaccctaaattaagcctttttgatcttgaagagatactaaatgattaggcttatttggcaaatcatatgggaagcatatcaaataagaaatgatgcttaactccctttaagttatatttatataaatatgttactaatatgtgttccaaattgcatgagatcttaaaattccaagatgttatatgatatggtttagatttgtgtccccaaccaaatctcatgttgaaattgtaaacctcaatgttggaggtgcaacctggtgggaagtgattggatcacgggagcaggtcctcatgaatggcttagtactgtcaacttggtactgtccccaggatagtgagttcttgtgagatctgatcgtttaaaagtgtgtagcgcctcctcctgccccagcatctttctctcttgctcctgctctggacatgcgagacatcttctcccccttttccttctgtcatgattttaagtttcctgaggcctccccagaagccaagcagatgccagcatgatgcttcctgtacagcctgcataagaatgagccaattcaacctattttccttataaatgacccaatcttgggtatttctttacagcaatgcaagaattgactaatatatcataatatgtgttatcagtcttgagtatgattatttagtttaatgattgtatgccacaaaaatacctaaattttcttttaaattttcttgcaattatttctacattatttcttacaatttccttgtaaactctcatcagagttttgatcatagctgttctggatttttctcatccacgattattgttttaaattcttctctagaagcatttgcaatcagctatagcccaaaattactaattaaggaaagcaaaattaattaaccgaaagtaagtagttgataaggataactttatgacttttatttaaaatgttggttctacacttaaattttttttcagattcaaggaatttttctttcattagttatagtttgcaataatttggggaagtatacttttatgaacaaaagtggaagcatttgcctttctccctacttgagtcctccaaaattcagacactatttgtgagcattcttattttatttctgtaagttcagtaaaaatctgctctccctttgtaagcaggatactattggaaatactgattatattactaggctttgattgaaaagtcatatttaagaagggtcatcacatgcctggcttcaagagttcccagccttacagtgaatacataaaacttgtcacttcctggtaggcccaagaaccttaagaccctaagtaaaatctaaagcctgccttgatttggcttcctagcctctagaggttctaaaacctgaaagttcctgtatgattaatgtggagagaaaaagtcatgttcttaagaaaaactaacgtgcacctactttaggttaaagccctatgcactgttttcaagttctggttttctacctgtagactggactggatcctgagttctcctaatttcctacaatatctggatacagttaaatcctgataaagtttaccagccctcttccctcaagcaaaactatagagcctcttgggacatttcccctactcgaattattcaactaggggaattaggtattaagattggagaaaactcatcagagctctggtcaacactggggctactctgtccatccttaaccccagcatgctttccatggaccctccctggagttctgaattcatccagatggttggggtagccaaccaacctatgatggttcctaatcttcacctattcttttccaactagtacccctcacgggcagttgtttttcctttgggcttccatacacttcctaggcagggacttcttagaaacattccaggcccatattttattctcccagaaaggagaaataatgcttgagttatcctcaccaggagatttggccatggaaataccttttacccaaattcccatctattcagttatccccaacactacctgccctgttctctaacagctataatccaacactcatgataatccctcagattatgaagataatagttgtggatactctcaaggatataattcatctagaagggttaaccctagaaggagctagattaggaaggtttttccggtcccaatttaaactagattctgcttggaattcataaatgatcagaaacccttcctgaactgttcgcaggattgcctgctctaccacccaggccatcagggtgcaacagaggtccatagactcccttgctcgtgtggtcctagacaaacacattgctttagactatctcctccctgcacagagtgatgtttgtgctgttgctgccactttccacagggtaaatacttccaggcaggttgaatttgaaacatctaagatcttaaggctagccaaatctctgaaaaacagcttcaaaaagcctcctggctggaccttctaggttaagtttctgatctccagatatttccagccggcttcccctgcagtagggttccttctgcatgccaccctacaagtcttgatcctccttatgtttgggctaagcatttggagcctctttaagattttcctagcctattttaacagatgcctgcaagagacccccactaggatcgtgctgacctaacctttgagacttcaaaggttgctccagccagaaaggggaaccaagttaacccaaaagaatttgattcaaatttaacaggtgcctgtatgcctctcatgatcacatgtttatgaagaagtgagatctatccaaaagtggttttcaattgtgcaagaccatggcatgagagtttaagaaactttgggctgagatttcaaggacctgagacatatctactgttgaatatttggtaatcattaagcatacaattttgcagatgttaaatgttaagttaaacatgtttaattttttttaagtaaaataaatcatttctgtttctattcagaatatgacagtatcagaataacaggagctaaccctaactgaacacttaaagtttgccaggcactattctgaattcttcacaaaaattagcagttttactctgcacaaaaatcgcctgagatacgttgctttgctgatgaagaaatggaaatccagagaaataaagtcgcttactcagtcacccagctacatgatttgtggctctggaagttcagctactaggactcttccaacttcctacaggtgtcacgaaagcacaagaccacacacttacacacagttctgatgaaagagggctaaaaggaagatttcagtaaaaaggtcaacaaggctttctaaaaaaactgtaaaggtaaataaatgatgtgtcgcagtaattctcaccaattaggaagcatcttagaaaagcattggatttcctctagttaaaaacatctataaaaagtgatatcaaaatataggaagatgtaaatatctaaattttaacactgtcaccttgcataaattaggctgaatagctgatggaataagacctaaattcaattttgttccatgcctttttactgtgatctgaaaggggtcttgaggtgaatgatcctgtactcatcctccaccagccaatcagtctgtttattatttggctttaaaaagaaaccccttcaccatgatggagcaaaaactgttacttggctatgtcaagagaaagcaatgcaacaagtacaaagcgtgctgattaatgcaccttgtctatctctatcagacagagagctagatattgatagagactgctatcctcatgtgtaactacatcaagctagagagactgttataatacaagtggactgaggcagccgtgagcagagaaaccaggaatgctcgccccgatctctagtcttcagtcttggccctgtttcaactttcagtttcacatgtggaaaaatcgaaactctaactcagctgagtgttagtcaaagaaggtgtgtcctgctccccaatgacaggttgctcagagactgctgatttccatccctatataaagagagtccctggcatacagagactgctctgctccaggcatctgccacaatgtgggtgcttacacctgctgcttttgctgggaagctcttgagtgtgttcaggcaacctctgagctctctgtggaggagcctggtcccgctgttctgctggctgagggcaaccttctggctgctagctaccaagaggagaaagcagcagctggtcctgagagggccagatgagaccaaagaggaggaagaggaccctcctctgcccaccaccccaaccagcgtcaactatcacttcactcgccagtgcaactacaaatgcggcttctgtttccacacagccaaaacatcctttgtgctgccccttgaggaagcaaagagaggattgcttttgcttaaggaagctggtgagtacatggtcctagacagaaatcaggattctcaaccactgggcagtggggtaaggcgagaaggggctgggggtatgcacaagctggagagcttctccaaagcttgaggtcaccatttacccttgcatggtgagcatgttgtcctatgagaaaataattcagtgaattttggagtgggcacctagtccttcctaaatcacagaattgggctggaacaggggatttgtggagcaaacctgtccctcctgccatttggaagcaagaaggggtctatgcaaagggcaggtccctattacacttggtgtttggaaagaggcggtttgggaagtttgtactactttctgagtttgcccacaacactaacgaatttgggttttccagaaacagttattaataattagaaaagttggaaacaaaaacaaaaactttgacataaaaatagcagtagttgaatcttatatttgagtttgtgtatattcttttaataggaaaccttaaaatttttttaacaaatatgtcaaggacttagccttcaagaatgcttactgagcatcaccacattagtaactggcagcgtcttggagagaactcagcacgtgaccttcgaatgcaatatcttccactccagatctgttctgccttccgtccttgtcttcctgtctttcctagagtaccttctcaactagtaacttcagcaacatctctagcttctttccctccttgtttaactttttaacaaaagcatagcatacatgcaccagattacacatattctggatgtgcaccctgatgaatttcacaaagcaatcacagccaggtaaatagcctgcagattcagagagaaagcatcaccagcgccagaagtgcatgctgcactccagccactaccctggtaagcacttgctggacttctaacacacagattcattttgcctgatcctgtactttatataaatgaaatcatacagtgggtcctatattggatctgacttctttgctccacgttacattggcttagttacccaaagctgattgctcaaatgagaacctgacttcccattcccagtgtggcttaactcaaattcctatcatttctcaccaggattactgtaattcaactcactgtctctgcttgccccattgaaaactcctgatctttttttaaaatgtacttttggtgatttaactcctaactctccttcttatgagcatcgttgtcaaggcccctggcaagctcaatgttgctctcagcctctgctaccctgatggcttgggtcccctctgctgtagacacagcctgtcacactcattttctccaaacatcaaaattgttaaaatgatggtcatattgttgtctcttcctagaatgtctgtcctcaaatcttgttggtgaactttcaaagttcctttgaattctccttgatcctctgcagccataattatgccctttacttttcacttatgagcttatagcagttggtacaaatatgtcttgcagctttttaaaatgtactattttgttcagtttttttttttaatgtctggttcctcaaagaaattgcattccaaggttgaattttaccctcctgtgtgtcttcatgcctgacaggatgtctagaaagtaatagaggcttaagaaatgttttagataaatgaatgaatgcatgagtgagtgaataaggagatatgtcgagggaaattacgactttcattcagaaagccagggtttgagtttctgctctaacatttactagatttgtcaagacatttagcttttctgagtatcagttccatgatctttaaaattatctttagataataatgataactgataaaccaatctcaaaagttggtacaaggcacaaacaagtgaatgttcatgtatttttgtcataaaagataaattattattaatagttataattaatacttttatataataacctctcagtttaagtaagtaaaacaaaagttaattgaaatgcttacatgatagtgtaggttgtattttcctgtaagagagatttctagataatggaggaaaactatttttttggttgtaagaattaaagaaagaggaaagaaacacaaaaggtggctccacagtcaaggacaggtttattttagagaaaaaaaacctgagaggggcttctggctgagttaagtcagagcccactctcttacagactaagagttttaaggatttggcgtgggagggtttattagagacttggactgcttctgtttctctttgttgtgcttatctgggagggagagttgtgtgtctgttcccgtacatcttcctgcagctgcaggcatacccaccctgaatctgcttttagcttccctatcttagaacactaaagagaaactaatgtgcttatttaggcccactgttttactgggacccattgtatgacagtgaagtttggcagttacctaaaagacttcccctcaacctccctctgtgctcaagctgtcttgtctgtgttttactgtctgctctttctggctgcttgtggttagaagataagtgatttccttgaaatgcatgaggctagaaagggagctggaacttaaagtggtggtgtttgtctgagatgatggtgttcttgatctgtcagtggtaattaaaggtttaaattcacattgaaatttaaattttaatatatatttttatatattatatttaaaattaaaatttactattctggctaaagatgctcctaaaatatattatttactttcctggcttttaaactgttttgaaattctattcagaaagactgaatagaattaaaaataatgagcatcagatctgggctgtaatatgatcactcatgtatgttaacactattgtaaataaattactccttgtctaagatattaattatgcctctaaattctattccttcccttttgttattcttccatcccttctaaatatactcctcaaaattgttagcagttttgtgccactggccaggaccctgtcttactttctccagtttatctgccactatatcacatcaccacacttcttaggtaattatgttttgttttgttttcgggttataatgagtgtcactcaaactgcctcccagcatgatggattataaatagggaggtgatataatgcctcactgtccaatcatagagacatctgagagtgaaagggggcactaaaactcactcacagatactgtttcatctaccataaaccaaaactgttccaggcacaccagcctggaggcttctctacttataaagactctaggctttggagtctaggcatgtaccctagctctacttttctctagccttatgatcttcagcaagtgtttaacctttcttggcttcaattcttccactaaaaaccagataataattccttccccatgggttatttaagggttgaaagctttaaccatattaccttgggtgatgtatggtgaggccagatacagattaatagagacaagaaagaggtttgcacgggttcattctcctagaatgcaggcaggcaggtgtatgacgcacaggcccatccttctagaatgcagactggcaggtgtatgttgcaaaggtccatcttcctagaatgcaggcaggcaagtgtgtaacgcatagatccatccttctagaatgcaggcaggtgggtgtataacgcacaagcccatcctcctagaacgcaggcaggcaggtgtgtaatgcatagaccccatcctcctaaaatgcaggcaggtggttgtgtaatgcatagaccccatcctcctaaaatgcaggcaggtgggtgtgtaacgcatagaccccatcctcctaaaatgcaggcaggcaggtatgtaacacatgcaagagacatgttttcttctctgagaaaacaaaatgaccccagagtaaagaccaaggatattagcaattggaggttttcctatgaataaaccagtttacctctctgtctctctgtagtgaaaccctcttttggaccagcccctcccttcatcacagaaattccattctgctattttgtgccatactgaaatttgaatgaacaaataaaaacatcaaaagaagaggcagacaccaaaacaaatacacagagagtatgtaggaagaagaaaacgtccaaaaaaatctataactagtaattgcagagagataagagaaagaattgcatacatgaaacaagaatagaatgcctggaaaggaatagtcagaatatggaagcatctggggaatgaaaaatggggtttctaaaattaaaatcttaatagaaagacgaaaagttaaagtcttaaccaaaatgagaccaaaaaatcaggatagacgtaggaaggaagatgatgataagaaaatagtggttaaatttagaaactccaatgttccagtaatagaagttccagaaagatgaaaaagtaaaaattgagacaaggggtgaataagcaaatagtaaaagaagatttttctttataacataaagagctatgatttgagattgaggccttccaggtggccagacagtgaatagagagagattcctaggacacccggtcttgaaattccaaaacattaggaagaaaggttctggagagagaaaaagccatgcacttacaaaggagtacaaacgagggtgttatcaggcctctgaacaacagcatttaaaactgagtgaaaatgacttcacctagaatgtgatacctggacaaacaattgatcaccaatgcattttgaggcatacaagtcatcactttaattcctgctttacgtttttttcaggaagcttgtaaagggattctccaaaataagggagtagcccaagagggtgggcgatgcggaatccaggacaaggagtggggatgggaaacgcagagtcaggaggagtgtcattctcaggctggcagctggcccgtggacagtcacgccacatggcaggcatgtggctttatgctttgcaaatcctggtgctgcctcattgtaccctttggtgtctgagcaagtctattcatctgtgtaaccagttccctgcatccctgtttagatcccgaattaaacatatgctattcccattgggtgggattggtgttgggaactagggttaggggaggggaaattaatgagaaagttttatttcttttttttacattgagaaaatactacttttgctattaaaataataatgtatatttgtgaagtggtaaaattcatgtatcaccttgcacaggtatggagaagatcaacttttcaggtggagagccatttcttcaagaccggggagaatacctgggcaagttggtgaggttctgcaaagtagagttgcggctgcccagcgtgagcatcgtgagcaatggaagcctgatccgggagaggtggttccagaattatggtgtgctccatgggatggcattcttcttattgctattgctatttttattgttggttcttatatttccttccctcctgggccttcagccaggcctgctgaggaactggaagggaggaaaaactaatcttgcttactctaattgcttttcaagctgtgcacggcattatggcagttttagttccttagggctctcagtaaacaagtttggcaagttagataatagaccttttactgagatgactatcttgtacattgcaatttagcaaatacaagatctatggccttagtttagacactaggtaggaaaattaacacatttgacagctttgtaataaaatatctctgttgggactggactggatccatgactaattttatcagaacctcgtggtgtgtggattagccaaggtggagggctccaagggattccaccatgtagccaggattaagaactgctgaattctaaggctgctgagattcctcgcagttcagttttctgcaggtgtcatgtccatatagcagttcttaaaacttagcaagagcttggaaaacattagctcttcttatatggactgtcatgttgggaaacaggtataatctgttacagtacaattctctgttcttgtttatatgagctgttggagccttgaagtctttcaaagggaaactgcatttataatctgttgaggatgttgctgagacatctctgataccccatctgtgatggtgcggacatggactgtgggggagggacgctgtggatgtgggttggagggtccatctgataagggttaagcaggtagagaagagtcaaggtgtcagatgcaggtgaattaggaagggcctacaagcgtgtaaaaccaaaatggtagtgaagggaggcactttgtcactcacacagggagtctgaggttcaaaagtgaactttgggaaccatactcagagagagaaaaaagaaactgaggaagcagtgtgatggagaccaactggcggggttttctgggtgggtacccagccaatgcccttcctccaagatcagccgtccaggatgtcctcatggtgtgcagagtagggacagtactgcatgtccaggtcaaatctctcaggcttgtgggagaaagtggtataaattagtgaatttagaagcatataagaaaagacactgtcagcagcatggagacaataggaaagcatgaagactgtggagaacgggaagcatcgcgccatattcctatagtgcatgagtggagcgccaactaggaggtttcattgatttttgtgcagcaagagaatttggatgatcctcaaattattaaacatagatcaaaaatctacaattataaatatttgaaaataattagaaatatttttaggcattgtgaggaacaaatgtttatagatgcctatctggcccataagctgctgattttccacctctggcttaatgggtcagggatgggtctatgtgttgagtggatgaagagagctgttttagggcctcactacctctccaagtttggtaatttgctagaaggacttccaacactcaatagccagctatgctcacgtctagggtttattagaataaaggatacagaacagaaacagcagggtaaagacatatatcaccagagtccagagagtccagacacaggctctgagtccttctccatcccaggcctcataggttgtactttctctctagcagtgaactatagggacatatttggaatgtctttgcacaggaaggtccatttgagtcttagggtctgaggctttatacagggctagtcatttatgcacatgctgctatgtaaccagctattggaactgaaactcaggaccccaacaacgcaaccaaggaaatcatggatcttgttaaacaatcctgagaagtcttgacaagttgattcaacatgccccattgctccaggtttatacacctcaccaatgatatatagaatattgtagctaccatatgtgcagggattggccaagattccaccatggttccaggttttcctggaaagatgtagggactgagcaaacagatctgctccattaaatctctcttcccaagagctttggcaaggaaaagctgaggacaggaggatagttatcatggacacatagcaaaagttggaaaggcggcagaatatagcaattgacttacagatcctcagatgacttggaaatcaactaggtctgtctttagtataactgataaggctgtatgtttttggttttgaacttaatttctggtctgtttggagatcaggtgctcagttacttgccttttcacaatgtgatatgccattaggaatttatttgagatcaatttttagaacgttttgagttgttttaaattatggacagttgccttattctggctccagtttatgctagatattttgagggcgtatgttacatacggataaaataaaattagcccaaaataggagttaaaatgactctttttataatattagaggatagttgcttaaagagtttttggaatttccagcttctataatttgaaagtaattttaagaaaaagagtcgactcttaaaaagtcacaaaactaggaaaactcagacttaatcaactgcaaggagtgactcagccattgagaatatctgtacttaagagataagtggatagcatgaaggagcagaggaaattggagggataataagataggtggagtagaaactagtgtgacagaaaccaaagcaaaggtaattgtgaacacttgctgtgctcccaaaacgacacgctgtcacagctcttcacataccatgttgcaaggaggggtctgtttacactttattcccacaccaggcttccctttctcttggttttcttggcatctaacacagttgtctctgacatcacatagaatgtctctagatatttagatgatgagacaactgtcaagaagatgtccagaagaagcggatgaacttagcaaaaatactagggatcttcaacagagcaattttatctgtgtgatggaaagaaaaagaagtaaatttataattgttcataaataagtctagaggcatccaaatatatctacctgcctcagaaattacataatttgtatgcaggaataaatgaaaaacctcatttaaatatatcagtaagtgctcacacacatacatgtgtagagttttcaaataatcaactaagtatttgcatcattattttacatatatatttagtttttcaggtttgacacaagaagaaagtaaaattcatatctcaatgagttttgtgggtataaggaaaagtgtctttttaaaaatttaaacaagatatattttatcacaagagatctaaatagcccaaggggcttggtccttggatagaaaagtttaaacatgatcattttccctcaggtgagtatttggacattctcgctatctcctgtgacagctttgacgaggaagtcaatgtccttattggccgtggccaaggaaagaagaaccatgtggaaaaccttcaaaagctgaggaggtggtgtagggattatagagtcgctttcaagataaattctgtcattaatcgtttcaacgtggaagaggacatgacggaacagatcaaagcactaaaccctgtccgctggaaagtaagtacacaaggtcgcttttgctgatttccttcaagaaaactttcaggaatgacttttttcaatgaaactgaaaacaatactgatacaagagaactctggacctcgcaagccagtccagaagtcaggtccttggtctttcagctctgttagacttaaaactatacttttctttgtcttagacataaaactagacttttctttgccttacttcccttttctgaaaacatgatatgatttcctttggaaatattgtgaggataaacataaaaaaatatgctcagtgctttgaaatgtttggaagaatatgttcatagaaagcctaaatttatttttaaaactcttggcttatggatggacagataccggttcctcataaattctgatgcagtgaatttctagaagacattagggttaaagtcttccccaagttgtagcaaaatgggacctttattcccagattcatgctttagggctggccccactaccagctactaaaagccaactccacatatgcagctcccactctgtgcagacatcatgactaaaatcccagttttctacctttgactgctcgtcagaagcaaatcaggaggctgtttaaaaagcagcttcttgggcctcatatctgctgccctgaaacagggcctgtggtgaaggtaagcatagcagggagggcttgcacaaacgtgtatttctaacaagcagtccaggtgcaatgaaagataagatgcagagctcagtgctagcacaaacacacaaaaagagatgtgggaaaagtcacatgatagaaagctatgtgtgctaccatatcgtgaaatggcaaaacaggctgagcttaagtggaaggcttcatataggaggaagcatttggctatgctctgaaaaatggaaagaattttcgtaggtggcaaagacctgaagaagaaaggcacatccagactagagggctttgcctgcacaaaaaacagcttttccttcaaagctgccttggctgtttttttaaatcccatgtcagcattccaaatagagttagggaagagggaaagggatattctatcattttcctgaagctgtcctgtaatatgtggaaatgggttaggggaagctggagatgctactttcaaaaattgctaataggtatgttgaacttgaacttttggttacatatataaggatatgaattatcagccacattcccaggtctagaaggaactggagaaaagctaaagagagaggtctgataggaaaaacagggacatgatccaccaggaaggcagaggctccagctggagggctaagctgccttagacatgttgactttcctgcctgcccctctcctgtacccacctctctcgtcttccctatgtttcctgttactgtcttcctcattgttctcttttggtgtccttttttcagatgtgtaaatattttttccccacagcttggttttctcctatctcatggcctttctctcagatattttgactcccacactggcttccattcatctgattcactgtagatttgccatcaagatcctgactcttttggtggaaggctagtttctgcctgtttggaaaaccagattattgatgtatgcaggcttccaattgatgtaaattgatgcttctggaacaggtgcctgttcttagtccaatcttacattgcactcagaacctagtttcctgaggctgcctcctccactgtgaggctgtgggctggaaggtgtcaccagccgtgtccccgggacaacagcaatgagcatgcgtgattactcactgggaggctttgttgtgacctgtaggcttgctccagcagcatgggaggagagggctccttctactcccccatgcccaatcccacaccctcaatattgttccccttccagctcctacggcttgcttttctcctgcagaagcccttccagtctagctggctgattctggagtcaaagtccctggaaaaaaatgcctgtgctgtatgtcttctttgatagtcaagtctgctcatgattcaaacctacatggaagggcactccctccctgccaggcctctccttaccctgagcctggatggggcatgaggatgggtgacaacccctcccaagatgctcacagtctattaaggaagacaccatgaaagcaaatagcaaaattatcctatgaccaggggccagtggaggcagatatcaaaagaccgagaagcaaaaaagaagaggaaaaataaagagtgagcaaaaaaggcaacatgaagtgttgacaatttcttctcatctgactatagtggcatctgagtggttcagacgatgatattagtgaaattctgtgtagaatcatcctttccatggaaaccctttagatctgggtttgtcctgcctctgtgttgggttggctgtcaccctttgtcaccttgggcaagtctcttcacttcttgccttttctaggactgacttttattttcaaatgatggtagtatgtatagaataatacactgtccacactcttacacacacatttgtttacttaaaagactgttgaaagagaatattaatgattttgaaaaactgttcttaggtcttacatgaaaaacagacatatgctagaggccttcataagaatatattaaaaatcagcagagaaaacaatgtttttaaaatgtgtttttctgggttatgggattacacatgatttatttttatgctcttttatagtttatattttttcaataagtacctattattttgttgtctgaaaatttatgactcaatcaaacataatctagacaagtttttgaaagtttatattttaataatgtttgtgcttctgacaccatattcctaaatttcagggctagctttcatttccccaaagtaatatctttctagaatgttcctcagctcgtagagtctctttgctcagaagagatgaagcttgaaaagggggagtgaggtttgggggaaaacacgatggaaagctctctgcaaagcaaacactaccattgcctttcaggtgttccagtgcctcttaattgagggtgagaattgtggagaagatgctctaagagaagcagaaagatttgttattggtgatgaagaatttgaaagattcttggagcgccacaaagaagtgtcctgcttggtgcctgaatctaaccagaaggttgtataaagcaaaagttgttttctttgtcatcatacattcagattgattcccaaaagggaagtctctcagccaaggaccccacacattgttattttagagggttcggtggtgagaaatgggaggaatgccatgtcagggcagatagggctgagggctgccattgactctgccacctcccagctgcagggtctttagagagcttcagtttctctatccacgatggatagagtggtactttgcagatgatacaactgtatatagattcatgtagatattcttgctatatgattcatataagtataatgtccctatgtgtcatacatgcatgacataacccctaaacatagaaagaactaacgaacgccactctgttgatatcaacattatcactttatttagttgaataatctctatgtataattttgttatgttgcacagaatgtagaagaaatgtttcccatttagttttctaatgtaatgacaattggatccatcctattagcacaaatttcatacaccgataaaacaaggttggccaaaacatgtctacactgtggagcttcaggtataactagaagccgggtatctaaaaatgtgttctcagaagctacaggaaaaaaaatccattaataaggaacctccttattaatgaaagatacaaactttaaaaaaattatgatagtataattgaatccataaaattaaaaatatgtcacacatatcataaaattaaaagtgaaatatgttaacatgatatactgaattgtataaaataaagtattatatataaagttatttaaatcaataagaatctatgaacaccaaaaaaagcaaaacatccaatgggcataaatagataatttacagaaaaaaaacaaatggtgaataaacattttaagagtatttgatattgtctatattcaaggaaatacaaaataaaatatgaagcataaagttgcagtaagagaggcaagttcatattgttagcaagagtataaattattgcaactttcctagaaaacgaattgctaactttataacctttaaaatagcccatatttgaatttagaaattctaccttaaaacaagagaaatattcacagaactagagaagtacttatgtaaagatatgttactgcagtattaagaataataccggccgggcgcggtggctcacgcctgtaatcccagcactttggggggctgagatgggcggatcacgaggtcaggaaatcgagaccatcctggctaacacagtgaaaccccatctctactgaaaatacaaaaaattagccgggcgtggttgcgggcgcctgtagtcccagctactcgagaggctgaggcaggagaatggtgtgaacccgggaggcggagcttgcaatgagcggagatcgctcactgcagtccagcctgggcgacagagcgagactctgtctcaaacaaacaaacaaacaaaaagaataataccaaaaaaaaataaagatagcctgtcattcagcatacagagaatgagtaagtctgtaggttcacagaatgaaatgttacactgactaacaagcatattccaaaaatttttaagtgacaaggagaaattctgataatataatagtaggtacagataaaaaacagtatgcaaaattaatttgaagtttaatcctgatgtgtaaaaaaaagtatctctacatattcctttggttatcttggagtagtggaattataagtagttttattcacctttataactttttgaactttaaaattttgtaacttaagtattagttttattattttaaaaacagcttctccatctgccatccaaaaatacatatacaggaaaatctctaccccatatgtttaagtaatgctaggaactcaaagagcagacattcattccttatgctttagacttctgaggctctaggtaaatggttcaagtttaaaaggtaatgttgaagtgaacatgaacaagaaaatctcagaatgaaggacaggatgaccatcaaaaagaagagaaagggggtagaggaggttttcctctatgcactattttatttaattttttaaaactccatcttaatagttaatatgacatcaaagaaaatttggttgagtacctcctttgtaagagggactgttaaccctttgactcattgccattttcactaatgcttcatgagccaggttgtatcatccccattgtatacatcaagaggccgagtggtaggtactcatttacctgacttgtatcaggggcaaaatctgaattttgatgaccccaaagcccacaaaccttttagccagtttgtttcaaacttcatcaaatcacctgggatcttgtgaaagggcagacctctactcagtgggtctgaggttggcccaccactctgcaccttgaactagttcccagatgatgctgatgctactggtaccccactagacattcaatagcaggtctgctcccatcccttcctaggagttggcaaatgctggccccagggatgggtctggcctgccacctgttgtagtacaggatgcaagttaagacttgatgagggaaaacatcaaaacaagaatcgtatttgtgccctgtgaacattatataaaagctggttttctgggtccataaattaagtttcagtggagctcagccaagctatttttcttatgtatcatctgtggtggattttgggctgcaaagcacagttgattagttgtgacagactgtgtggcctgctaagcagaaaatatttgctatctggccctttacagaaaacattttacagacccctatctacaagaataggtatagaaggaataccttcccatcaacagtgcaggtacagcttctatatacctatagaagtcataactgtttgtaagtaatgttagggtaataataaaatcctcaggtaaatcgaccctttagctccaaaaaaatagcattcaagagagttctgctttatacattgaaaagggagaaattagatacatggtggacacagtcatcagaaatatcatgtaaagaagaaaagggctctcccaaagtgtgaagggttggggaaattgccttggggttcaatgtcagggaagccttcaggatgaaggttctgatgtgtgaccttttcagcaaagagcagagaatccaggcctgctgtgatctgttgaaaaccgaatgcacacaaacagagccttgtcttgtgagggccatgccaaaggcaactcaagggaaatgagaaatgctggatccaaaacaatacaatgcaaacactacaggtggacaattgagctcacatactgagaaatgcacctgaaactaaatttgtattaacttctcctttgcagatgaaagactcctaccttattctggatgaatatgtgagtatttccaatgagttataaaattaaaacttaattaattaattagcagtaatggcagagttgagttccatgagcataactatctagtacctatttgtccttcttaattagcacttcacagtttgatagtcagtgattatgattatgccagagccctcacttcacagggtcaaatgtggagctaaacactggaacagaataagcttcaacccaggtcccagcactgatttgcactgagcaccatatgatattgtctgccatgtaactatgcatccgtggatgtcacattgaacccgttatcacacacaacagagtcatctgttatgtagtcctgggctggaggctctcctgagatagggcatccagcctactttgaaggaaggccatatcactcttctcattatcttggacaaaccaggcacagccagcttgtcttctgattgataaaccttggctttcctaaggagaggcttatgtttctgctccaaacaccactgatattattcctacccccactgccttccaaaggaagagggaaacctacccttctcaaaactgaaaaacaaatcactttcccctttcctctgtctttttttttctagatctataaccattgccactcttcctagcaaaggacaaataattccatttgaagacatattttaaagaaatgagctccaacaaccttgaattccatatttaaattggatttgttttttggagaaatacttactgtcacttttgatgtttgcttttctttctttcttttctttttttttctgagataggttttcctgtcacccaggctagagggcaatggcacaatcttggctcactgcagcctcagccacctgggctcaggtgatccttctgcctcagcctcccaggtagctggtactacagatgtgcactaccacacccagctagatttttatgtattttttgtagagattggattttgccatgttgcccatgctggcctctaacacttgggcctccccagatgctgggattccaggtgtgggcccccatgtccagctggtattttgttattttcaagttaaccaatcattgtttatacccatttcatttcttaacaatataagctttcttaatagagcataagggaaaaggtgataaggaaaacatttagtttctgggtccaaggtagagaggaaaattcaaacaatttatttttggagtggaaattattatgattgtctagtgattttgaccagcatccctcaacaaactcactggtctccacatatttggaaaacacatcgttgaaccaaaatttgcttttaccaattgaataacattttgcttcaataagtattacttgagctcctatgaaacactcagtgtaggtcgtaaggagtgtgaagaaatcgtttctgcctacagagtagaataggacagactaaaacaaatgaaaatggatggaataagattaaaacaaagagccttcgcaggtcatggaagactcttcttgatctggcacctgccatggaagactcctcttgatctggcacctgcctgcctcagcagcacctttcttttcatcctctctccgtttctcaaaacaagcctttattaatatttacatatatgcatgcatgcacggatgcatgcacatcattactattccagaaacaccgtctacctccatttccccagtacatcatgctatatcacacttctgtgcttttatgataccattccctccaatttaaaatctcaacacataattcagatgttagcatttggggcaagcctctcctgattaccccttcccccagtggaactacatctgcccatgcggggcgcatatcattctgtttattgtgcgcttaggtgtctactgtacttagcccagcctcttccaccagaccatgagctggttgagtagagagatggggtccaaggggttcaatatcagccacagatttcaaaagatacctgtcgacatgactggaatatcaaaagctatttgggattaatagtctagattgagttttacaggattcatcacatggaaatataccagtttctgttatgaattttctagatgcgctttctgaactgtagaaagggacggaaggacccttccaagtccatcctggatgttggtgtagaagaagctataaaattcagtggatttgatgaaaagatgtttctgaagcgaggaggaaaatacatatggagtaaggctgatctgaagctggattggtagagcggaaagtggaacgagacttcaacacaccagtgggaaaactcctagagtaactgccattgtctgcaatactatcccgttggtatttcccagtggctgaaaacctgattttctgctgcacgtggcatctgattacctgtggtcactgaacacacgaataacttggatagcaaatcctgagacaatggaaaaccattaactttacttcattggcttataaccttgttgttattgaaacagcacttctgtttttgagtttgttttagctaaaaagaaggaatacacacaggaataatgaccccaaaaatgcttagataaggcccctatacacaggacctgacatttagctcaatgatgcgtttgtaagaaataagctctagtgatatctgtgggggcaaaatttaatttggatttgattttttaaaacaatgtttactgcgatttctatatttccattttgaaactatttcttgttccaggtttgttcatttgacagagtcagtattttttgccaaatatccagataaccagttttcacatctgagacattacaaagtatctgcctcaattatttctgctggttataatgcttttttttttttgcctttatgccattgcagtcttgtactttttactgtgatgtacagaaatagtcaacagatgtttccaagaacatatgatatgataatcctaccaattttcaagaagtctctagaaagagataacacatggaaagacggtgtggtgcagcccagcccacggtggctgttccatgaatgctggctacctatgtgtgtggtacctgttgtgtccctttctcttcaaagatcctgagcaaaacaaagatacgctttccatttgatgatggagttgacatggaggcagtgcttgcattgctttgttcgcctatcatctggccacatgaggctgtcaagcaaaagaataggagtgtagttgagtagctggttggccctacatctctgagaagtgacggcacactgggttggcataagatatcctaaaatcacgctggaaccttgggcaaggaagaatgtgagcaagagtagagagagtgcctggatttcatgtcagtgaagccaagtcaccatatcatatttttgaatgaactctgagtcagttgaaatagggtaccatctaggtcagtttaagaagagtcagctcagagaaagcaagcataagggaaaatgtcacgtaaactagatcagggaacaaaatcctctccttgtggaaatatcccatgcagtttgttgatacaacttagtatcttattgcctaaaaaaaaatttcttatcattgtttcaaaaaagcaaaatcatggaaaatttttgttgtccaggcaaataaaaggtcattttaatttagctgcaatttcagtgttcctcactaggtggcatttaaatgtcgcctgatgtcattaagcaccatccaaaaagtctgcttcataatctattttcaagacttggtgattctgaaagttttggtttttgtgactttgtttctcaggaaaaaaaatattcctacttaaattttaagtctataattcaatttaaatatgtgtgtgtctcatccaggataggataggttgtcttctattttccattttacctatttactttttttgtaagaaaagagaaaaatgaattctaaagatgttccccatgggttttgattgtgtctaagctatgatgaccttcatataatcagcataaacataaaacaaattttttacttaacatgagtgcactttactaatcctcatggcacagtggctcacgcctgtaatcccagcacttgggaggacaatgtgggtggatcacgaggtcaggagttcgagaacagcctggccaacatggtgaaaccccgtctccactaaaaatacaaaaattagccaggcatggtggcgtacacttgtaattccagctactcaagaggctgaggcaggaggattgcttgaaccctgaaggcagaggttacagagccaagatagcgccactgcactccagcctggatgacagagcaagactccgtctcaaaaaaaaaaaaaaaaaaaagcaagagagttcaactaagaaaggtcacatatgtgaaagcccaaggacactgtttgatatacagcaggtattcaatcagtgttatttgaaaccaaatctgaatttgaagtttgaatcttctgagttggaatgaatttttttctagctgagggaaactgtatttttctttccccaaagaggaatgtaatgtaaagtgaaataaaactataagctatgttaaataca

SEQ ID NO: 458 - DNA, 20201 bp, Homo sapiens
agatgttgtttagagttcttctgttagcacagctgtttctagggtctggaaaaactctaaggacccccaggaggatacacaccagattgggtctgggctcacaccaccctgcatccccagagcctccctggacgctgtttgcaaggtcctcaccgcctggaagtccaggagccatttttagggaacagcattcaagctcaacatggcaagttccctctttcctgcaggggaggaccagaagggagccggagatgggggagaagggtgggaggtggatggtttggaaaagggatggagacccagacggagagaagccagccagccagggtgagggaacaagctgctgtgctgcccaggagaggcctggcctcaggctgccagcctcagggaggtagatgcggctgtgacagcagcaaagaatgacggccaagggcgacagcaggggctggccatgctgtaaaggggcttcttgggagggtccagcctcaggaatcaaggggaactcctgagccgagaattctgaagatctcctccctccctgaagctgtgggctgggccatcggaaaactttcagttttgtttccttgcctgcaagaaacgaaactcaaccgaaagcctgcagagagcagaacatggaaggagacttctcggtgtgcaggaactggtaagaaagtgctttctccagcggcagacccgggctggcgagggagagacgtagacgacatagggctgtttctgaagggagcagaaagtggttcctgcataagaacacttaggaggacaagcagctggagaccgtgggccccaagggtaggagggtttaaacttggtaatctctgggtgggggtgggcagcattacctccacttcactgcagcccctttcccccaaatgttaggctttctgggacagttctgaagccaaatagcccggccagtggtcccaactgggctactcatacttgtgagaccttgggtcctaatttggggttctgatactatgaccttcacacccatctgtgaaagaaagtgtcccacggagattctccaggactactctcaccctccttggaaagggagccgtggggcggggcaggggggacagagcagggggctgggaccacacctctaacgggagggggggcgcggaatctgaccgatcaaaaagccccattctcaaagctccctacctgtgacagggacctgagtggaccctccccagagagctttgctccagccagacccttcaagtactctggtttctcaaccagcccaggaagagcagggggagaaggggccaggtcaggcagaggagagagagcagaggaagggaagatgatgctgcctgtgtgcccgctgcctgggcagaagaggagtgaggctttgacagtccctctcggagcacgtcccctgtgccaggaacatgggcatgtaactcttctcgtcccctgggcctttacggctacagccaccccatttcccttctcccaagctgccacaagcaagagctgatggaaatgaaaggagtcatttctttctttcttcttcttttttttttttttttaagatggagtttcgcttctttttgcccaggctggagtgcctggagtgcaatggcgcgatttcagctcactgcaaccttcatctctcgggttcaagtgattctcctgcctcagcctcccgagtagttgggattacaggcgtgcaccgccatgcccggctaattttgtattgttttagtagagatgaggtttcaccatgttggccaggctgatctctaactcctgacctcaggtgatccacccgcctcggcctcccaaagtgctgggattacaggcatgagccaccacacccagccaaaagggggcacttcttggcaaaaaggacggttagagaaaaatgccctgcccaggaagtgggaggctcagaacccttccttcactgtggtctccaggaagaacctcggagtctctgtgagttagcgcaggtgaacctgaaggcaggggagacttgggaagctctcgctttggagattttggaagttggcatggccctggcaggaagcgtgagcctagcagggctgcgttcctaacactgtggaccaaacaggggcaccagaaaacaagaaaaaagattcaagagaatttggcacttctctcaaattatttaaattgaaataatttaattatttacattatttaaaatgaaatgtttcattttaaaaacagccttatagaggtataattgacctacaataaacctcacattttaaagggtagcaattgataagttttggcctaagttatatacatccatgaaacaccatccccgtaattgagataatgaagcttcctgtcaccccaaaagctccccatgcccctttgtaattcctccctcctgctccttcccatgccctgccccagcaatgtaagagctctgtagatcatccttattcttattagatgctgcctcactgttctgacttttggacccacacagggagtgtggggcaggtggtgtcatcatcatcacatgttcagtgcttaaggcctctggagatctagccctgggtatgaaatacagctccatgttttataatatgaaaataagtctatttttctatccccacaccttgaccctgtagtaaaagacatgtagtctctgccaacttcaccctccatgaggcttactgcctgcggttcctggtcctgtgtccggagtgtgaggagcctgtccccaaggaaaccatggaggagcactgcaagcttgagcaccagcaggtgaggaggcggcagggaggatggggtctgagagtcaaggtgagtgttcagtcctccctgcaggtgagatggggtctgagagttgggggacgagggtctagtcctccctgcaggtgagatggggtctgggagtcaaggcaagtgttcagtcctctctgcaggagagatggggtctgagagtcaaggcgagtgttcagtcctctctgcaggtgagatggggtctgagagtcaaggcaagtgttcagtcctctctgcaggtgagatggggtctgggagtcaaggcgagtgttcagtcctctctgcaggacagatggggtctgagagtcaaggcgagtgttcagtcctctctgcaggtgagatggggtctgggagtcaaggcgagtgttcagtcctccctgcaggtgagatggggtctgggaggggcaagtgttccatcttccctgcaggagagatggggtctgggagtcacagagtgggtccagtcctccctgcaggagagatggggtctgagagttgggggacgagggtctagtcctccctgcaggtgagatggggtctgggagtcaaggagagtgttcagtcctccctgcaggtgagatggggtctgggaggggcaagtgttccatcttccctgcaggagagatgggatctgggagtcacagagtgggtccagtcctccctgcaggagagatggggtctgagagttgggggacgagggtccagtcctccctgcaggtgagatggggtctgggaggggcaagtgttccatcctccctgcaagaaagaaggggtctgggagtcagggaatggctccagtcctccctgcaggagagatggggtccgggagttggggtgagggctggggacttaaggcaagggtccagtcccccaggcagagactcacttgagggccatgggaagtcatttagcccctccacacaaagcccatggaaaggaaatgttaatcctgcctttttcatgctaatctgagtctacctccagttttcctatttccaatcctttccctacaggcttatggatctggcataggcaagaggttctggtttcaggaaagactggctgttctcttgagatctgtaaagagaggatgtgaaaaaggaaggtcctggaaggcagtcagatggagccctgtttcccgcctttccatgtccattcctcctggggcccctgatctgtctctctggagatactcaagctcaggcagccgttgccaactcagactggtctgacaaacacttcttgaacactgggcggggtgctagagagacactgaggtagccacatcggatccctgccctctgggagttcacagacccaaacccggaacactgtgagccaaagtggatgtggggcaggccctgggtgctgggtggacccacatctggtgtgtgtgtgtgtgtgtgtgtgtgtgtttaggttgggtgtacgatgtgtcagcagagcatgcagaagtcctcgctggagtttcataaggtaagagccccatgtgatttctcctttacagccaaatagaccaacctgagaaaaggagaggaaggggaaacgggaggccagtaatagagatttccacctgaccactcttttcaccccattaggcttggagagcagtggagaactagcccaccgcataacacaggttctcctgtcccccagatactgatcagaagggttttccatggtccatgagtccatcagagctcagatcccccgaaggcagtcccgcactctggcccttctcatctgctttctcgtattggccctaattccctagggagatgggcacaagtccttgatctgcctacagtcaaagaggccagtgatcggccaggcgcagtggcacacgcctgtaatcccagcactttgggaggccaaggcgggtggatcacgaggtcaggagttcgagaccagcctgaccaacatggtgaaaccccgtctctactaaaagtacaaaaattagctgggcgtggtggcacacgcctgtggtcccagccacttgggaggctgaggcaggagaattgcttgaacccgggaggcggaggttgcagtgagccaagatcaagccactgcactccagcctgggcaacacaatgagactctgtctcaaaaaaaaaaaaaaaaaaaaagggccagtgatcatgcccttcctgctgcctcccacaggccaatgagtgccaggagcgccctgttgagtgtaagttctgcaaactggacatgcagctcagcaagctggagctccacgagtcctactgtggcagccggacagagctctgccaaggctgtggccagttcatcatgcaccgcatgctcgcccagcacagagatgtctgtcgcagtgaacaggcccagctcgggaaaggtaagcacacaaactggggtggaagagagacgttccaagggccagagcctttcctggatgggatgcaaggaagggaagctctcaacaggacggatgacaagtgtatttgctgtatagatctcaattcatctggctattctaattctaaaccatgcctcagagtggccttcctgtgtgtctgctgtggccttcaaatgactggtccagggagactaggaggccggggctagagcctagctaccacaaagttgagtaaagaggccatggagaaggctgggcggggtggctaatgcctgtaatcccagcactttgggaggctgaggcgggcagatcacctgaggttgggagttcgagaccaccttgaccaacatggagaaaccccgtctctactaaaaatacaaaattagccgggcgtggtggcggacgcctgtagtcccagctacttgggagactgaggcaggagaatcacttgaacccggtaggcggaggttgcagtgagtcgagatcgtgccattgcactccagcctgggcaacaagagcaaaactctgtctcaaaaaaaaaagggggggaccatggggagtcctaggaaacaggaggctttctttgagcacctctagcacagtcctagcctggcagagatccattgcatccttttacagatgagaaacctacacacagaataaagcagggacttgctagaggcaaaaataagactggactcccgcacttcctggcactgaatctagggctttttccattatcaacaatggccagaagggagttagcaatggctcctggcctgggggcctatgtattggctccctggtaccattttatgttcacttgaatcactcacctctttatgagggtgtatttactgtcacacaaccatcagtgtgacagatcctttggtgtctttgctagttgttttggtaacatggtaacatgggagagagcctaaaactccccagacagtaaccttctcctgataaacaatccacccaagggcaaaactggccaatggaaacctggaaattgtgagagtcatgtatatttccttcatcccagcatggctggacgtcaacagaatcaaacacagtcttcaacacaacttcagtgcaacacaacacaacacaacacaacacagcttcaacactgtcaacaaaaatgtgttcaaccaacacctggtctgatcacagagtctgaaaactggtgcaatgaaagagcacagtcagaatggagggggttggcatccgtggctacagctccattcatctccttagaaaccagtcctgatccaggaaaatgtctctccattacggttgctgctgccctgagtgcacatctgtggccataaaggaaatgatgtgggtgattcggccaagagttgcctgtgtggtcaaggatgccggcagcgcaggaaagtcaagaccaggcaggtccggggggcagttcgtgctcatgagcacaggccatgtatgcagttgtgggagagctgggctagccgttgacaaggacaatcatttgtggtgttgtttctctgcttattcaggggaaagaatttcagctcctgaaagggaaatctactgtcattattgcaaccaaatgattccagaaaataagtatttccaccatatggtgagtagcacttagtaattttctaatggtgccaatagttcatccacattctgaaaagtgtgataggaaaggcagattctgggcccaattttacatagcatggatattaaagggtcccatatttattttttgctttgttccaaaagatagtttagtgacttgcttaggctaatcaagcacacaaaaattggtcttcatttgtgcccagcccttcaaaggggcttcccttgccactcccaacacccccgatcacctctgaccatctccaaacttcatggcctggacattgcaatttggtcctcagtagggcctgtcttactgttttcggtcccatgtgggagtcttctctattagactgtgagcttcctgcaaaactgcatgactttttccattttcctgacatcagagcttggtgcaaaaagaggactctgtagaggcgcagttacgtgattgactgactgactgattttgcctgggaacactcacaggttcttccctccatagcccctaagcgccgtttagtgcattgctgtgccaagttgctcccttcttttgcacagaatggagcatttcccctttgggaaacttaccaaggcttctctccaaagaactcttctccttctccttgggcagaaagttgtttacctttcttaacacttcagtgcttaaaactacagaatatcaaaactaaagaaaccatagagacgatccagcttttcgctcttttctttttctttttactattgtggtaaaccacgtataatgtaaaatttgccatcactatagagacatttggtacattcacaatgttgtgcaatctggttctagaatattttcatcattccaaaaagaaatcctatacccattagcaggtactgtacattccctcatcttcccagttcctggcaaccactaatctgctttctatctctatggatttgtctattctggacacttcacatcagtagactcatataatatgtggtcttatgtaaccatcttctttcacttaccgtaacattttcaaggtttgcccgtgttgtagttgtggcatgtgtcagcatttcattccttttaatggccttttcttttcttttatttttttgagacagggtctcactctgttgcccaggctggagtgcagtggcgtgatctcggctcactgcaacctctgcctcccgggttcaagcgattctcctgcctcagcctccggagtagctggggctacaggtgcctgccaccacgcccggctaatttttgtatttttttttagtagagacggggttttaccatgttggccaggccagtctcaaactcctgaccgcaggttatccgccttcctcggcctcccaaagttaatggcctttttacggtcatcccacattttgtttctctacttgttggtaaacattcggattgtttccacctttcagctctttgctttttgaagtgcagtctgtggaccagctgcatgagcatcacctggaatcctgttagaaatgcagaatctcaggccctccccctagaaatgctaaatcagaatatgcagggtcacatgatttcccaggcatttcaagtctgagatgcgctgccccagccacgggattctcagccttggctgtacgtggaaatcacctactgacttgttttccttagtactgatgtttattcgatcctataagtggtccatgtgttctgtttgaatgagaaaatacttggtgagcaccaaaacaagagtaaagctgactacttcccttcaaatgtccagcctggcaaccagggcacctacacacttatttgaaggctacagggaagtggggagctccaatacacatggaactggatttgtgctcagaaactctgaattttagttctgctgtgccccttactggctgtgtaacctctctgagcttctttcttcttttgaggaaaatggggataatggtttatctccttgttcaggaaaagaagacatccacaaccagccaacaccagatctatctccttggcagcatccacactcacttactttgccttcccacctcttaaccatagaggagcttcctatgtgcctctctaaagcctatcccctcctactggtataatataccctctctttttgcctacacaaggtcacacaagttttttgctacactgctccagcaattctcccctctctgtcctgcaacagagagaggttaaatgagctgtacacgcaggtaacaacaaagtctcacatctctaggttgtcctaacatttcttacaataactttttaaaggggtaccactattgaatatttatatatcaatggccttgcacgaaaagaatttttttttaattttgaaaattaaggattgaaatcatgtatactaggtggttttgtggttttcagtctttaactttttattaatatgacccaaagccagaaaaacatgaaatacttctgatcccatttcctataagctaccatcttgtttctttgttcccctccgtagaaaaacatttgagctagttgtctataagtaactgcctccatcttttcttctctcattcttattcccactccagtctggctctccattttaaccaaatctgctcttgtcaaaatcaatgacctctgcattgctaaatccaatgctcagttctcagttctcaatttatgggaagcatttactgctcatcactccctcttcctcagtggactttctcggcttccagggtaccacactttcctggttttcaaggacattggtggtctctcattctctacctccccagcctcttaattttggggggccccagggcttagtctctggtctcttctctacctatattcactgccttcattatttcatcctacctcctgatttttaaaaatgccatatgtaaggccgggtatggtggctcatgcctgtaatcccagcactttgggaggccgaggtgggaggatcacaaggtcaggagatcgagaccaacctggctaacacagtgaactctcgtctctactaaaaatacaaaaacttagccgggtgtggtggtgggtgactatagtcccagctactcgggaggctgaggcaggagaatggcgtgaacccaggaggcggagcttgcagtgagccgagatcacgccactacactgcagcctgggcgacagagcgagactccatctcaaaaaatagataaataaataaaaatttaaaaattttttaaaaagccatatgtagtcagacacttccaaatttatatctcagtctgggtttttctccccaaactctagatttgtatattactatttactgcatcttcacttgaatgcttgatagacatcttaaatgtaacacatctgaaatggaatcctctctgccacagcttggcccatctcagttgatggcaactctatctttccagttgttcaggccaaaatctcaggttcactctcgacttctctttccctccgcattgctaccctggtatgaaccatcatcttctctagcccagatgctgcagcagtctcctaaacggtcttcctacttctcaccttgccccctacagtctattctcatcacagaggtcaacgtgatcccttaaaaatacaagtcagattgtttggctcctctgttcagatctctgtactgattcttgccccattttatgcaaactcaaaactacagtggctttagagatctatgtcatctttgcctcccttcttatctcatcacctctttgatctcatgtactactcctgttcagctcactggcctcctgattgtttcttgagcataccatgccttagggccttttcactggctactgcctctggctggaagctacctcctcaccttccccaccctactccaggagctaactctctcacttctctcaagtctttgcccagatggcaccttctcaaggagatgtaccacaacaacctatttaaaattgcaactccctctccatcacatatttaccaaccccttaccttcttctattattttttccatagcatttgccaacttctaacatattatctaatttacttacttattatggcccttgttaattgtctcccacgacctcagaaaaactataagccccactggtccccttcatgctaactactccccagacacaaatactctacttttgcttttagctgtttcttctggtaatcaccttcatatgtctaaagcaccttcttatattttttccagttttagatattacttattgactcataaggatttaggaatatagatttcacttttttataccacccatcccacacacacacctccaaagttcttcatttcatccttccaatgtattgatttcactcattctggttaaataaatattcagtattacattagtataaccatgtaaacattataaatggttttccacatgaattgtgattatgtgttctttctcctacaactttttgttttacctggacttaataattgcttcggtttttcatttgcttcactttctaggtacctatcactaaatcatccctaaaattctctaccagatctgaaaattcccctgagtacaactacacacatcagatagtctgtccatttcattttgggagcatgttatgccccaggcttgatgattagctgttggtctggaatttcttccactctctccacggttggagttctgattcccaaatctcaggtctcatctttctctttcttaggttactccttgtttgatagaacatatccccaaatagtttcttgagaaagaaagcatgagaggcaaattttttaggccttatatgtctgaaaatgaaagcttgggtggctatagaatctattgaccatcttaatctgtttattaaaaatcttattacaattctgatttggccactacacactgtatacatgtattagaaaatcattctgtattctataagtatgtatcattattacttgtccactaaaaataaaagaaataaaattgattacaaaaactttcaaataaatatgacagtagaaagttaatacaataaacattcatgtatttactccccagatacaacagttgttgttctaaacaaggtgaataaaaataaatctactcttagatacattacaggtaaaaggcaaaggttgatttctttgaaatcagccgaagaagattacaagcaaaggaatggcagttaggctgaaagcaaatatatcgacagcaataatagaagtgggtatgcagtggaataatcttcaaagtgctaagagaaaatagctgttaacacgtggaaatcaaaagttttccaggcttgaactatactttgtttgttttcttttttctaaagtatgttaaagcaaatccaagatatcctgttatttcaccatcattctttaatatctcaaaaatacagtcattttcttaatcacaatgcctttatcactctcaatgatgttaacaataattttcccccatcgttttggggccttgcatttaccactcttgttcattactactgctgctgctgctgctgctgctgctgcttgcttctcccttgtattctattggattgagcaagatttctttattctctttcttctttcctactgattcgtcaattttacatttatttctatcatttcaatagttacccttaacattttaatataaatacttgacttaataaagtctaaagttagtcattatctctactttccttacaaatagtatatagatttgagaacatgttaacactgtaactatcttacatgaaaatgctgccagaattttgtttcattttgctttcatactacccctctttactgattattgttgttatttatgtaactcatgcctgtttagatatactcacatgtttttgtttttgctttttttctttctttctttctttttttttttgagacaaaagtctcactctgttgcctgggcttgagtgcagtggcacgatcttggctcactgcagccttcgcctcctgggttcaagcagttctcctgcctcagcctctcaagtagctggtactacaggtgtgtgccaccacgtctggctaatttttgtatttttagtagagatgggcttttccatgttggccaagctggtcttgaactcctgacctcacataatctgcccacctcggcctcccaaagtgctaggattacaggcatgagctactgtgcccggctggatatactcacaagtttacccttctctttactcacattcttccttggatcctaagctttccttctgggtatgatttctctcttcctgaaatacatctcagtagcttcttcaccaagaaccttgagtagtaaatctttagttgcctgaaaataagctttttgttttttgcatccatgaatgatagtttagctggatatcaaaatctagattaacagctattttctcttatcattttgaagattattccactgccatcccacttctgttattgctgttgatgtattttcttccagcctaattgccattcctttgtacgtaatctttatatttggttgatttcaagatcctctttgccttttacctgtaacgtgtttaagagtagttttatttttattcattctgttcagaacaatgtactcaaatgtgtttgcttttctcctgctcaggatttctctttccttaatataaagatttatgtcactaatcaggcctgaaaattctcatctattatctctttgaattcccaacattccccaactctcccacattctctcaactctccttctggaacataacacatgtatattaagcattctcattctagcttcatgactctcttttttttcatgactctccttttttttcatttctctcttttaatcgccttatgtctcttaacctttcatattttctctatttctatctcttatattctgggtaatttcctgaaattatctccaagttcattcattctttcttggccaaatctaattttctgtttttagcccatccatttaggttcaatacctgcatttttcatgtctagaagttcaatttatctttctttcaaatttgcctatttttgttctcactacaaaaaaaagataggtatgtgaagtgattgatatgttaattaacttgatttaatcatcccacaatgtatatatatattaaaatatcacattgtaccccataaatatataaagttattatttgttaattacaaattagaaaatttcaaatttacctgttctgtttttcatgagatgttattcttttcccagatttaatcatttttaattaatttattttacagtctctatcctatagttgcattacctgaacttcttggaggctaatctgactacttttgtgtctgtgactcttactcaaggtggattgcttccttgtgtgtttgtaattttggattgtgagtttctatctggtgggactctacctatgaggatcctctatgacctattttgaggctgttgtccctccagaggaattttgtgattgcttctgccagacatctcaatgtttatgttaattcttctgctcagggattcccagaccatgaggccaaagtaaatcctaatcccacacacaggaatggcatggacctgtgattttgagttttcaggggcataagttttcatctccacactcaaataccgacccaagaaagaaaagcttccttgccactttccttttctcattagctgatacttttcctcttacccaccataatttatcctttaaagtttccagctttatgcaggatcaatagagtcttacttccaaatccccacctgtgtggatgggactttcctgtcatccaagcccctagttacaaagttgaccctacatctcccataagcagtgtcaactcctgtgcttaaccagtccatttgtgctgctataacaggatgccacagacagagtaataataaagaacacaaatttatttcgaacagttctgaagactgggaagttcaagatcaaggcaccaccatttggtgtctggtgagggccttcttgctgcctcctagcatggtagaaagcaaaagagtagaaggctgtagccaaatacttcatgaatcctcttttataaggaccctaatctcattaaaaagggaggacctttcatgatctaatcacccccgaaggccccacctcttaataccatcacattggcagcacctgaattttggaggagacacattcaaaccatagcaaccagtcagaccttcattcctggaatgcaaaattttctttctttcctgcaaagccagctattaaattgaatgtctgtcacattttatacaccatataaaagtgtttacagtgggaatttcttgtgttatctagtctactgtattttctgaccattaaagctgaagtcattttaaaatttgatatattattcacaattgcagggtaaatgttgtccagactcagagtttaagaaacactttcctgttggaaatccagaaattcttccttcatctcttccaagtcaagctgctgaaaatcaaacttccacgatggagaaagatgttcgtccaaagacaagaagtataaacagatttcctcttcattctgaaagttcatcaaagaaagcaccaagaagcaaaaacaaaaccttggatccacttttgatgtcagagcccaagcccaggaccagctcccctagaggagataaagcagcctatgacattctgaggagatgttctcagtgtggcatcctgcttcccctgccgatcctaaatcaacatcaggtactcagcctctgttctctgcttacctttctgggaaccatccgcacagtgtcttaaaaaaatccaagacctgaaagatgttcacaaatgttgtggctgaaaaggccgttttctctgactcccacttctctgggtgcccaaatgcactatctcgtagcacttaccacctggtttatttgcatcacctccgagagactgagtcacctttgactcaagccaggtctttgaaggtagagccaggtccctcttctctgtgtctccagcttctaggccagggattgatttggagcaactgcttcaaaactgttgagtaaatgaatgaatcagaggatacccagtctatctctctcatggtgtagatatggcactgaggcccagagatgagatgtcttggtcaagatcctaagccagttggtggtggcttacctccagcagatcaaggtttgcttcaagaagatcagggtttgtaggcatctccctgaatatcatgatttttatgtcctaggttattttctagtaataataataactggcattagaggttgttaaccattgtgtgccagttacaatacagagctctttataatcttcatcataaacaataggcatgcattttatctccattttacagataaggtgaagtagctttccaaggagtatacaattagaaggtggcaggatccagcctgagtccacatgtatatagctccaaagtttatgctcttaagctccagattaaatgccttacttaaaaaatttattttttttcaaaatacataagtactagattttgttggagctagttgatataatatcatataaagaagtataaaagcaaagctaaccctaattccccaaccccataccctgagataccactttggacagtcttatgggcatcttttcaaagctctacctttgcatatacaagcctaaacaagcatatactgggttttacttgtttctttttccacacatattatcttactatactttttactctgccacatgcctttttcacttagtatatgatgcatgcttcttacaaaagacttagtatgccaaaacctttttttctaacttccttgtgcatctatgtatgcacataagcatataattttacaaaaatgggttcatttcatatttgctgggggtgttactagtgccatttttccttgcctcccacaatttggtatatttcctttcacagttttctccatccttatataacagagtcgccagatttagcaaataaaaatacaggacattcagtcaaatttgaatttcagagaaacaaagaattgtttttagtgtaggtatattccatgcaatgattgttttgctaaaattaaaatttaaccaggacaccctgtattttatttagcaatttcttatataaccaccatacaaacatacacatttggagtcctgttatatacattttttcacttttttttttttgaaccagtaaagctgccatctttttttttttttttttttttttgagacagagtctcgctctgtcacccaggctggaatgcagtggtgggatctcggctcactgcgatctctgcctcccgggttcaagcgattctcctgcctcagcctcctgagtagctgggagtacaggcacccgccaccacacccagctaatttttgcattttagtacagatggggtttcaccatgttgtccatgctggtcttgaaatcctgacctcaggtgatccacccgcttcagactcccaaagtgctggaattatagggcatgagccaccacgcccagcaacatttctttacatcctaatgtaaattcagcaatacccaaggaaatccctacaaacaaaacagtgtggcttatttttattaatggctgcctaagattccatggtgtgagtgttctcccatctgtccctccacccagtgatagcaacaggcccctgttaaactttgtcgcaagcctcctatacttctggctcagtgggctcctgaccttttctatgccattacactccagtctttgggcagggctcatgctctgtaacaagggacagcaatatccagagatattctaggagctagcacttcttactttaaccatatcaaactttttttatatccatttcttaggagaaatgccggtggttagcttcatcaaaaggaaaacaagtgagaaatttcagctagatttggaaaaggaaaggtactacaaattcaaaagatttcacttttaacactggcattcctgcctacttgctgtggtggtcttgtgaaaggtgatgggttttattcgttgggctttaaaagaaaaggtttggcagaactaaaaacaaaactcacgtatcatctcaatagatacagaaaaggcttttgataaaattcaacttgacttcatgttaaaaaccctcaacaaaccaggcgtcgaaggaacatacctcaaaataataagagccatctatgacaaaaccacagccaacatcatactgaatgagcaaaagctggagcattactcttgagaagtagaacaaggcacttcagtcctattcaacatagtactggaagtcctcgccacagcaatcaggcaagagaaagaaataaaaggcaaccaaaaagaaaggaagtcgaagtatctctgtttgcagacgatatgattctatatctagaaaaccccatgatcttggcccaaaagctcctagatctgataaacaacttcagctaactttcaggagacaaaatcaatatacaaaatatggtagcatttttatacaccaacgacatccaagctgagagccaaatcaagaatgcaatcctattcacaattgccacaaaaagaataaaatacctaggaatacagctaaccagggagatgaaagatctctacaacaaaaattacaaaacactgctgaaagaaatcagagatgacacaaatggaaaaacattccatacttatggataggaagaatcaatattgttaaaatggccatactacccaaagcaatttatagattcaatgctattcctatcaaactaccaataacattcttcacagaatcagaaaaaaaaagcattaaaatttatttgaaaccaaaaaagagcccaaaaagccaaagcaatcctaagcaaaaagaacaaagctggaggcatcgcattacccaacttcaaactatactacagggctacagtaaccaaaactgcatgatactggtacaaaagcatggtgctggtacaaaagcagacacatagatcaatggaacagaatagagggcccagaaataaagctacacacctacaaccatctaatctttgacaaagttgacaaaaatacgcaatggggaaagaattccccattcagtaagtggtactgggataactagctagccatatgcagaggattgaaactgaaccacttccttacaccatatgcaaaaatcaactcaagatggattaaagacttaaatgtaaaaccccaaactataaaaactctggaagataacctaggcaataccattctggacataggaacggaaaaagatttcatgacaaagatcccaaaaataattgtaacgaaagcaaaaattgacaaatgggacatgattaaacagaattaccatttgactcagcaatcccattattggttatatacccaaaggaatctaaatcattctgtcataaagacatatatacacaaatgttcacggcagcactatacacaatcgcaaagtcagggaatcaaactaaatgtccatcagtggtagaaaggataaagaaaatgtggtggcagggagtggtggctcatgtctgtaatcccagcactttgggaggctgaggcgggtggttcacctgaggtcaggagtttgagaccagcctggccaacatggagaaactccgtctccgctaaaaatacgaaaattagccaggcgtggtggcgagcacctgtcatcccagctacttgggaggcctaggcgtgagaatcgcttgaacctggaaggtggtggttgcagtgagccgagatcctgccactgcactccagcctgggcaaccaagcgagactctgccttaaaaaaaaaaaaaagaaaatgtggcacatatacaccatggaatactatgcagccataaaaaagaatgggatcatgtcctgtgcagcaacgtggatggagctggaagccattatcctaaatgaactcactcagaaacagaaaaccaaataccacatgttctcacttataagtagaagctaaacattgagtacacatggatacaaagaagggaaccgcagacactggggcctacctgaggtcggagcatggaaggagggtgaggatcaaaaaactacctatctggtactatgctttttatctggatgatgaaataatctgtacaacaaaccctggtgacatgcaatttacctatatagcaagcctacacatgtgcccctgaacctaaaaaaaaagttaaaagaaaaacgtttggattattttccctctttcgaacaaagacattggtttgcccaaggactacaaataaaccaacgggaaaaaagaaaggttccagttttgtctgaaaattctgattaagcctctgggccctacagcctggagaacctggagaatcctacacccacagaacccggctttgtccccaaagaataaaaacacctctctaaaa

SEQ ID NO: 459 - DNA, 9392 bp, Homo sapiens
gctcggggaagcggcaaagttggatctgggagggcgtccgctgcggctgcgggagccgaaaggctgccagttcccggcagcgctgggaggagggaggcgcgggcggggcgcggcgccggggaggggagcggtgctcaggggagggctggaggggagggaaggagagagagaggggagggcggcaccgcccctagccccgcgctccggaagtgaagcggccagaccaccagctaatggatgcggagcggagggcccgctgaccgctctccgcgcctgggtaagtatcgggcagggcacgcggagtgaggaccggaggacgcagcccccagccccagtgcccctctcctccacctgcctggcccaggcgcctctgccccgccgcatggcggaggtgggccgggggcgagggcgcactgtggataggggtcccgccccgttaccctgggtgtgagctgatggatgggaaaaggggacaagccgggcgccaggctactcagggtgtgggaagcgggatggcactgaagatgagcaaggatagcacaggcagggtggacaggaggggggcagccaagacgctggacaccccagcttcagtttgtccactcgccttggcaggctgcagggagcagagactgaaacgagaaggttcccgcttcgtgcatccactttggtgtggttggggtgacgggggagtggggggggggcacacaacatggcgggaagaaattcagaggggcgtagcagatgggagaggaatatagagagagacgcaggtctgcggtctatgggggtgtagcaaagagtgcagtcgggaattccagcccagggccacgacttaaagacggggtgcagaccgactctattgcgcaaggcgccatggaccgtgtctgcgccactgcgccaagaagggcgcaggaacgtgtcgcgatttggtttattctgcttcctccaccaaaaaaaaaaaaaaaaaaaaaaaaagagagaaaaaacaaactgaaacccccttcccaaatctccagctttcccctgcgccccagagccccgcctggttcccccgcccctgttgcgcactgcgccacagtcgcagcgtttcccgggttaccagatgccacgtgtttggggagtaagtgcgggtgcgcatctggtgcggagtaggaggtaggatgtgggctgtgagtgccatgaattgtgtggggccaagcaggggaaaggtgtgtaggaacttggtgtgtgtgtgcagtagctgagccacggccaccgggttggtaagtaaccagggggcaattagatttgtgtgcctaacacggtcaatgctggtccttcattgcttattcccatctccacgtcctttccgcgtatcagtccctgcctctgcgcgatgacagctccgcctctctttccacagtggcaaaatcctgcagaaatggtgcccctcctttggtggcccgggagggagttctgggcatgctcagtaaccagggtgggtttgggctgagaggccgtttaccgcagggccaccgcgtagggccgtgtaaccagggatccagtcccattgtcagcccaggattaaatgcggttaccaaccacccccacagtccaattgtgagagatagtttggtgaatatagttacatctgctggacaatcagtcgcaatttgaagatcagcccatcttgataggtggaaaggcgtctccggatgagaaacagactggggaagaagaatataggagtggaggggctgagagaaccggagggggcattttggacttagcggcagatgtgctttgcatttgaataaagcatttgaaaaaagcgcttccaactgaattacatcatttcctactcacagccccactgtgagatgcgtgccttatcagcactgctttccaggttaggaaacagatttagagagcttggggcgcatagccaaggttgggtatttagttaaatgatccagcaattccagtgggagtcttccacctcaaagtctggcttcttttccagcttgtcctgtgaccccctttatgtgagaaaatacaaggttcttctatttctaccgtatccagatatttccatccatggccctattgtatatcaagggtgtttcttgccatgtttttatttgaaggtaacactgcaggtcacactgggaggaagagtcatctgaagatagcctaacttcagcatagcagtcattctgtagaccatagagatgctttttcctgggcagtgtctttttacattccctgtttcctctaaatatcccagtggggaggaaggttgcccccagctggtttttttatttttgtttttgttttcagacagagtctcacactgtcacccaggctggaatgcaatggtgcaaacgcaactcactgtagccttgacccactcggctcaagcagtcctccctcctcagcctcccaagtagttgggactacaggcgagtgccacacgcccagctaatttttttatttttcctttttgtagagacagggtcgcactatgttgctggtctcaaactcctgggctcaagtgatcctcccgctttggcctcccaaagtgctgggtttacaggtgtaagccactgcacctggccctcccccacagtccccacattttagaaaggaaaagtcaggcatggagaagtcagcagtctcaggtctctggggctcctgggcacaggggtgaagcagcattttgccctcctggctctctggcacccctggtgccttcagcacttcccagaagactcaggagatcttcccacagcaggagcactgctgatagagttacaggacagcactgtggcgtatggcccccattcgaattgatgaagatgtttaggccaagggggaaatggttgtagccccttaacacacactccgcagcagtaactgggaggtattaggaactctaactttttttttttttttttttgagacagagtcttgctctgttactcaggttagagtgcagtggtgcaatcgtggctcactgcaacttccgtctcccaggtttaagcgattctcctgcctcagcctcccaagtagctgggattacaggcacgtgccaccacacccagataatttttgtatttttggtagagacggggtttggccatgttggccaggctggtttcgaattcctgacctcagtgatctacccgccttggcttcccaaagtgctgggattacaggcatgagtcaccacgcctggccaactctaacttttttacgttctctaatcctcacaggttctccagaacaaaatccttgataggtgtgcttcctccttttttcttttttctcaaatgatgggttaaagttcaaatgttaggaaaggctgggtgtggtgattcaagtgtgtaattcagcactgtgagaggctgtggcgggaggattgcttgagcccaggagtttgagaccaggctgaacaacgtaaggagactgcgtctctacacaaaatttaaaaaactagccaggcatggtggcatgtgcctgtggtcccaggtactcaggaggtcgaggtgggaggattgcttgagcccaggagagatcaaggctactacagtgagccgtgtttacaccactgcattccagcctcggcaacagagtgagaccctgtctcaaaaaacagaaacagaaacaaatgcttggagagtgttgtgttagtaacttattgtcttagtctattttgtgttgctataaaggaatacctgaggctggataatttataaagaaaagaggtttatttgggtcacagttctgcaggctgtacaagaagtatggtgctgacatctgcatctggtgacccctcaggaagcttccagtcatagcagaaagcaaagagggagcagatgcggcaagaaagggagcaagagtgaggggagggaggtggcagtctgtttttaacaatcagatctcgaggaagctaatagaacaagaacccactcattaccccaagaatggcaccaagccattcataagggatccactctcatgacccaaacacatcccaccaggccccacctccaacactggggatcacatttcagcatgagatttggaggggacaaaccttcaaactatttcacttaccattcatagcaaaagcaaagcccaaatgtgtgtttgcaaagccttccagacacaacaaaagagaattaattcataattcccgatttaacttagtcggccctgagatttttttccctgaattgttatacctagattaaactatttttaaacgtttgagtgattcctcattagttttgttaatcaaagaggtaaagcaacttaatattgagtagtattgtgaaggattatcatatttttgaataagtgcattaacggtcttcctactgaatattaatgaagcataaatacctgttcttattgtttatgtgtaacagagcagcttggcttggctggagctaagagccagacacaccactgtgtggaggtgggtgatgtcttcctgtgctaaaaggtgaataaataagctcctcacctctcgcggaacactcgggaacacatcaacaggtatttagccacatctcctgatttcatctttcaatggcaaagaccttgaatcctgtccttaactggggctcagacattaatcaacaggtctgatgagcatatggtggggacaccagatttcattggagtccccaagagaaaaaaaagtcacagtgagcaaagaaggggtctgacagagtgggacaaatgcaagcgcagtgtaaagcagaaccgccatctgcccccagttccattccagattagagtatggatgcttccaaggaaagagagtgctgtgtagtaaaactgaacattgtttcaccaggggtccaagccgccctgctgggaggcttctcttcaagagttctgggtcccagagtggaaggcattttcccatcaactggagagagacgaaacatcagagaccaggaggctgtggagaaagcagctgtcccaggtgcctcaactatcagagaagggtcagcgtcacgtggctgccagcatctttgagaaaatcactggcaatcggacttcagagctgcgggcacaggtgtggttagaactgagatacgacctgcccacctgggtcaggcctaaagacaagaagtcctgagttcttgccactgagtaggccagggtcatttgtccagaaaactttgtgactgtctttgagtgacctagtctgggacccattcattggtgggttctaaggttagaagctcatccaggatattttcaatattaagtcagtgcatagctgcaccactaacaaattggtgcctgtagagtcagagtgggtcaattcttaggacaatggcgctggcactgttagaggactggtgcaggataatgagtgtggatgagcagaagtcactgatggttacggggataccggcggactttgaggaggctgagattcaggaggtccttcaggagactttaaagtctctgggcaggtatagactgcttggcaagatattccggaagcaggagaatgccaatgctgtcttactagagcttctggaagatactgatgtctcggccattcccagtgaggtccagggaaaggggggtgtctggaaggtgatctttaagacccctaatcaggacactgagtttcttgaaagattgaacctgtttctagaaaaagaggggcagacggtctcgggtatgtttcgagccctggggcaggagggcgtgtctccagccacagtgccctgcatctcaccagaattactggcccatttgttgggacaggcaatggcacatgcgcctcagcccctgctacccatgagataccggaaactgcgagtattctcagggagtgctgtcccagccccagaggaagagtcctttgaggtctggttggaacaggccacggagatagtcaaagagtggccagtaacagaggcagaaaagaaaaggtggctggcggaaagcctgcggggccctgccctggacctcatgcacatagtgcaggcagacaacccgtccatcagtgtagaagagtgtttggaggcctttaagcaagtgtttgggagcctagagagccgcaggacagcccaggtgaggtatctgaagacctatcaggaggaaggagagaaggtctcagcctatgtgttacggctagaaaccctgctccggagagcggtggagaaacgcgccatccctcggcgtattgcggaccaggtccgcctggagcaggtcatggctggggccactcttaaccagatgctgtggtgccggcttagggagctgaaggatcagggcccgccccccagcttccttgagctaatgaaggtaatacgggaagaagaggaggaagaggcctcctttgagaatgagagtatcgaagagccagaggaacgagatggctatggccgctggaatcatgagggagacgactgaaaaccacctgggggcaggacccacagccagtgggctaagacctttaaaaaatttttttctttaatgtatgggactgaaatcaaaccatgaaagccaattattgaccttccttccttccttccttccctcccttcctccttctctccttctctcctcctctctcctctcctctcctctctttccttccttccttccttttttctttttctctttcttctttatttcttgggtctcactctcatcacccaggctagagtgcagtggcacaaaaatctcggctcactgcagccttgacttcccaggctcaggctcaggtgatcctcacaccttagcctcccaagtacctgggactacaggcacgcaccaccatgcctagctattcttttgtatttttggtagagacagggttttgctgtgttgctcaggctggtctggaacccctaggctcaaatgatgtgcccaactcggcctcccaaagtgctgggattacaggcatgaaccgccatgcctggcccttgatttttctttttaagaaaaaaatatctaggagtttcttagaccctatgtagattattaatgaacaaaagattaaactccaaatattaaatagtaagcctgaaggaatctgaaacacttgtacttccaattttctttaaataatcccaaatagaccagaattggcccataccatagaagaaagaattggcagtcaaaaaaaaaaataccttttgtaatgtttgaaaaataaagctgtttgacttgtcaggtgttttcctttctcaaatcagcaaattctctctgagtgcctggctttgtgagacactgtacaaggagttacaagactacagctataacctgcagttgagcagttataaacctacaaaatgggccctgccctcagagaggttccagtctagatgaggagctgatctagacaggtaaaaggctaactaaccctttgtgtaaataagttcatcaccccagtaaaagtgtcatcacccagtgaataggaccacctctgcctgcagatttttgttgttgttgttgtcattgttgttgttgttttaacctgggaagtgttcttcctgcctttctgctaggtgtcagatagatggtcccagagctaggtgctgtgtcaggccctgaagacacagatgactcaacctaagctttactttccagaggtccacagcctgagaggtgtccccaaagaaagggggacatgaggggactgcatgcttgagagcagggttgtttagggcaggtttggatttagtgagcaggctggtttgcttagagaaggcttttagtggcaacaaaggatgaagaggagagaaaaggaactcacatttattgagggcctactgtgtgcaaagtgtttcatgtatatctcattgaatgtatacagccaccctgttgtggtataattttgctctttataaagagaaagaccgaagctcagatgagttaagtggtctcctcaacaccaaaatgccaagaagtgatggagcctagacagaagcccagaactttctgactcacactagtccatcctctaccatcacgatgactttcaaattgtgctctgcagttctgcagattttctagcagtgccatctccaaaatgtgttttaaactctttatttttttaattattattagtattattttgagactgagtcttgctctatcacccaggctggagtgcagtggtgcaatctcagctcactgcaacctccgcctcccaggttcaagcgatttcgtgcctcagcctcccgagtagctgggattacaggcacccaccaccacgcccagctaatttttgtatttttagtagaaatggggtttcaccatgttggccaggctggtctcgaactcctgacctcaagtgatccactcacctcggcctcccaaagtgctgggattacaggtgtgagccaccatgcctgggctaaactctttaagtctctagtaaatgcagctagattcaaatgggctgataaccaaattttaacacatcagcattcaccaccaggtttacttttattttcagattggctcattttgtgcagaccttagagcaaagtttcctttatggtatctgtgtacgtatccaaacttcttttaattgttcacagattttaaaagcggtagcaccacatggttgtgtagatcagacctgtgtatttagatcagacctgtgtatcacgtaagtgtgtgagtgcagtgcagatgagcaccatttagttatatgtgctaggcaaatctccaacacagttgatgtgtagtcttgtggtagatttgtgcatactgtaagcaaattgcttagcttctctagacatcagtttccacatctgaaaaataagaagatgagagtacacggttgttatgaacaaatgacttaatgctttttaagcacgttgcatgacatctggaacacagaaagccctcaatacattgaagctcttaggattttcacgatgttcctgtctgctcaatgcatgctttctttattgttctgacagttgtgtggtaacaagctaatatgcttccagttgacttccagtctaccctggtgttagaaaccgtttcatctcttattgtaaatttgagtgcttgttgttttttatatttgtgatgactcttccagcagttgttgacaattgttagaggtttgacttttaaataattacttattttttctgattgtggttcagtttaactgaagaatatcctgagattgtaagaaaagcattttttaaaaggtatcacttgtgatcatttatctttctaaattctatttttaatactgttccaccaaagtgatgcagtggttaccatgacaccctaatttcatgtgtttttgtatttatgaaaatagtttcattgtcatttattggcggtatacaaagtaaaatgttataaatgtgaagttataaaataaatatatgctaataaaa

SEQ ID NO: 460 - DNA, 12298 bp, Homo sapiens
cagaacccggactaagggctatataaagaggaacagttcaggaacttaggctagaaaggaacacagtaaactgaattgatccgtttagaagtttacaatgaagtttcttctaatactgctcctgcaggccactgcttctggagctcttcccctgaacagctctacaagcctggaaaaaaataatgtgctatttggtgaagtaagtatggacactacagtatttatcgagcttgatgtttgtctttaagatttaattgcattaaccagtttgtttgtttgtttgtttgtttgtttgcttttacgtatcagctgaaaattggtctaggaggctgtctgctttcagtattaagttttactttgtcaaagaggaatataaaaaagaggtattggttttgaaggactgttatgaaattggcaagtgaacttgtttcttcttctaaaaacctttggccaagaaatttccattcaatataattggagttcacttctgttatggtattttacactaatcattaaatgccagttaataatctgagatctgaacaatggcaggattaatataaccacttcaggctgccatgataatttaagcatattccctttaccctcagtcatctcagttatatctttacagcttttctttttcttttttatggagatggggttccactatgttgcccaggctcgtctgtaacttctgggctcaagcaatcccccgcctcagcctcccaaagtgataggattacaggcgggagccaccatgccaggccccatctttatagcattctttatggatttttttcaattcttaaattcttttccttaattaaaagagtttggtctccctattttctaagatgattttaacattgaatttatcatagttatccattttgtttagctttgagtttttaagcaagaaatttgtgtcccaacttatattaataacattaataattcatgtatccttttgttttcttttctttttctttttttttttttttttgagacagggttttactctgacacccaggctacagtgcagtggcaccatcttagctcactgcaacctccgtctcctgggttcaggtgatcctactgactcatcttcccaagtagctgggactacaggcatgtgccaccactcctggctaatttttgtatttttagtagagacagggtttcaccctgttgcccaggctggtctcaaactctggggctcaagcaatccttccaccctggcctctcaaagtgctgggattaccggtatgcaccactgtggccagcctgggtgaccaagagaaactcctctgtcttaaaaatgaataaatgacgttttaaaaaagatacttccactgggattccgggaataaatctagctaatagtttatgacatgtctttgtttttttgtttgtttttgtttttcttttttttgagacagggtctgtgtctgtcatccaggctggagtgcagtggtacaatcacggctcactgcagcttctacctcccaagctcaagtgatcctctcacctcagcctcctgagtagctgggactacaggcatgcaccaacgctctgggataatttttgtgttttttgtacagaggaggtttcgccatgttgtccaggctagtcttgaactcctgggctcaagaaatcctcctgcctcagcctcccgaaatgctgggattacaggcctgagctactgctcctggctgacatgtctttgatagcacaaaaaattaaggttttttttcctgattataattaattgtccaaaaaacaataatctaacctgtgagtaagatgtgcaaaattcctggtccaaaagcatcagtgtgcaattgagtcatatatgtggagctcccaacagaaattttctgtgtgtacttacacattgctgaatgtatttttttttccagagatacttagaaaaattttatggccttgagataaacaaacttccagtgacaaaaatgaaatatagtggaaacttaatgaaggaaaaaatccaagaaatgcagcacttcttgggtctgaaagtgaccgggcaactggacacatctaccctggagatgatgcacgcacctcgatgtggagtccccgatgtccatcatttcagggaaatgccaggggggcccgtatggaggaaacattatatcacctacaggtaacgttggtgtatgtcgccctgtatttttctactttcccataggtctgacttctaacctgaaccagttagacagccctaaatctggaagtagataaagtaacctccctccattgttaatgctatctctgctaaaattcattttctctagaaggaagaattgttcactcaggggagaattgtttggcttgccagtccaaagcagattttaaaagctgcaaataggccaggcacggtggctcacgcctgtaatcccagcactttgggaggccaaggtgggtggatcacgaggtcaggagatggagaccatcctggccaacatggtgaaacctcgtctttactaaacacacaaaaaaattagctgggcgtggtggcgcgcacctgtagtcccagctactcaggaggctgaggcaggagaatggcgtgaacccaggaggcggagcttgcagtgagccgagatcgtgccactgcactccagcctaagtaacaaagtgagactccatctcaaaaaaaaagaaaaaaaaatctgcaaataaaaggagaatgaagctaaatttactataaataagataatttactataaagaagagacagggaagtttatagagtagtcaagatggataaatgcagaacctgggagcaggagcaaaaagcataaccttctatgaaagcaaatccttcacagtgatgatctgtgagttttaaataggaagaaattaagttagattttggttaaggaggaggctgtccaagaaaaaatgtttctgtagttaatgaagcaagttttaaaatctggactcttgatttatgaaatgatccattttccaattgtgctagcaaaaatgaagtattgtggtaagacaaaataacactgccttccatacatttttctctctctttttgctgataaagaatcaataattacacacctgacatgaaccgtgaggatgttgactacgcaatccggaaagctttccaagtatggagtaatgttacccccttgaaattcagcaagattaacacaggcatggctgacattttggtggtttttgcccgtggaggtagggaacttgtatttcatctttgtcatttggcatgatctataggatgtatagaaggactaattttctttccttttccaaaagctcatggagacttccatgcttttgatggcaaaggtggaatcctagcccatgcttttggacctggatctggcattggaggggatgcacatttcgatgaggacgaattctggactacacattcaggaggtgggcaaaacaaacaaacaaacaaacaaaaaactaagcaaacaggaaaggaaaacaacaaaaaccctaacaaattcaaaattctggtttcgagagactacattctgacaaatgattatatgatggaaaatcttgttctgattataattttgcctctaaatcaaatttaacacttcgtatgggtctcaattttactctctgtaaattgaggatattaaactagatcatcttgaagatcagctctaacaatctatgaggatgctatgaactatgagctagttcattagcataagctcagaggaaccttaagaagcataatatgaaaaggtaaaagctgttaattaggtggtaagtttttttttttgagacaaggtcttgctctgtcacttaggctggcatcacgtatcatgatgctaacttactacagcccggaactcctgtgctcaagcaaacctcccacttcaacctccctagtagctaggaccacaggtgtgcgctacccacccggctaattttttaattttttatagggacaggatcttgctatgttgcctcgagatcctcctgtcccagcctcccaaagtgttaagattgcaggcagcctaggtgataagtttttgacctagtgaaatccataagctcaaaagcaaacacatactaattctgtgtgtgccaacaattagaggataagatggtcatctgtatgattcataatatgctgacaatttcttagattcatagtgagcaagaaagaaaaagttacagagaatctaagcatccctatagagaaacacaagattatacagccatgtactttcatgtggtcttgggataaaaatttcagaatgcccaactgaacatttaataccttgggggcatttacataaggactgtaacttaccatcctcctcagatagttgacatggggttaattaaactcccctgttatttagaggaatcactagcatgggaaaaccctaaccatcatgacagaagccttcttaatttttctattggaaattttagattctatgactccctcatgtggaaagtaaatgaggagaaagtcatcaataatattctctactcagcatcctcctctctagctgatattgcacaagttggatggcaatacttttataaatactatgtccaccagaaagactatttgttttagtctaacacatagcctaaggcttataaagtttttgaagagaagaggacttttgtattgtcaaaagacagatcatgtaggattaggtagttgctaaactgcaaatcctcagccagacatgttatatgtgcctaaattttatccaaggttatttgggggattgtaattccttcatctaaaatgggatatgtgtgctagttagcctcaaaaaaatgttttggaattctaatagaccttagaagagtaatttaatacagctttctgtaggtagaggaaattaagacaaagagaaggttagtggctagtttgtggaaaagctgggccagaatatgcattcctacctctcaacccagtattttctatctgtccatattgccttattttttaattggattgattcaatgctttcaaaaagtgaagttatttatgacaattataacttaaaatgcttattttcagccgtttttgttgttgttgttgttgctgttatttgctttttttgagatggagtcttgctctgttgcccaggctggagtgcagtggtgcaatctcagctcactgcaaccttcgcctccagggttcaagcaattctcctacttcagcctcctgactaactgggattatattacaggtgctggccaccacgccctgctaattttttttttttttttggcagagacggggtttcaccatgttggccaggctgctctcgaactcctgacctcaggtgatccgcctgccttggtctcccaaagtgctgggattataggtgtgagtcaccgcatccagcctcagcctgttttcttttacccagtaaatcaaataaacaaataggtcaatgtttgctgacctattctattatggtattgggtgatgaggttacttgagtacagagatgaaaagtacacaattcaacccctgagcacgcaatctagtgagaaacagaatacaaacataaacccattatttccagatgaggatcagtggtggtggctcataggcatattataggaattgagaatagttcaggtttaggataaattgtaaaaactttgcttactcttcccagtcttgctgggaaggttactggacccatgatacagaaaattcttgatttgtgtctagacactccccgagagaggtgtagactctttgcacttgggtatgggagagtattccaaggccaggctctgcagctaagtgacgtgtgactctgggcaagtcagttcttctgaactacaattttgtcatagaaaaagacaaaaatgaaggcattggactaggggacaagaatgttagtcaggaattttcaaatattctgcaaattgagcaatttgagagaagggacatacccctctctcttctcttacctacaaaggtgcattctctaggacataacacaaaaatgaacaaggatttcttatgggactcaaaagaaaagccagatataaagccagactattttaatcatagataaaaatggtgaagtctgaatggggctcaaaaaaaagacagaaaacactgtaacttggtagtccaaatatgtctaaattataagtatagactcttttaagaattatttattttttctcttttttgttttttatattctttccttgagtcatatagactctttaattttatttagaatcatgtgtagtaaaagcagaaacattaatcttggctcaagcacttaatttgatttaatcttataaatactgtttcctcatctgtaatggagagcacagtggcttcctttcatttgtatgagaattagacataatgtgttacatttctcagtgactcacagtacctgaaacttaatgatagccttatatttgggcttacgaaaagacgattgctaaagacatttttttctatatctagtaaagcttcatgaagactaaaaatagaattgagtcatgagagttgagaattatttagaagcaatgaaaactgttgaacgcagctgtgagttattctaggaatttttacaacagaatatatttcatttgtctactagtacagaggtccctaaccctaggcaattttgtccccaaggagatatctgacaatgtctggagacattttttggttgtcaaaactaaaaaggatttgctacttgcatttaggggtaaaacctgagatttctaaacaactataatgcacagaacagcccagactactgaactgtaatgtcagaagtgctgagattgagaaacccaactcaaaagggtaaagaaataagtaaaagattctcaaatctttctttttcactgtgtcagatattgtgttcttgtccaagatgataatgcatttcacagctgtcttttggttggtttcttcttaggcaccacttgttcctcactgctgttcacgagattggccattccttaggtcttggccattctagtgatccaaaggccgtaatgttccccacctacaaatatgttgacatcaacacatttcgcctctctgctgatgacatacgtggcattcagtccctgtatggtgagttgaattctttatcattttgccatataaagatactcgcttttatgaatagtctaacaatatctatatttggataaaacgttaatatctgtctttttttaagccgcataagaaccctgtgtggcaggtgacacaggtattatcttcattatacagatgaggacaagagacctagtatgttaacgtcagagccagaggcagaaccagaggcctcaagtctggtgttctttctatccaagataccattgccttactgatgaaggcccacacattaaacaatctattataactggaaaaggaaagtaaagataatcagattttcttcctccatgatattgcaaccatgtggaaaaaaaaccttactttatacttcctgtgaatgttatagaaagcttaaaatgattttgatgcaatgttcattaagaaaattgagtatttaaaacataactgttcctcctctgaactacaatgcagattttgtttactaatgcttctcgaaatgtattttcaggagacccaaaagagaaccaacgcttgccaaatcctgacaattcagaaccagctctctgtgaccccaatttgagttttgatgctgtcactaccgtgggaaataagatctttttcttcaaagacaggtaggatcattttcatatctaaccaatattaaagtttctgcctttaaattttttttgtcagaaaacagtggaaaataattgaaaatgaagtagatgaaacttgtaagcaggaacttggactcgattctgtaggcagtgaggagatcttaaaggttttgaagcaggagacaggtgtaattacatttgtgttttaactagaaaactggtgtgtaaaaaacgatttgcagtaggaatctgggatggggatttagaagataagaaacagaagccagactattttaatcatagataaaaatggtgaagtctgaaaccaagactgtaaaacagtacctatgcaagagacttgatttcctggttatggaggagagaattccaggataacttatggtttctttcttagaacacagactgaagcagatgttggtggtaaggaggggcagttgggaagactaacatttgtcaagtaggacaaatatttcccatttttgagattataagactgatacacttgaggatagtgacttccttgaggttacaaaactggtgagtgaattgtagggtcgaaccagaagcttagatccctggattccaagctccagggtatttctgtataccagattgcttgttaaagtcattgttattatcaaagagttgattgatatccttttcttgtggatccatgaacatcagacatccatggaacagaatgtgaagacaatggaaagaaatattgggtcttttcacagttccctcccattcacatgccatggttcttgagtctacattgtcttttaacatgtgtcaaatgtctttcatgtcaggttcttctggctgaaggtttctgagagaccaaagaccagtgttaatttaatttcttccttatggccaaccttgccatctggcattgaagctgcttatgaaattgaagccagaaatcaagtttttctttttaaaggtaattctaatctttagttttgccattgagtttacttcaaggaagagaataaattgagaagagactactactttttaatagatatagaccaagaaagcactcttgattttattaatagtggctcgctctgaagtgtaaactaaaatagcctaaatacctaagtaatatatacaacttctgggaaaagtttgtaaactacaaaatagtaatacttgtgaaaaaaaaccatgggaaccatagaaaagagactatgtttaagatcaataagcaataaatattataactgttggaaaggaattatgttgtttatagtaaatcaatattttcttattactcttcctgtataattcaaatttaccctatttctttgtcttcacagatgacaaatactggttaattagcaatttaagaccagagccaaattatcccaagagcatacattcttttggttttcctaactttgtgaaaaaaattgatgcagctgtttttaacccacgtttttataggacctacttctttgtagataaccagtattggaggtgagttttaatggttggtcattcgacccctcagattgtgaaacagatatggaatgaggctttctagaaggcacattttctgcgcaaattcccaaagctccttgaccttccagggagagagattaagagaatataggactgaaatagttattgtcaacttagttctttgtgtttttggtttctgatatatgaaatagtagataatgtgtgtttttttttaaaaaaacactctaaataaaatgtcatcttattaatcatagtggaaacacattggaaaatagtgtcatagatgtacaagaccaagtatttaatctacagtcagtttcgagggttatggatttccagattcctttctgtaatcactggattcaaaagacaaaatgagacaaccatcctctaaatgacaggaggtcaggaggtcctgcaagatcttccttaaaagaaagtcatatggtcaagtgaggataggagctcatttgagtgtctgtctctgttgtctcaattgtctacattttgaaggaggagaggattctgtattccttcttctgagtaagccagtcatttcctagattgcttgcctggttgacatgagacataacatatatgttaagcttacatttacaactgttatttattcttaagcatttaaaacacaatatctaattccaattgaataccggatgcttatgacttgaatttgtccaccagcccttagctctgtttgagaaacaaaacttgattttagcaaataacactttccaaagagctcacaaatgggtgtagtttgctgtagcctgttattatgaacattggcatttcaactctgaacagtgtttctgtttagttttccactcctacttggcccaggatttttccctgaaaggccattgagagagtgctaagcaagccataaatacttagagaaccaaattgataaacacaagataacagttagattcagttgccacttggaagtctagagagacacaaagctcttttcacttgctggtaaaagagaatttaagagagaaaccaggatatgaccatacagcctggaaacaaaagtgtttattttcaatttctctcaaacgtgtgtataaaaccctttggttccctggctcttagccccttgacctgtttattatcttcttgggggaaatgggtatttttgtctcagtgaatagctttgaaaagaaggcaatgacaggcaactgaagaatcggtcactggggcctatgctgttgccaaatcaccttctatgccagactctataaagcaggaccaagcactagaggaagtattatgggatagtgggaaaaagacttaaccagagtcaggaagcataggtttgagtcctatagggactcagaggaaatcagtgaactgtttaggtccttggtttttttcatcagagcaacttaagtcctttggggaagagctcttcagtagagaaggtgggtttgtggtgcatgtcaggaaagccactttctgattgagttcctgctggttacttctttgctcaggtatgatgaaaggagacagatgatggaccctggttatcccaaactgattaccaagaacttccaaggaatcgggcctaaaattgatgcagtcttctactctaaaaacagtaagtagatgaggaaaccatgaagatactggaaataacatttcaaagctataaatcctctaagattagagaatagggctccaaattggaaagggacaggtttctgcagttccccatagggccgcaaggaaaaactcacactgtacgtggctctgaataggagagttagaatgagcaggggctggtggcacaagtggtatattcccagggttgtctagcaggcagagggaatgtgattgttcctatttctcatgtacctgagtctctggaatttccttttaccacatcagccacacagtatgtgcaagcgagcacatggcagccaagactcaggcagtctggagtctcaccctttcctacaccttgcactcttgacctttcctatagtcccttctgccctgataggccctcatggactggggactgcgggtgggttaagaaaagcttgagtttgtatcgtatgtcttcaaacaagaccagcctaagcaactgttcatggggtcaagattttttgtttgtattccctcccctccccagtgttgtttcctccatcaaagcccctgtgtgccctagctgggtccaatatcctgtttcatgagtcctccacttggagtatgactggctgttggtagacgttttgggggtatgataccaagggccctcaacttttatgtcctcaaatcacatctcatcttattttttatttgttattttttgatgaaaaaatagagatgaggtcttgtgatgatggccaggctgatctcaaactcctggcctcaagcagtcttcccatctcagcctctcaaagtgtgtagttaagggcatgaaccacagcccataggtcatctattctagataatctatgagaagagatttgtgttgttgttgttgttgtaaagaaatacagggagggaattaaactatttaatttgttttcattttcagaatactactatttcttccaaggatctaaccaatttgaatatgacttcctactccaacgtatcaccaaaacactgaaaagcaatagctggtttggttgttagaaatggtgtaattaatggtttttgttagttcacttcagcttaataagtatttattgcatatttgctatgtcctcagtgtaccactacttagagatatgtatcataaaaataaaatctgtaaaccataggtaatgattatataaaatacataatatttttcaattttgaaaactctaattgtccattcttgcttgactctactattaagtttgaaaatagttaccttcaaaggccaagagaattctatttgaagcatgctctgtaagttgcttcctaacatccttggactgagaaattatacttacttctggcataactaaaattaagtatatatattttggctcaaataaaattgaaaaaaaaa

SEQ ID NO: 461 - DNA, 158431 bp, Homo sapiens
acatgccttctggtttgactggagtaatcctggtagaatccacgtagctctgaagagtgggtattctgaagagcgcaggttctttgaggggatgatacatgttcagttgctctgttgggagtgggaaccatgaatcacagtggtagtggcaatgttaagtggaaggtccagggaaaaaccaagagttctctgtgctgctcattgaaaatagggaggcttagagatctgggtatcattttggatacttttggtatagtcattttatatacttttggtattgggtatagcaaatcttggctaggtaaagaggggctggattttgggggaacttgaatggcagactcagacatttattctgtgaatagactgggcgcagtggtttgcacctgtaatctcagcacttcagggagggagagaaaggagggttgcttgaggccaggagtttgagactagccttgacaacatagcaagaccctatctctacaaaaaattaaaaattagccaggcatggtggtgtgtgcctgtagtagtcccagcttgaggctgaggcgggaggatcgcttgagcccaggagctcgaggttacagtgatctgtgattgtgccactgcactccagactgagcagcaggatgagaccctatctcttaaaaaactattacatgaataatggggagtcatcatgtgttttgtaaatagggagtaatttaacacaaggataattggctgaattaatctggcagtaatgtttagggttcaacagaggcagacaaactaaataataggatgctgcagcaagtcatgcatgagtaggtgggattctgcatcatggtggtgacagaaataacagattaaagggacattcaaagaaagaaacaaataagatttttaaaaaaactaatcgggcatggaaaatgacagagaatgaaaaagcagaatgacagagatcgtcttagaaagaccatgatcattatatgacgagttaatgggtgtagcacaccaacactgcacatgtataaatatgtaacaaacctgcacgttgtgcacatttaccctagaacttaaagtataataaaaaaaaaaaaagaaagactatggtcattatagctgacgaggaacagatacttactgtgaatagttatcagtggaggagcaaaagagtatgtaaaaacaaccaggaagacacagtatcgaagaaactaaaggaacagtttcaagtagtgttgtccagttagcagcatcatagattaggggggctgtagatcagagactggtgggtgtcaagacaaaagcaaattgagcaacagtttttattttgggattcacaggttattggtgactttgaaaagtgcaatttgagtagaatgatcagatcaaggtaaggtggggggtaaaggagtgaacaatgctgagatggtggagataacaagtatggacaatttgccactgaagtttcacaacaaaaggaggatgataaataataatgaatagtggtaagcttacagactatcaacattgtagcttagctaagaaatgttccctgtgcagacaaatagtagaaaattataagatctaggggcggtggtggggaatttcaaccatatgcctgcctccgtcctgtgggtaaggcacctgtgaatatgtttccatgtgctcatggtttcagattttccacctttatagctccaaacacacagctttaaggaggtctgttgaacctgcatgttcccagaagttctgttggggaagaggctggggaaggcaggagatggaggaacagaatttctgtactcctgctggtgcgtggaggtatcttttgagggtttctctttttttttttttttcaactttacagtataactttaaatctagccaaggctggaaatgggtctcctgtcccaaagttcagatcattcctgcagtatccttctgttagttggggagtcgcagaggaataaaaggaagatagtatcactatttaggtcccactgtccactaaaaccgcttcttttgccaattgctattgagaatgggctgagaagacactgctcaaagtgaccacattgtatttgcctgaaaaactgaagccatcttgatgggaacctaattctgcatggagggaaacagcaagcagcacagttaccgctgctgggcagaaatcttctgagtaattcagctgtattttctctgttacaatctgttctcaagtgccaggtcacaggcatcatgacttgcagaagtgaacgaatcttggagatgtggttctaacacccaacctttctttttttgagacagagtttcgctcttgttgcccaggctgctgtgcaatggcatgatctcggctcaccgcaacccctgcctcccgggttcaagcaactctcctgcctcagcctcctgagtagctgggattacaggcatgtgccaccacgcccagctaatttttttttttttgagacagcatcttgctctgtcaccaggctggagtgcagtggcgtgatctcggctcactgcaacgtccacctcctgggttcaagcgattctcttgcctcagcctcctgagcagctgggactacagttgcgtgccaccatgcccagctaatttttgtatttttagtagagacgggttttcaccatgttggccaggatggtctcgatctcctgacctcatgatctgcccacctcagcctcccaaagtgctggattacgggcatgagccactgtgcctggcctaattttgtatttttagtagagacgaggtttctccatgttggtcaggctggtctcgaactctcaacctcaggtgatccgcccgcctcggcctcccaaagtgttgggattacaggcgtgagccaccgcacccggccaacacccagcctttctgactgttagactgaaaatttgaaatgcaggcaactttctcttagcacttgttttttagggtgaccccacagatcgcaggagctgtgaaacatcctgtacacaactgtagcaaatggaaaaagtcaaagaagtttacctttgactatacatgctctgagttcactgaggatcgcattgctcttccttctccttcaaaacatgcattgcctcattcttgctgattttgttcctgtatttgaaaaagtgcccagatacattcattcttgaattacaaattgttaacatttcaggtgttctgtaaagttatccctgaggatatgagaaaggaaattaatagagatgggtgttgaactccaaatatgagtgttcaacagaacaagttgtaaattgctttctcatcagcaaatgggtttccatgaagctacttcattttagatgacacctcgctatattaaatatgtttagagcttcatcaggcctattttgtctaaatgagaagaaactgaagaaaggaaaaccagatttcagacttgaaaccatacatagacatacagtcaaagctcattatttatggattccatatttgtcaatttgcccacttgttaaaatttatttgtaataattggtaaaaatttatttgctttcacttcttttgcatatatgcccagaagtggaattgctagataatgtggtcattttattttaaatgtttttagagacaccatactgtttttttgtgtccactgtacgttttacattcctaccaacagggtacaagaagggcttcaatttttctgcatcctcaccaacacttgttattttctgtatctttgataatggccatcctagtaggtgtgaggtggtatctcatcgtacttttgatttgtatttccctaatggttgagcaacttgtcatgcactaatttggaattgatgtatcttctttggagaaatatttatgcaaatcctttgtccattaaataaattgggttgtttgttactgagttgtaggagtcacactagaatggttcaaactaaaatctggcaacaccatttttttaaatacatgcttctttttttgatttttaaatttttaatggatacataatagttgtacatatttatggggtacatgggatattttgatacaagcatataatgtgtaatgatcaaatcagggtaactggcacatccatcacctcagacctttatcagttctttgtgttgggagcatttcaaatcctgtcctccagctattttgatatatacaataaatattgttaactaagttgccctattatgctactgaacacttattctatctaactgtatttttgtacccattaatcaactcctcgtcatccccctctccctgcttcccttcttagcctctggtaactatcattctactctgtaggaacatgagatcaattttttaaatcccacatgtaagtgagaatgtgatatttgcctctctgtttctggcatatttcacttaacctaatgtctagttccatccatgttgctgcaaatgacaggatttcattttttatggctaaataatattccattgtgtgtatatataacacatattctttatgcattcatctgttgatggacacttaggttaatgctgtatcttggctattgtgtgaatagtgcttcaataaacatgggagtacagtgtattagtctgttttcacactgatataaagaactacctgagactaggtaatttatgaagaaaagaggtttaatagactcacagtttcacaggcttaacaggaagcatgattgggaggcctcaaaaaatttacaatcatgacagaaggtgaaggggaagcaaggcatgtgttacatggtggcaagagagaaagagtgaggcgggaaagtgccacacttttaaactatcagatcttgtgagaattcactcactatcacgagaacagcatgggggaaatccatccccatgatccagtcacctctcaccaggcccctcccctgacaggtggggattacaatttaacatgagatttgggtggggacacagagccaaaccataacatacagatatctgtttgatacactgatgttcttttggatatattaacatatgcagcagtgagattgctggatcatatggtagttctcttcttagttttttgaggaacctccatactgttgtccatagtggttgtactaatttacattcccaccaacagtgtacaaacattctcctttctctgcatccttgccagcatatgttacttcctatctttttgttaatagcaattttaactggtgtgagataatatcttattgtggtttttgatttgcatttccctaatgattaatatacctacttgccacttggatgtcttttgccattttaattcagtttttttagcagaagttctgttttttaattttttaaaattttttaaatttttgtgggtatgtagttatgaattacatgagatattttgcttcaggcatgcaatacataataatcacatcagggtacacacacagggtatcctcttttgccatttttaaatcaaattatttgtttttagctgttgagttgttagagttctttatatattctggttattaatccctcgtcagatggatagtttgcaaatgttttctcacattctgttggttttctcttcgtttgttgttttcctcgctatgcagaagctttttagctcaatgtaatcccaattgttaatttttgctttggttgcctgtgcctttgaggtcttactcaataactttgtccaggccaatgtcctgaagcatttccccagtgttttcttgtagtagtttcatagattcaggtcttacatttaatctttaattcatttttatttaatgtttgtatatggtgagatatagaggtctggttttagtctgtatatggatatccagtgttcccagcatcatttattgaagagactgttttctccccagtgtgtgttcttggtgcctttgttgaaaattattttggttataaaagtgtgaattcatttctgggttgtctattctgttccattggtctatgtgtccatttttaaaccagtaccatgctgttttagatattatagctttgtagtatattttgaaataaggtagtgtgatgactccagctttgttccttttgcttagttttctttagctattcagggtcttttgtggttccatgcgaattttagcattgcattttctatttctctgaagaatgtcattggcattttgatagggattccattgaatctatagatcacgttaagtagtatgggcatttaacaatattaattctttcaaactatgagcatggaatatccttccaatttctttttttttttttttgagatggagacttgctctgtcgtccagactggagtgcagtggtgcaatctctgctgactgcaagctccacctcccaggttcacaccattctcccgcctcagcctcccgagtagctgggactacaggcacccactaccacgcccggctaatttttttgtttttgtatttttggtagagatggggtttcactgtgttagccaggatggtctcgatctcctgaccttgtgatccacctgccttggcctcccaaagtgctggtattacaggcatgagccaccaagcctggagcaatttctttcattggtgttttatagttttcattgtagagatcttttaattctttggttaaatttattcctaggtattctttttgtaggttttgtaaatgagattactttctagatttcttttccagattgttaactgttggcatatagaaatactactgatttttgtatgttaattttgtattctgcaaccttactgaatttatcagttctaacagttttttttagagcctttagatttttctaaatgtaagataatgtcatctgcaaacaagtacaatttgacttctttctttgcaatttggacgccctttatttccttttcttgtctaattgctctatctaggacttccagtactatgttgaataaaagtggtgaaactgggcatccctgtcttgttctagagcttagaagaaaggctttcaatttcccctgttcagtgtgatgctgtcttttggtttggttttgtcatacacggactttattgtcttgaggtatgttccttttatacccagtttcttgaggatttttatcataaagcaatgttgaatttcattgaatgctttttaggaggcatctattgaaatcatcatatagtttttgtcttttattctgttaatgtgatgtgttgatttgtgtatgttgaaccatttttgcattcctggggtgaatcccacctgatcatggtaaatgatcatttcaatgggatgttgactgtggtttgatggtattttgttgaggatttttgcatcttttttatgtctttggttttggtatgagggtaatgatgcccttgtaaaataagtgtggaagtattcccttctttccaatttgttgcaacagtttgagtagaattggtattagtttttctttaaatgcttggtagaattcagcagtgaagccatcaggttctgggctttccctaatgagagactttttattgctacttcaatcttattactttttatttgtctgttcagattctctatttgttcaatcttggtaggttgcatggatgtaggagagtaaccatttcatctaggttttctaatttattgttgtacaattgttcataatagtctctaatgagcctttttatttccatggtacctgttgtaatgccttcttttctgtctctgattttatttatttgagtcttctctccttgtttcttagcttaggtaaagatttgtcaaatttttttatcttttaaaaaagccaactttttattttgttaatctttggtggtttattgtctcaatgttatttgtttatgctctaatctttattatttctctccatctactaattttgggtttggttttttcttgcttttctagttctgtaaggtgccaatgccaaatgttgatgagattgtgtaaactagaactctcatatattactgatgggagtgcaaaatgatacaaccgcttctgaaaaatgtttcacagttccttacaaagttaaaccgaggcagaatgttgagctcatttctttgcatttcccttctctctgggatcgcctcagcctgtaagttggacaaaaggtccgttcactttatgttcctctaaatagccactttctgctaggtttctcagtagttttgccctgtgcctcctaaaaaaccagtgggtgtctcaaaaggaaaagtggtacaaaatgtctgacttgcctcaattttatttcccttctcccttaagatcgtggcctttcatgccctggctgtcttggtagtcctccgaagcctttaaacagattttaaaaataacttttgtccagctgttctagttgtattcaatgagaaattggtctgctagaagctagtccctcatagccagaactgagaattcttctctaagcccatacaagccaacccccatcagggcttgacacccttgtccatcctgagatttggagtgacttcatcttgtattgttgccccagaatgttgtcttgtttcacagagctttgcaaagggcctgtgttaatctgaggttgtttcttggacattttctacctccattccagctaaaatctacattcattacatcctggttttcattcaggcagctttagaagggattgtgcactctcttcccacaggaagctcattaacctagttaattctgtgatttgtattagagtaaaaaggtgccttcactaggaaataacctaatgattactgccttcacgtctgctaaattggatttgtgtcttctagcttcttgaattttagttaaactacatgaagaatatgtgtgcaatcctatgtgtaagcatatggaagtctcagtattcagggatgtgattcttttagtcctctcaaaagggggaaagttaataataaatgcttttaaagctctatagtaaattttggctaaacagtgcaaatcgaatgttggtaaacctaattggaagactcatggagggggaagaaacctcttttgtgctgacttctgccaaggattggaaaagagattcattttaaaggctccccaagagaggattgaagacataaagttcttaatgttttttttttttctcaacagcttacaagagcagtgattcccaggctttctcagcaatgtaccccatttcctgacatttacagctgaaggtgaagtttcccttttgcaaggagaaaattttggtggagaattatccaacaagaaaaagacctgtggctattaagataggtaagtcttttatgtagagtatggagagggaagtagcttatggaaaaaatgctaaggaatgtttcatttgttgtaagtgggattctaggactagtatgtatttcactgaatatcaggacaagtgatccttgtcatcagtgatctaatcctagattgcattcccaactcttctacttaccagctgagtcaacttggacaagtgacttaaattctctgaaccccagttatttcatctataaaagaaagtttcatgggaaaaggttttgtaaatgggagaggacatgtaatacaaaaatgtggttatcacccgggtgcagtggcttgcacctgtaatcccagcactttaggaagctgaggcgggcggatcacttgaggtcaggagttcgagaccaggctggctgacatgctgaaacccatctctactaaaaatacaaaagtcagtcaggtgtggtggtgggcacctgtagtcccagctactcaggaggctgaggcaggagaatcgcttgaactcaggaggcagaagttgcagtgagccaagattgtgccactgcactccagcccgggcaatagagcgagactctgtctcaaaaaaaaaaaatggttatcattgttcattgttttcttgctattagaaaattcaatggaaacagtggccttgtgtctcatggtgcttttgagccatagagcttggtcctgtgagtttggggaactttgtcttctgaatgctgggagtgggaggcattcctcatctgcctcccctgtaaaaataacatcatatcagccgggcacgttggctcacgtctgtaatcccagcactttgggaggccgaggtgggcgaatcacaaggtcaggagttcaagaccagcctggccaacacggtgaaaccccatctctactaaaaacacaaaaacagctgggcgtgatggcgggcgcctgtaatcccagctacttgggaggctgaggcaggagaatcgcctgaacccgggagggagaggttgcagtgagccgagatctcactgctgcactccagcctgggtgacagtgcaagactccatctcaaaataaataaataaataaataaataaataaataaataaataaatagatagatagcatcatatcattattttggctgcagatatccgccacttactttttgtaagttgtgggaagagatggaagttaaatatgagatcaaaggaaataaaataacaactacctatcaacagtgacctattacgataactacctgttaataaaaactactcattagttgtcttagttgctatgataagcattgtattgactatttggttactttatttcattaaattcacataccaagctttgtaagatgcatgttacctctaccgtgagagttctcctggattgtcagcaccccttagggagtcacttaaagaagataaaagtcagtctgatttcttgtaatttgagaggttttattagatggtgggagtttgaagcttttaatttttttctaattttttacagtgagcacatacggcttctgtaataattaaagtggtcatttgaaaatgaatgatggatttttagaaaattttttcttaagcacctacagtgaactaggtactatttttgatgtttgttcacatcagtgcatggagcttaatgttgtagcatggatggagatgataaataatgcatataataaacacgttactaggatattagaatccactgagaacatggagaaaagaaaaagtaaagtagagcaagagaagttggttagtggggtgggagtgcaaattgcagaaggggcctcatcgaggaaaggcaggaagtcaggagttggccctgggcctgttccaggtagaggaagcagtgggtgtaaaggccctaaggagggaatgcagctggggtgttccagccacagccaggagccagtcagtgctggagcagagtgagtgggagggttgatccacaggaaatgatgacacttcttggtttagatgcataagataggttgccttattttcttctgcagttaaagaacacgtactccctccacccagcacacacacaaaatacatacattaggcctctagcaccatattaatttgctaggactgccataagaaattaggcaaacagagcttaaaacaacagaagtgtattgtttcacaggtctgtaggctagaagtccaaaatcaagttagggccatgctccctgtgagacacatcaaagggaaaccttccttggctcttcctggcttctggtggttgttggcaatcctcggcgttcctgggctgcagctgcatccctccagtctccgcctctgtcatcacctgtcattctcactgtgtgtctgtgtctgcacatggctgtcttccctcttcttataaggacaccagatatattggactaaggacccaccctacttcaatgtgacctcatcttaaactaattacatctgcaacagccctacttccaaataaggtcaaattcagtggtactgcagggtcaggacttcagcttactttttgggggatacaattcaaaccatcacagctaccttaaataataagtaatagatattactattcccatcttacaagtagagaaacaggctcagaaaactcaaataacttgcccaagatcagagtcagtaatcaaaacagccaggtgggcttgacacgatggctcacacctgtaatcccagcactttgggaggctgaggcaggcgaatcacttgagccgaagagttcgaaaccagcctgggcaacgtggcaaaatcctgtctctataaaaatcacagaaaattagctgtgtgcctgtgatcccagctacccaaaaggctgaggtgggaggatcactggagcaggggaggttgaagctgcagtgagctgagattttaccactgcaccccagcctgggtgacagagtgagacccagtttgtctcaaaaacgagcaaacaaaaaaagcagaacaacaactccaaaacacacaacaacaaagaaacaaaaaaaaaaaaccagccaggtctaggccaggcatgtcctagctatctgcagtcccagccactcgggaggctgaggtgggaggatcgtcagtgtgatttcaccatgctgcttatgtgctactagggccgtgatatcaggctggagctgacaagacactgccctgacacagggtaggagttgcacacatacgacgttgcagtccctgtccaaattgcttaactccaagagagctcacaactgatgttctacctcagctttcctatcagaagccattcctccttctagcatgacagacttaggaaatagatgcttttttcctcttttaggaagttttccagggaagtaatactgtaattttaaaaacatatgtagaacattttgtgatggaattaaatgattttttctcatacaacgtagaaaaaaaagatatgtgtgtgtgtgtgtgtgtgtgtgtgtgtgtgtgtgtgtatggctccctgattccgttggtttcttgcaatagaattaggggattttggctgggtgcggtggctcatgcctgtaatctcagtactttgggaggccaaggagggtggatcacctgaggttgggagtttgagaccagcctgatgaacatggagaaaccccgtctctactaaaaatacaaaaattagccgggcatggtggcgcatgcctgtaatcccagctactccggaggctgaggcaggagaattgcttgaacctgggaagcggaggttgcggtgagccaagattgcgccgttgcactccagcctgggctacaagagtgaaactccgtctcaaaaaataaaataaaataaaataaaataaaataaaataaaataaaataaaataaaaagaattaggggattttgaaagccttgaatatattttggcttttcattatgtttaaagattccctctaaacgtgcagccgtctagccatttgtgttccttggcctgcagctgcatcactgcagtcaactctagaaccttattttaggcatggtcttgaggactgcacgcgagaaaaggaaggctacaccaaaacagagctgagcacttttccatgcctgcacaggcacgtggtgtagagggacatcctgagttaggctgaaggtagaagaagcgaccactggcggtcatgctagagaaatgtctaaatcctggtcaaggaaagcaagtgctcaaagctaagtgttgtgttaagtctgggaggtgagacaaagccatagtaggaagaccatacctgacctcaaaccaggaagattcacgaactagagcatgaggcaaggtgcgtggttcggaggttggttggtgagggcttcaggggcctgtttgtctttggctctgactgtgccatgtggaagtgaaaggggaaggtgtcatgtgagcctgggcagcccgcatctgcttttcctcagtttgcattcaaccatgtttttgtttacatagccttgtagtttcctttcaaggtcctttttttaacctctgttctaaatgtgtttttattccctctaagcttttgtgcttctctttgcgcttaacagcaaattgctttggatcttcatcttagtataaagaaggggaaaaaaagctgcctctcatctaaagatcctcctgctctctgttaacatttctttcttttttttcccccaagacagagtcttgatctgtcgcccaggctggagtgcagtggcgcgatctcagctcacggcaacccccgcctcccaggttcaagtgattctcatgcctcagcctcccgagtagctgggactacaggcatgtgccaccatgcccagttaatttttgtacttttagtagagatggggtttcaccatgttggccagattggtctcaaattcctggcctcaggtgatccacccacctcagcctcccaaagtgctgggtttataggcgtgagccaccacgcctggccaacatttattttctttgtcctggaagtgtgtggaaatagcaaggtcatcatattctagtgaattaaaacgacacttagtctttgtctgatgttactgccaccaaatgcgactccctgggacatacctccatcacacaggtctggctagggttctagagtctagttaacacaggtctcctcgattgccttttggttatctagctggcacttcgtagctgcagataaatagttgctgctcttgctactcctgcagctgttgattgtgaagttagactacatgggccaggcaaatctggggtcattggtttgaattacttctctgctaccaacattcaggtaagtactcggcttttcacaggaaagccccaaagatgactgatactagaatttaaagacttatttaatccctcttatcactatggaatggaaacaagatcctcctttttccccagtagtggtagattgttgagcaatgagaaataattagtcctttaattgtaacacttttaaaaataatcaggtgaaattcacatagcatgaaattaaacattttaaagtgaacaattcagtggcatttagtttatttattttatttttattttttgagacggagtcttgctcagtcgcccaggctggagtgcagtggcgcgatctcagctcactggaagctccgcctcctgggttcacgccattctcctgcctcagcctcccgagtagctgcgaccacaggcgcccaccaccacgcccggctaatttttttatatttttagtagagacagggtttcactgtgttagccaggatggtctcgatctcctgacctcgtgatctgcccacctcggcctcccaaagtgctgggattacaggcgtgagccagcgcacccggccttcagtggcatttagtatattcagactgttttgcacccgtcacctctgtctctttccaaaacattttcatcaccccaaaataaaacactgtacccattaagcagttactccccatttccccctcccctcagccactggcagccaccaatctttctgtctctatgaatttaccgtttctagatactttatataaatcaaattgtacaatctgtgatgttttgtgactggtaaaatgcttaattgttattaccaatcatttattttttcaatcttctcctgtcattttgctgggagagctggggtgctatgggaatattatctttctaattaggacctccaaaaagaaaaccccttcagaacacctgcttcgctttagttgctggtggacttctcttcatgagacagatagcagtttagaatttagttacttaatctgcaaggatatggagaatttgacttcaccttatttcacttctaccatggggctcaatccccttgggcaccctgtctccccacccctgacttatgtcattgttctagtggtctgaacttcagtttatcccatcatccagatgaacctgtaattgatattttggcattgggatagctggagattatattgctagcctaggcaacaaagcagtctctcccaagggagttaaatgatactagccgttgaagatgaaaatttgaggaatactttacactgtcatctcttggggaggctgatcacacccatccctcctttcttctgtccttggtgaaatagaggctgctccgggagggctctgggatgcagacagcagcgacttgaaatgagattcctctctccatctgccagacgtaacccaagatgagttgcacagatgaagctggcagagaaatgggaaactggatggcaaatgaggttctgagggaagcaaaattctagctaaatccttttgtgatggtagaagagctcttggtctaataatacagaacttaagaattaggttggtgtagtgctagtggttcagcaaatgcaacctgtctgcaagtctctttcctgtagacttcctgggagtgtagtgtttatgaacaggtgccatgggaccacagttaaacacaggacaaacgatgacttgtctccatcaaatgtgattgttgtatactgtactatatgctagggaggactgaatcatcaactctatgctctaagatatctcttccaggagcttgaaaacaccaactttagagtaactagtttgacaagaaatagcagagagatggggatggggtaggggcattttgttgattcctttcctcttccctccctccattaacatgcatggaactttttacatgccagacattgtgctgaggggtgaggatatgaagtaagcatactgttcaggagttcatggtcacttcctccttcctgtcacctctctgctgcctcaggttctcctgctcttaacagagaactgtaagtagttgtatcttgtctgtcctccatgataggatgtagcttctaaaagccagggggccaggcacggtggcccatgcttgtaatcccagcactttggtaggccatggcgggaagactgcatgagcccaggagttcaacactagcctgagcaacatagtgagacctcatctctaaccacaaatttttagaaaattagccaggcatgatggcgcacccctgtggtcccagctactcacagggagactgaagtgggaggatggcttgagcttagagggttgagcctgcagtgagccatgatcatgccactgcactccagcctgggcaacagagcaagaccctatccaagaaaaaaaaaaaacaaccagaggctttgaatttgccattgaacctttgaatctagcattgccctagcaaatacttagggcattgcaatgggaattgaattttatcaaattgaattcagatatgtaaacagataaccgggtgaagtgtgattagtgatatttgagagagttttgcacagagtgctggggaacacaaagggcagcataaacaactgccacagggagcctgcgggcctcccagaggtgtcattcgagctgtcttgaaagatgagaaggtgcttgccagacactcgaggggggcacacaatctccgcaggtcacatttatgtcaacgtgtttcttaagagaggcccttggatcctctaaatcctgtcgtttctttcatttatgtaactttagaaaaatgaatgcttgatttaccagcagctttggatcaagcctatagactgtacaggcttctcttccagcaaacgatcatcttagtacttctaggggataaagccaaaaaataccccaaaccaaccaaacaaacaaacaacaacaaaaaagctattgaatttattacccctacaatgtccattttaatcttctttttccttattaaaataaataaatttttttttcttctaaattggcccaagtgaagccaagatttcgttcccatgatcctttcatcatttcaacagacgcacactgaatgcctcccacggataaggcactgctccggactctaggctgacaaagaacaaacagcaagacagtttctgctcccacggagaccaaaaattgacaccaaacagaaagctaaagtcagcatggaaaatgtcctccactactgtttactgttaaagcataatctattgtttacatacatgcacacagattaagtgttaagcttcttgaaataaatgactaattctgaactgcagttcagaggtccaaggaacgatgaagaaggctatcctatgactggaagatttaccaggaaaaggaaaaagcatccttagtctaaacttcactgggcacatattttaagaagcctcagaaagttcattccatgcagaaaaacatcccccaaaaggagcatttaaaacagaacttaaattttatattaaggacttggatatgtatatgtattttcaaaaatcgatatcattttattttcatttctttatggtgaattttgatgttttactgtcatagaactggaaccccaatttctaataattcttattattggtctaataatatagaacttaagaattaggagacaaggacatagtttaccaaggcttgacatgcttggcccatctaggaactacttagtgcttgagttggggagggcctatgatagatgagattgctcaccctgatgctgccaattccaaatgcccatcttctcttctccatctcttctggtcaatagcttagctgtccttaaaggataaattcaacaccaacccagtttattctctgatacctcccgttcctggaaatgagtgttttattttttccctccagactcctacagcagctcatttgtatctgtctagcctctctctctctctctctctctctctatctctctatttctctctctctctctctctctctctctcacacacacacacacacacacacacagagagagagagagagagagagaggggttaacattttccacctggcttataatttttggtaaatatgtcatatcccctactaagtgaccacctccttggagtcagtgctattttccttcatttctttatatctcatttcctccaccctcatctgaatacctatctctaaaccataatgggctgggtgcggtagctcacgcctgtaatcccagtacttcggaaggccgaagcgggtggatcacttaagaatgtgcatcacctaaggagttcgagaccagccttgccaacaaggtgaaaccccatgtctactaaaaatacaaaaattagccagatgtgtggcatgcatctgtagtcccagttactgaggaggatgaggcatgagaattgcttgaacctgggagggagaggttgcagtgagctaagataatgccattacactgtagcctagacaatgggagtaagccactgtctcaaaaaaaaaaaaaccaaaaaccatattggacactcagctgtgattcagtgacttcagtgattgggatttcaggctagataaatatatgcaagaatgtctgcctctcttcccactgccattatccatagcataactccttaaacattatttcctaaagtagttccatggaacagtaattctaaggaatatttaaaaagtatttctttttttaaaaaaattttattattattatactttaagttttagggtacatgtgcacaacctgcaggtttgttacatatgtatacatgtaccatgttggtgtgctgcacccattaactcgtcatttagcattaggtatatctcctaatgctatccctcccccctccccccaccccacaacagtccctggtgtgtgatgttccccttcctgcgtccatgtgttctcattgttcaattcccacctatgagtgagaacatgcggtgtttggttttttgtccttgcaatagtttactgagaatgatggtttccagcttcatccatgcccctacaaaggacatgaactcatcattttttatggctgtatagtattccatggtgaatatgtgccacattttctttttttctttttttaaattttatttattattattactattattattattattatactttaagttttagggtacatgtgcacaatgtgcaggttagttacatatgtatacatgtgccatgctggtgcgctgcacccactaactcatcatctagcattaggtatatctcccaatgctaaccctcccccctccccccaccccacaacagtccccagagtgtgatgttccccttcctgtgtccatgtgttctcattgttcaattcccacctatgagtgagaatatgtggtgtttggttttttgttcttgcgatagtttgctgagaatgatgatttccaatttcatccatgtccctacaaaggacatgaactcatcattttttatggctgcatagtattccatggtgtatatgtgccacattttcttaatccagtctatcattgttggacatttgggttggttccaagtctttgctgttgtgaatagtgcctcaataaacatacatgtgcatgtgtctttatagctgcatgatttatagtcctttgggtatatacccagtaatgggatggctgggtcaaatgctatttctagttgtagatccctgaggaatcgccacactgacttccacaacggttgaactagtttacagtcccatcaacagtgtaaaagtgttcctatttctccagatgtggagaaataaaaagtatttcttgaaaatgtttatggttaaatactttgggcgattctgaattaaacaaagttaaataagattttttcttgcaggatgtattagtctgttctcacatctaggtcatgctgatataagaggtgggcttctatggccttggacagctctgtccctgtagctttgaagggtacagcctcctccctagctgctttcacgggctggcattgagcgtctgcagcttttccaggcacatggtgcaagctgtctgcggatctactattctgggatctggaggacgtggccctcttctcacagctccactaggcagtgccccagtggggattctgtgtggggggaatccaaccccacatttcccttccacattgctctagcagaggtgctccgtgagggctataaaaaataaataaatgcactatcctgagaacagcatgggggaaaccacccccatgatgcaatcacctcctaccagatctctcactagatacatgaggattatgcggattacaattcaagatgagattttcatggggacacagccaaaccatatcatgggacttctcaaattgtaggcattgaggagataaagtgaataatgtatcccaaaattatttgaccagagaaaccttgataattttcctagaatgtgtattcattttctattggcactgtaacaaagtatcataaacatagtggcttaaaacaacacaaattgtagttctagagatcagaagtctcaaatgagtcagcaggcctggctccttctggaggttctaggggagaatccctttccttgtgtttttcagcttctagaggccacctgccttccttggcttgtggccccttcctccctcttcaaaaccagctgcatagcatcttccagtcttcctctctccctccctcccttcctccctccctccctctgttcctccctgtctccctccctctctctctgtgacctctgcttctaccatcacatcctctcctgtgattttgacatttctgcctccctcttataaagacccttgtgaatatactgggcccatccagataatccaggctcatcttccaactgcaacatgcttaacttcagcacatctgatcccctgttcacagttctgggaattggaaagtggacgtctttggagagccattattctacctgccccaggacatgtgttctgcggcagcactgcctgcagtcagggcgtttgcctccattctgagacctgtgtggaacgcccaaccaccatgtacgacgttatttctaagagaaagtgaattctgagttgtgaaacaaaacaaattaacatctgtgatacacagccatggataaactgtgaactctttttatagtaaccttggcagtgataatcaaataaagaccagtaaaggctttcttgtacatgaatctgcttaaactcccttctctcagtcccagatgtagagctcttgttttcacaatacatcagacaaattgtgtgctagaactgcccagaagaattattttctgtcaaaatcaagaccttttaaactgtatataaatatgaacctactgtatattgaagtaagaacaaaactcatcattttgtgataagtttactctttattcaagaaggtatactggccaggcgcattggctcacacctgtaatcccagcactttgggaggccgaggcgggaggatcacctgcggtcaggagttcgagaccagcctggccaacatggcaaaaccccatctctcctaaaaatacaaaaattagccgagcatggtggtgcacacctgtaatcccagctgctagagaggctgaggtggaagagttgtttggacccgggaggcagaagttgcagtgagccaagatcgtgccaatgcactccagcctgagtggcgacagagcaagactccatctcaaaaaaaaaaaaagaaagtatactgtgctgggaattttaacttttaacaatgtcatatccagtgcccaacagatttcagcaacatatatctaatcctgtagttactaaatagggcgtgatacaaatgtgaaatctaatgtgaagacttgtgggaagaggttcatgatgaggaacagtagagaaatgaaatgagttgaaaagaactcagaccaagagatagaaaaaggattaaagtctaatatataccatatcatgaaaattttgttttaaaaataagctttgggaaagaaaaaaaaccataaacattttcccatgcagaaaaaacaaagtactcaaaggaagaccccggattttaagtagaatgagaagaccttttcctgatctgaaaaaaagtgaacttttccctgcaaaacacagacatgaaagatctttgaaattccacatagattcatgatacctgaaattaaatggaatgggataagattgattaatattagcttctcttcacccgaaacagacaacacttaacacaagactatgagttcctccatggcagggacagtgtctgattcatctttgagtgcccagctgattagtccattctcatgctgctaataaagacatacccaagactgggtaatttataaagaaaaagcggtataatggactcacagttccacttggctggggaggcctcacaatcatggtggaagacaaaggaagagcaaagggatgttttacatggcggcaggcaagagagcttgtgcagagtcactcccctgtataaaaccatcagatctcgtgagacttattcattatcatgagaacagcaggggaaaaacctgcccccatgactcacttacctcccactgggtccatggcatgacacgtggggattattacaattcaaggtgaaatttgtaggggggcacacagagccaaaccatgtcaccagcctcgggatacacccaccacataaaatgatcaaagtttgttatcatagcactgcttcatttgggggagactatttaaaagaaattggcaaaagaaagggtgtgtgagaaaagaaaaataaaaagtatggtatactgtagactgttgagattttctgaggacatgtctagagattttcttccttcccaaattgttcctttcactccagcatataattttccctaaaagaaaaatgcagtatgagtagagaataacaaaagtatattgagattcagatgttgatattaagttatgagaatcattcttcaacaaaattgcaaattgctacttgttgtatacccagtgtcatacacataatcaatctcagagactcacttacaaatagtcaaattggtgtatactcagtcaaagaatgcttataggctattatgttttatttagaagatcaggaaaaaagtttctgttttttttttatattccaatactggagcatcctctatcctgcttttgttgaggttgtaaaatcactgaggacagcctatgacttctttttctatcctctgtttgtgtagtttgatattataggctttgtgggcactcagtgagtagttgatgacttggattaaatggaaaaatatagcaataagagcactataaaagtcagcataggtaggcataaaatgcttaggaatacattcttttacatagtgaactatcttgatatattttcctatctctttactagtattccattattagatgggccgattgtaaaggacaaagtcacaggcaagactttgcagtatacagtggcaaaagattctataaaagaaaatgtgtaactgatttcagaccaatccaacagcgggcatttgtaagccaggcccaggaaatttcaatcagaagcaataatgtaccattcacagcaatatgacagtggtaaagaaaaaagtggtgaagcttcaaaatacccaattctctagggtgatgggatttaagtgagcaacatggagcaattaagccaaggaagcagctaagagatacataaaaggaatcaaaattgaataaggaacaactaacgttattgcttatgtttcagaggcaaacaaaatgaaaagtaaaaccatgatctgaatgtttgcatccccccctgaaattcatatgttaagatgctaacccttaaggtgatagtattaggatatacagcctttggggggtgattaggccatgagggcagagcccttatagatgggattaatgtttttatgaaggagacccaagagagttccctcataccttctgccacatgaagacacagcaagaaggcaccatctaagaaccagaaattggaccctcaccagacaccaaatctggagccttggaatttccagcctccagaacaatgagaaatacataaatttctgttgtttataagctacccaatttatggcattttgttatagcagcccaaatggacagggacacctgggacatagagatagttctctggaagtggcttgaccctctccagtagtttgaacctctgggatagatctggccaagtccaaatggagacatgacatttatgtggagactgtgttgtcacagcaataagttcagtaatattaagagagggatggaagtaatacatttaggacttttaaaagtgagatactttttgtaatgttaatagaaagtattgagtttgatcttttctacttgaggttcttcatggataatgtgagtctttaacagattaagactttgggatggaagaggtcaataaaaggatattttgagtttaaggaaatactttatactgtgatgtgcaagtgggaggacacatggctcgcttaatacaaacaaccagcattccagaatacgggagtttccaggcttagaggggagggcagtcagaacatggctataaatatgcggggaaaagatgcgtcaattttcatggcaaaatattgtaagaaatagctgtaaaagctacacaaattccaaaagtcagaagtttaaagtttatggaaatgcagataaatgaatgcttcaaaaatggggttaatcctagaaaaagtgtaagaaagactaaaaaaaaatgacatgaaggtattaagacaatttaggtgattactcatatcaagtaggaaggtgggtctcagagaaacctatgggcatatgctagaaaagcacatggaatttaatttttctaaggaaacaaaacttaaaaatggaaatgtttcataactgacaatacagaagggcaaaaattgactttatataaatgtaaatgtttcagaaattatttttgcctttggtcgtgaatccagaatatatttttctaataaacaacctctgtaagaatgagtatctgtgaaaacttctgcgttattgggaaaataacacaggaacaatagaaaacattatcattatcttgttttatcaacctgttctcttatcctaagaatatgatgagaaattatactgtaataacacaatacaaatctttgggtattagagatcattttgaaatagaatagatgcaatgtgagagggttgtaaatttggcaagatatatttttcttacgcatagtttagggattaagtagtttcattcagtataaacattgcctctgttaatactaaaaaggaaagcgtccctgaaataaccctacctttccttttcaggtaggtaaatttctccatcaggataagagtcaggaatttgatggagactgtaattcagtgaatgtgcagtttttagagagtgtgaaaagcaataataatgtcagtgttttattacaggtatcagtttgtttcctccatctcttccatttttttgcatattatgtgatgaccatgatgaaaggtaatgtactttctttcacagaaatggaggatacaggacagaattgataacagtgggacactccccctgccaatttcataagctttgtgctcatagatttgcatgctgtactttttatttcagtgacgtttaacaaagtcatggccatggaggaaagtaaacttacaaagaatgtccataatgaggctgtgagtgctgatgtttcaggtatggtacaaagtggtgactctgagttgcaaattaaagagacagaagccccctattctatattctttttagtgtagaaaaatacctggatttaccaatagataaattgtacaataacctcatctgtctaggacacatcaaagcacctagatataagcaaaagcaacagctaaagcagcttaaacagatgccatccgtcctctgcactaaactccttttaggctcttgctcaacatctagtgactctgtctttactataattctatcatgcttgattatctaattttctatctcataagcacaagaagcaataaattagaaaggagaagcaattatgaaaatcagactcacctaactaataagacacttgaaatgtgaaaggaagaggcagaaaacttactttaaaataggcaccaaaatactttaaaatagagggccatcgagagggacagactgttgtatatttacttcagtttctcctcaagacatcattttattgcatcaaagcttaatagcaatggccctgaaacgtccagtattccattcagtatatcatctattatagaaaaattcccatcaaaaatgctttaattttcaaaaatgttgatactgatagggataggggatttagttaacatcatccttcaataataccagataaataagaattatcataatatattacattgaataagtcctaaaatatatgtttttattagtagtgatcagaacattttgattttatattcccattttattttttttcttgcaaaattccttccagtaacttacagggaaactgtcgatgattggatttatcacactttcttggcagagattaaaaaaaaaaatgtagctaattcattcttgccagttaatttcctctgtggggtattttttgctctgttttagttaattcagagcagagtttctctccctttaaaaaaaatagtaggttgaaaatagcttatttagatgttacacacttttctctttaggaaagtagaaatcaaagttaggaacaggagagctaggaagacattctcaacatgctaacaccaaacttctctttcttccctccctctttcccccacatcaccaacacacaccctctggccaatatatgattttacagtgtgtttgtgaaagcctggcccagcataattttctgtgactcagacaatgaggcttttaccacatctctagggaggttacaaagtctattagacctctctatttccttgttgtgcagggtgattttttttttttgaaacggagtctcactctgttgccccgctggagtgcagtggtgggatctctgctcactgcaagctcctcctcccgggttcacgccgttctcctgcctcagccatccaagtagctgggactataggcacccgccatcacgcccggctaattttttgtatttttagtagagacggggtttcaccgtgttagccaggatggtctcgatctcctgaccttctgatccgcccgcctcggcctcccaaaatgctggaattacaggcgtgagcacctgcacccagccgggtgatttttttttaatttaagaaatgcatcctatttttcttgattctgtgacttcttcgactacattatttcttatctttcctcattagaaatcactaatttactttgctgtgtgattcatctgcacagttccacagttacttgttggtatttaggagcataaaggagttgatctcttatttaaatcccaaatcagattccattttcagaaatcaaaaacgtacatataaaatggcggtacatccaccatacgtcttaagctatcatttctttgaaatataagaaaatgtgcagcccattgaccatgaacttcaaaaagaagagaggaggtgcactttgtcctgagggaatttgtggtatcataggtctttgaagttggctctagcattcatcagtgaagaagcagacccatagtagtctcattcttacccttgtataatacaacaagatattctacccatctggtcctggagtagggcggaggctagtgtttagtatggaaatattaataggaggagacaaaacaattagaaagtatgcactgaactacttagtacttgtgaagaagtagaagcataaaacccagagaagaggtcttattctctatgtatgagagttttattatctactgtgtgccaggtacgatgctctgagttatttcacaagtaccatttttcttaagagtcagggccatgtccctttattgtctgtaagatggaaagagaaaatgtgtcccttcctcacgctgactgaaagtaaacaaaaaaaagacaatataaatttgtgctcttaaagttgaaggggaaaataaacggtgtagaaaaaataatatatttaaaaataagaccaaagtattaacgttagaggggggactagttttcgttttggtgactcgtgattcagatttcataaaatctgaggagccatcgattatgtagtgttcagtagtcaatttcctgtttttctttcattatttacttcctgacttttttttaccagcttctgggtttttgtttatgttttggtgggctccttttcatctcctctggaatggagtggcattttgggggcagtcaaccctgacagcttggtgcatatacagtaggcaagcccacgagttctttaggagtggtcttgcctgatacatatgtgtcacaggtgttcctcctgagttacactgccgtggaaggatgatcaggggaaaaatagccacttaaatgagatgttgcccacaaaaatactatcaaagtagcaaactgaaagtagaagtgctgaaatgttgtggcaaatattgtataaagcaggccactagctccaatttgcaaatgtttggttatatagatattttcactctaatagcatctttttcatgcttttatcagcaagttaatttaggtgtgagtaacagacttaaagagaacctgcctgggcgcagtggctcatgcctgtaatcccagcactttgggaggccgaggcgggtgaatcacgaggtcaggaattcaagaccagcctgaccaacatggtgaaaccccatctctactaaaaatacaaaaattagcggggtgttgaggcgtgcacctgtaatcccagctacttgagaggctgagacaggagaatcgcttgaacctgagagtcagaggctgcagtgagccaagatggtgccactgcactccagcctaggcaacagagcgaaactccgtctcaaaaaaaaaaaagaaaagaaaaaaaaagaaaaagagaacctaatatttctttatgcccttagtttgaaatctaaccaatattgttctgctttatgcctcactccctaagaacttgtcaagtttccttccagaaagacattttctcttctttgagcttccaaggacagatttcacattactgcaagttaaacttctgacttttaggatcccaagctgggaatagtgtctctttccatagactagacgataacatagaaatattcttttgttgccatttagtttgggaataaaaatggatttcatttttatttttttttcaaaaagtagaaacttcaaatattcagaagtctattattttttaccaaattcattatagcaaaacagtttcacctttatgttggtgatcacactggcttctctttgagcatcctagatgcagtatttgttgtaagttctccctttctttgtggcttagtcaaatagaaagttctaatagaaatgccagtccccagagagctcttgtccgttacactatgctgttgataaatggaattaatttatcctctgtggctttttaattaaactagaacctcatttttttatatgaaacagttcaacacaatgaaatcttcactaatcatcagttgggaacccagaacctgagtcagattagaaagaaaaagaatggacatctctaactatgctttctctctcaatattaacactgttagttctaataagcataatgggagcattgatcactctacacaggggctctgtaagttgccataggatatgagtcacccttcagaagttttttaatatgcgacactcatttcactgatgctttaagaagccactttcaactgtatgctcctcaaatattgccaagaacaagaaattggaaagaggcttgtcctgctatagcttttatatattctactaccttccagaatttttaatataaaattactgagaaattaacaaagaatacactgtagtattttttaatagactttattttttagatcagttttaggctcacagcaaaattaagtagaaagtgtagaaagttcgcctaaaccctctgcccgcacagtgtagtattttactttttaaaattcactttcaaaagtaaaacaaccttattgaaacataatgcacataccataaaattcatcttttaaagttttgtaattccgtgtgttccagtatattcacgcagttgtccaatcatcaccactaatttcagaattaaaatttacttttaaaaaatgaaattaaaatatcattgaggaagtttaaagagaaggagaaaaaatactgatttctaaaactcaccattcaaaccaaactcttgttcttttttggtgcattttatttcagcttttcttaacatccagatatttttatatggactaatgagataattaattatttttaaaatttcttatgagcgtctttggctctgtctctttaaggctactcagagtgtgctgaggtgtgctgtgattttactgctgtgtgtacacatgaaaatattaaagtgaagaaaataacttaatggctatgtatgcggtgatgtgatgctttctaaaataaaccgtctctctttatacttgaactttccagagcactgttaaagctttagacttttggtcattagtagttgatagatatcttttgttcctgcattctagggcatgaaaacagtaaaagcttaaattaattgataaaactggcatgtctttagatgatgctcttcccttaaactgagggcaaacttggcactgggcattgtggagtgatttccagtagcattgatgggaggactgagcagtgagcatgtaagagggaacaacaagagaaagacagtcaatgggaaaatagacggtgggtatgaaatgcatttacggaagtttcacagatggccaaaaaaatacttgaaaagatgcttgggggatgtagatgaaaacagtttttcaagtccatggaaacagttttgaaaattgtttttcaagtccatagaaacaattttgaaaattgataatgttgagtgcaatgaaggattttggcaagtggatacccatgaactatgagagtgtaattcattgaccctattaagaagcttaatagcatgtattaagattcaacatctctagtctcttaattgaggaataccactcttaagaactttgcagaggtaagagcatatattaaaacacatgtacaagttgtttattgaagccatatttgcaatagtaagaagttggagacaagttattgttcagcattaggaaaactcgctaaataaatcaagatacagatggcccttaaaaagtatgtggtacctgtctgtgtactgcttagcgcacatgtgcatgatatatttttatgtgattgagtggaaattacaattttccttttatttacaaaaagtgcatttgtagctaaagctgtttatgtgtagggaaactggggtggaaaatatttcactttttattttatgttttaaaaaaattgactatgagtgatttttacttgttttctttttcctgtttttcaagtgacatccttttttttagacggagtctcgctctgtcacccaggctggagtacagtggcgtgatcttggctcactggcaaccaccacctcccgggttcaagtgattctcttgcctcggcctcccaggtagctgggactacaggagcctgccatcacacccggctaatttttctatttttaatagagatggagttttgtcatgttggccaggctggtctcgaacacctcacctcaggtgatctgcccaccttggcctcccaaagtgctgggattacaggtgtgagccaccgcgcccagcatcagcaacattcttaagctttccaaagatgaaagattacagcaatttgagctaggctaacaaagtattgtcaagtagaagtctttgaggaacaaactttaatgaataggttttaaaaaattctaattagtatatcagcagcttatatagaaaaagatgtttctaaagtatatggaaatagtttttactcagattaaaccttctgaaataacttttattttttctaataaaagtattttatgatcactataaaacattttgaaaagaaataggaatataaagattataataaaaatcacctgattctatcacctagagataatagtaggctaaatcttaagactaacttatggtatcaatttgaaatttaagaagattttattttcactacaagagtttgcttcaccctaatcagtttgtctaattgctgaattagttgaggggatatgtatgatattaatgaaatttcctgaatgattcttatagaaaaatcagctttgataatgcatattgcaataagaattaggacagaaatgctgcaaggtaaaaagagggaaagaagaaggcagtcaagtatgtcaaccagattctaaaacttcacattattaaagaagacagtagacatgtctgtaatctagccagcaagtaaagaaatttccctttgtttctttctcctgctcttttgcactggcagccagccataatcagcaagggtctggccaggtatggaagggaccagcaccgaccacctggagcacttgtgctattttgtacctggagagtaattctcttgagtgactcctcacaatatactcatacttgtaagaggaccagttggattacagagttaaccaccagaaccaaagcttctgacgctgcaggatgacttcagtgttcctcttttcatgatggaccctgggtgctctgccatcatcagtccatagattacaggcaggtctgggcagtagcttcttgaggttccttccttccttcattccactgtccagagttgcatattgaactgtgcttccagaggttacagcattgagtagtttctaactcctcagcactttactctggcatcctcacctccaggaaaggctacataatttgcagggtccagtgcaaaatgaaaatgtggagccatttgttcaaaaactaagaacttaatgaaagcacagtgtggaaacaagcactttgggaccgcattgattccatgcccatgaagctggctctgcccaccttaaccttacctcctgaccagaagtaacctatcaccaagaacaggcacatagctagtacctccaatcctcgttttctttgctgagttcatctagtacctgcctccatacaaggccactggccttctaatccctgggacaaaactgctgtttgagaatgaaagaaatgtgtcctctgtagacagatgcagccccctgggcccatgacttgaagccttgtgcatattcaaaaaagactgcccttctttcagatggacacagccctgtgctggggcatgtagctggcacttggtgaatggcaggcaagctggattctacctgcctccagcattcttggctaggcatcctcatgcagggaacagtctacatgatcccacacaatcgccttgagcaaggaacaacctggttggtccattgccatggagtggccagattgctgagctagtagagatccattagactctccttctgtttttccattccaagttggtgggtgtcttggtccatcttgtgctgctataacagaatacccacagactttaactcgaaaagaaaagaaatttatttcttacagttctggaggctgggaagttcgaggtcaaggggcctgcatctgatgagggccttcctgccgcatcatcccatggtagaaggcaggtgggcaagaaagcacatgagcaagacagaaggggtggaactcatccttttgatcaggaactctcttgataatggcattagcccactcatgagggcttagcacttatgacctgatcacctcttaaagatcccacctcttaatgccatcacaatggcaatttaaacatgagttttggaaggaacattcaaatcataccagtggggttttaggtttcactcctaggatgatatacttttcaagaaagaaaagaacttaaagaaataaaaagagcaaagtggatcattataatctttctaatcttttgcagttcctggctagctttacttgagagtaagcagggaaaggtgaggattgaggtaagagaagaaaagaagtaaagtcaggtcttgagaggcttttaaaactggattctgacattaaaaattaaaaagacacccaggtacagtggctcatgcctgtaatctcagcactttggtaggccgaggcgggaggatcctttgcactgagttcgggaccagcctgggcaacatagcaagacctcatttctacaaaaaataaaaacttaaccgggtgtggtggcatgtgcctgtagtcccagctacttgggagcctgaggtgggaagattgcttaagcctgggaatttgaagctgcaatgagctatgatcacaccactgcactctagccttggcaacagagtaagaccctgtctcaaaaataaagaaataaataattaaaaagacatcagattcccttgctttcccatgccccccccgccaaataagtaatgcgtacacccagaaagagttatgagagctaggatgctgttcatatgggtcctttaaaaccctgtatatgttcctactgtgaaattatattagggtagcaggagagtcatgctgagttactatttgaccatctggcctggtattcagactgcagtaaagccaaagaatgggttgaggtggtacagagaccactgggatataccttaaaagagccacagttgtccaaaatggaataccaagcgtgccccgataaactgttctaagcaattttacaatccggttaaatgttttttttttgtatgtgtgtgtgtaagtacaaacatgcatatatgtgtgtgtgtgttggggagaaggctgagagttgagaccagtactccattttagaaaaaagtacttgtttattttttaaaaagtatttatttgtttatttagagacagggtctcactatgttgcccaggctgttcctgaactgctgggctcaagtgatcctctcgcttcagcctcccaaagtgctgagattacagccatgatctaccatgcctagctgaaaaaactactttattttatttacttaagtcctcagatttgtttgtcatttttaatgttaaaaattcagaatctatgattttgaaacagattttggtaatcccgtagctcagtattctacccatggacttagagatattctgtgtgaacagattgatataaaaagatatatgtgtgtatgtgtgcttgcttcccttttctctagatcaatctggaatttatagaaatatgggactttcaccatgaaaagtatttaaagccgactagaaagatattttctttgatttttatttggaagcatccttttcctcttccatattgctttgttcctgataaaataaccagttctctaggttagaatgaattaatatgtgcccgttttccctgttaggctgtaagcttgaccatgaagagcagagactgaaaataacagtagcataaataacataatttatttctctctcttataacagctcagggacaatctggtggcttcactccataaggacatctgggacccaggttcctcactcatgtggtccaaaatggcttgccactgcatgcgtgccctgagaagcaggatgaagcaagggaggaaaaacaatatatgccttcctttaagcacacatcctggaaattgcctgtatcccagtcattggaacttagccataaacgtaatggcagacagccaggtgcccagctataaatcatgggtgtttaacattattgacagccgtccatctctgttacacttatctttgacaatatgttctgctcatcacatcactttttataggagataaacaaaacctggtctgttttggacctatttgcttccttaaagttccagttagatgatgttgcatttaacgtgagtccattttggtttggttttgtctgtcggggcctagtgcacaagctcagtccaaaacagtggcctcccatacttttgtttaaaaattctccccttttggtcacgttgtcccttaggtgagagtgtaaccaaaactgaaggctttactgccactctcatgtatcatcattttgggtttacggtctcagcacatcattcataagttacagtgtcctcatggtcgcacatttctttgtttttctttttccagttgaagagacaccatttaacattctggagatggctacatgcaaacatttaaaacttgtaagagaatacagtgcaccagggggactactattatgactgtctggaggataataccacgagtttggagtatgcttcttagccagggtccccttgaactaaaccaactaaaataaaatagatcaaagaatgagctagataaggagtctgctcattaagaaacaaaaacaaaaaccagcctgttcaattccttacaactgaatctctgtaacacccaacatattcctccatgtgcaactataagtatcagcaactgtacagacacctctgtttagccagtaagtaatctagagtaattctattatttagcacaactttagcaaaagaatttaaaactatagcctttacagtagaacctgttatggagcctatgatgagaggtaaatttctaatcattgcttcatttactccaaaccatggagaaagagacctaacatgtgctgcctatccaggagagtgaaggcctcctggcaatgttctctttaacctgtgatgtgggttaaggggagtggaccagtattcttactgattatgaagcaataaaggtaccattaaagtttcttggccacagtggccctttatctcccatctatcaaggcataaggttgtccatgtatacaactggctgcaaaatcctccacaaataaaagtataatccatgagtacacacacgagacccctttttcaggtctattcatagaggctaagcaaggaaaaaattgagagataagagttctcatgatagcagagaagtcttttgttgatacatttttaaaacttgttttctcatatatatatatatatatatatatatatatatatgcttattttattttattttttcatttattttattttattttattttatttatttatttttttgagatagggtcttcttgctctgtcacccagactggagtgacactgtcttggctcactgctgccttgacctcctgggctcaagtgatcctcctgcctcagtctcccaagtcactgggactgcagacacaccatgcctggttaattaattttttttttttttagagatgagggtctcactatgttgcccaggctggtctcttggcctcaagcaatattcctgcctcggcctcccaaagtgctggaattacagacgtgatctatcatgctgactgcagagaagtcttgattcatgatctttggaaaaagctgttcatgtctgggatgccatctgcttctggggagaagcttccctggttaactttaccttaaggtctccaatggacatacagttcctagagtctggatgggcccttctgagctgtgagattacaaacccaaggttcaaggtcctgagttttgctgcagtgtgagtagcaagggcagtctttctctgatgacattctcagaagacccaatctccaggttctagattgtgaagggattcgattgttctcagtcagtggaccataaaaagctttctttacctggtgaaaatacactttgacatatgcattaaagcattccagcattttgttatgtcagagtttagtagcagaaggtacaggagaatctattattaggtacacaggccttctacacatatcagaattttaggaatctcatatagttttgcaacatatattaacaacgtattcactaaaatacaccttaaagaaggttaaacatcatttattatttggcaatgctttccatatgatttaacatatcaatcccgttaactctcttatggaggcttcaggggctctctgtagtattctaaaattcaaggtcaaaagagacttaattttgaagtggaaatttgattttgggaagcctgtcaaacaaatataaaaggtttaaaacacttgatcaaaatagggtcacaggtcatcataaaatagtagtcatttatttaggtaaagtgataacgaaaagattttaaaaagcaaaaacattactctctgatagaggagacgcagttttccaaacaatctaaagacctgagaaagacagcgtgaggcagaatctgtctctctctctctttttttattttttgcagtttactcaaaaggtaaacaaaaatatcttgctatcactattaacactataagaaatttttgttcaaaagagaaaaccaaattttacttttgcattagtgtattatcaataaagctaattttaataaaaccttataaacaaactcattcaatgtcagtcagcttttgaccacaccagattcccataacccttttataatctcgtacaattaaaaattttttcaactttttatattttaattttatctacattccttttattccttcaatttgaaacaacctttaagtaacttaagtaacctttaactaacttcaaactggacaaacttcaaactaggcaactctagtaacttcgcctagacaaatttttttttaacaaacatacattttatgcctttataacttccatcatcaaaagcatatcttgcttttatatactatacagaattgtttttcttacatctagttgttttaattacatatattaactacatgaactctttaaccctagtttttagtgaaatccctaggaagtaattttgaactgttttatatcagtatttgcagataaaaattattaaattattctataaattttagaaagatgtttcttcctatattttattaacagacgtaaatatatttagcttctctataccatacaaaaataagatgccaaactatataaacttaaacttaggtttggtaattaatgttttaatattttttaacttacaaatgactcccattttatgattatgctttaacataacatcactttaagatttaaaattactgaaaaacattttgaaagtaggacacaggtaccctccctaatgtcttttccagtcctcctgactcacaggtagtcacgcagcatccaaggtggctatgaagggcagggcttatctgagtcctgaatttacatgccaggagaagagctcaggacagaagacagagctgtgaggtcgatgccctggaggatccaacccctctcagaatatctggggccaaagctcaggcaggaagaaggggtcataatgggcttgactctgacttgtagctgctggttgaggcactgagaacgtgtttccagacttcaccatggctacctatgcagaactcttaattcagaggctaaaaactagaaacacaagatcacagtcaaatcaagcaagtataaaattatgtttaacagataattttgaaaccattcctatttttaaaaataccttaacctttattttaggttcagggatatatgtgcaggtttgttatataggtaaactcgtgacttgggggtttgtgtacagatccattcctgttttagcaacaatttaaaaactagctatatttaccacatataatcacatatgcataacatgtatagacataacagacacatagacagaagcagatcttacagatttgtaagattcctcatttgccacttttcaaagtttcttcccactgtcaatctcttgattacctcttttatgcttaaaacaattgttagggaggcaactctaagtttgcagctttaaagagaggacacaggcaaaacaaggtaaaagtttacatctcaaagcacagaacttagatttaaacaaaggcaaggtttgttaggtaaacattaatccattgtcttccccataactaaagttcctagtagtttaggtttagagacagagatacccttacaaatgaagatttcctttatagatgtaaatttcttttacaaaacgatttgaagattgccagttagatgagttaaaggtgtatttgagttctataggtggtctctttaacttagctgtaattactgagtttagggtggtgcccattaaggaacagagcaaaggaagagttctccatgcctggtctctgcatgtatagatctgaaaaagaagcaagctcactttaccctaagggctaccttttatgaacactttatctagaataaagcattttatttgcctttcttgaagagtctttaaaaaatattaaaaatattgaaatctttttagacacttctgcatatcagtaggcatccctagatgagactaatttgggagccctcgttttcaaatgcatttcttcaagttcaatgttgtgcatttgtaacattccattgtaattttaaatgacctttagtaagattttgccatttctaaagcaattactgcttccagggcctactataatacttatgtcagaggcatttggaccagagcaactccatcttgaataggggctgagtaaaatgaggctgagactgacaaaggatttttcccagtcactttgcaagctgggaacctctggccagcaatgcccctgcccaggcctagcttggccatactgcctcctgcaggaggaggcctgcccactccgcctgcccaggccatgcctggcttgtgcaccagctcagcccatggctgttccaggtgtgccccagcctgcctttgttatagcctgtacccagctttggcagttcctgagttcttgtcccacatccaagaagaatgagtatacgctgacaattgaagagttaggaaggtagagaagaattttattgagcaaggaaacagctctcagcggagaggggatgtgcaggggtcagccacccatggtcgggtggtttctcccccagtgcagctgagtccggggcttttatgggctcacaattggggagcgcgtgctgattggtttgtgagtatgcaagaaaggttaaaacaaaggcacaactaaatgtgggcatgacagtataaaacaccaattagggaaggataggtatgtgtaaaacaggggaaggatggggattaattagaggaaagcatgacaaatgggaagacaggctctcaatctggtccatggatttgacttgtagcttggctttcaggctttaaactgtctttggcctggaggtggggtttcactggggacctgccccaatctgcctaggtatttgagtgcctcctgccactatcaagacctgctgggctgtatccccaggaggctattcatttttagtcacaggatgagctaggaggttggcacaatatacaggtcacaaagaccctgctgatgaaatgggatgcagtaaagaagccagccaaaacctgccagaaccaagatggcgatgagagtcacttctggtcatcctcactgctcattatatgctaattataatacattagtatgccaaaagacattcccatcagcaccattatagtttacaaatgcaatagcaacatctggaagttaccttatatagtctaaaacagggaggaacctgcagctccagggatttcccacccctttcctggaaaacacatgaataatgtacccattggttagcatataatcaagaaataaccgtaaaaatagccaaccagcagcccttggggctgttctgtctatgaagtagccattcatttactcctttactttcttaataaacttactttcactttactctgtggacgtgccctgagttctttcttgtgcaagaggcaagcaccttctcttggggtctgtatcaggacccctttccagtaacacttccacatgtaaatgtaggcatagctggacagtggagtagttaattcttttgaaattatggatctcatttttaccttgaatcttggcttgggctctcagatccccttgatcaacttagccaatgatttttccctaccaaagtacacacaaaaaaagaaacaaaggggggagaacacaaaaatacctgcagatttccaaagcctaagtttgccacccctgcaatattgccatttactaccagtttctgtctgacccagttagatatctaaggcctataaatggatccaagccagttaattattggatccaatctgatcctggacttagtccagtttctgtcatgacttccaaacccagtttgcatcagaagtttgctcaaacaaactcagagaactcacaacacaaatctgtggagttttggaatccaagagagagcttaccgtgccccagttgctgcacaaaagcagtggacaccatgggcctagcaggtagcctgtcttggccattcagtgctcctggaggtctctgtaagctccactttggatctcacttcagatgccatctgttaaaagacaaaccttagacaaattaaagagtttaattgaggccgggcacaataggtcacacctataatcccagcactttgggaggccgaggcaggtggatcacctgaggttgggagttcaagaccagcctcaccaacatggagaaatcccatctttactaaaaatacaaaattagccagtcgtagtggcgtatgcctgtaatcccagccactcaggaggctgaggcaggagaatcgcttgaacccgggaggcagaggtttcagtgagccaagatcacgccattgcactccagcctgggcaacaagagtgaaactccacctcaaaaataaaataaaataaaataaaagagtttaattgagcaaagaatgagtcttgaatctgggatcacctccacttccacagcccctacacccccaatccccaggccagagtacattcagagagactccagtacagccacatgttggaagatttatggacagaaaaaggaaagtgacattagtaaatggaaatgaggtgcggaaacagctggattggttacagtttggtgtttgccttatttctggattggttacagtttggcatttgccttatttgaacacgatttgaatagttggtcacctttgattggccaatacttggtgattagcagaagagtaggttatgctctgtttacacatatagttaggttacagtttactatggagaaaccttttggctgaatttaaaatatgtaaggaggcagctttaggctaaacctaatttaacaactgaatgaccaactgaaatacgtttttaggagaacatccagtaaacctgaagataataagaaagcctgaatggtctcattcagggtagaaagggtgagaaacagattggtaagactcaggtaattttctccttgctgtgaatttcttgtcttagtccattcagctgttttaacaaaataccatcctgggtggcttataaacaacagaaattgatttctcacagttctaaaggctggaaaatccaagatcaaggcactgtcagatttggtgtctggtgagggcctgcttccttgtagatggccatcttctcactgtcactccacataatgaaaggggtgagagggctctctcagattttttttgtaattaaaaaaaaataacaaacctgcacatgtatttttttatttaaaaaatataggccgggtgcgatggcttacgcctataattccagcactttgggaggccaaggtgggcagatcatgaggtcaggagatcaagaccatcctggccaacatggtgaaaactcatctctactaaaatacaaaaattagctgggtgtggcggcacttgcctgtaatcccagctacttgggaagccgcggcaggagaatcacgtgaacccgggaggcggaggttgcagtcagctgagattgcaccgttgcactccagcccgggcaacagtgtgagactgtctcaaggagaaaaaaaaaagagacatatcgcaccactgccctccagcctggcgacagagctagacactctctctctctctctctctctctctctctatatatatatatatcaaacagttatttttttttaagagacagtgtactggccaggcacagtggctcacgcctataatcccagcactttgggaggccaaggtaggcaaatcatgaggtcaggagttcgagacaagtctggccaacatagtgaaactccgtctctactgaaaacataaaaaattggttgggtgtggtggtgtgcgcctataatcccggctgaggcaggagaatcatgtgaacccgggaggtggaggttggagtgagccgagatcgcaccattgcactccagcctgggcaacagtgcaagactccatctcaaagagaaaaaacaaacaaacaaaaaaagagacagcatactgctctttcacccaagctggagtgcagtggcgcagtcatagcttactctaacttcaaactcctgggctcaagcattcttcccacctcagcctcccaagtagctaggaccacaagcacataccaccacactcagctaatttttttaatttttaaatgtttttgtagagatgggggtctcactatgttgcccaggctgatcttgaactcctgagctcaagtgatcctctcacctcagccttccaaagcattgggattacaaacgtgaatcactgtgcctggctcatatgtctttataaggacactaatcccatccatgagagcactgccctaatgacctaatcatttcctggaggccacacctcctaataccgtcaccttggcagttagaatttcagcatattaatgctggggcaacataaatatttaatccattgcacttgtgcatatgattgaattggcagtttatcataatgcatatttactgccttgttttactttatctttctttgtatcttgtctcttcaactggactatgagctcttgagaaacgagtctaagtctgtcacctgtttatgcccctgacagtctctagcacaatgttacacatagagacagcataatagatatttgttgattgcctgatgtttgctcactgagtagtattactatcctcaatttatcttttggatgctgaggttgaaggtgactaagagaattgtaccattcttccggtggttctaaatgcattattgattagtaacagaattgactagcataaatggcagttgaggattttcttcctctcttttatcttgtgtcattttagcagaaagtgaaggacgatttccaagcctcctaagctgcatgataaataactgctggataaattaatatgctcttatagatgagaacaaaacaagggaccaggtctggctgtcctgattttgctttccttgttcagcccactgacgggagtagcccttgctcttggttcaggtcccagctcctcccttgcttgtctgtagctgtgggtgagtcatggcaaccttgctggccctcccttttccaattgtaaaagagaaatgcgttgccaccagatgatgtcttaaagcgcctccaacttctggaatggaagaccctctggaaacacagagctgtgtggttgcaggaaatgggctctttgcatgataactaactcatcttcctctctcccccaaccagatttcctgctgaggtaagtaatgtggagtgggttttttgttctttttcttcagccttctgttccttttgtgtatgtctggccttgtaaatatggtgaataaatgctataattataaccctttttgacagctctgtaatttaattgtaattcattctgagcatctatttaagacaatgatgtgtattgaagatacagctgttccaatctcatctgctaaactgacaggcatcggttggaatcatagtcccagtaactgtaggaacttccgatctattcaagaccaaatagagggatacactctctgtggggtgtgtgtgtgtgtgactgtgttccatatcctggtttggcaaaagtggtaatgtagtatttggagagaagcggcatttaaaatcggcctttgcaaaaatatgaaaattattctgaagtagaaaatgtcaggccgggcgcggtggctcacgcctgtaatcccagcactttgggaggccgaggcgggtggatcatgaggtcaggagatcgagaccatcctggctaacaaggtgaaaccccgtctctactaaaaatacaaaaaattagccgggcgcggtggcgggcacctgtagtcccagctactcgggaggctgaggcaggagaatggcgtgaacccgggaagcggagcttgcagtgagccgagattgcgccactgcagtccgcagtccggcctgggcgacagagcgagactccgtctcaaaaaaaaaaaaaaaagaaaaaaaaaaaaaagaaaatgtctcaggtttactttttgcagaaagctaagctgaatatttttgattaacattcagaggggtccctctgtaaacctggaattgattcctggtagcactggctgggggtcattgctcatcagatgtccgagtttcctagggatgccctaacaaagtaccaaaaactagatggcttcaacaacagacatactgattatgtaaaccaagaagtatctgaggcaagtctcaatcaatttagaagtttattttgccaaggttaaggacatactcatgacacagcctcagaaggtcctgacaacatttgcccaaggtggttgggcttcagcttggttttatacattttagagagacataagatatcaatcaatacatgtaaaagtacattggttcagtccagaaagggggaggtggggtgggagggggagggattccaggtcctaggtggattcaaagattttctggttggcatttggttgaaagagtttattaaagacctggaatcaatagaagggagtgtctgggttaagataaggggctgtggagaccaaagttcttcttatgcagatggagcctccagatagcaggcttcagagagaatagattgtaaatgtttcttatcagacttaaagagtccgttctgtcagtattaaagtctctgttttaatgttaatgctggtaagctgtgcctgaattgcaaagggaggaaggtataaataatgaggcatatttgaccaccactttccctcgaggcctgaattagtttttcagattaactttggaatgccctcggccaagaggaagggttcattcagttggttgtgggagcttaggattttattttttgttttacaattgtgtcacagctatggaggctagaaatccaaaaccaaagtgttggcagggttggctccttctgagggctgtgagggagaatcttcttcttgcctctgtcctggcttctggtagccttaggtgttcctcggcttgtacatgatgttgtccctgtgtctttacgttgtctttctctaggtgtgtctttgtctcccaatttcccctttttacaaggacatcagccttattggattagggccaccctactgaccccattttaacttgattacttctaaaaagacactgtcttcaaataatgttacattctgagatagtaggggtgaggacttcaagataccttttggtgggggacacaatttaatccctgtcaaatgtctgcttgaatatgaaggaattttcttcttttcttttttttcaagtagagacagggtctcactatgttatccaggctgctctcaaactcctgggctcaagcagtcctcctgctttggcctcctcaagtgctgggattacaggagtaaccacctcacctggtctgctttctttccctcccttcccctccctttccatcccctccctttccttcccctgcctttccttcccctccctttccttcccctcccttatcttcccctcccctcccctccctcatttccttcccttctccccgcttcccttgccttctcttcacttctcccctccttcccctcccctcccttccccttcccttccctcttttctttcttttctttcaacaggctctctctctgtcaccctggctggagtgcagtggcatgatcatagctcattgtaacctcaaacacctggcctcaagcaattctctcgcttcagccccacaaagtgttaggattacagtcataagccaccatgcccagcctagaaattttcttcctatgactgcaaataatttcagtcccaaaggcttttagatgattgcaggaagaatctcacaagaattatttatttcataatgatattgttcttctcatttattttgggctataacatagagcaatacatttaccatctttcttgctatttggccaggtagttgcagagtagcctgttgtgccttttgaccttcaatgccctgaatatagcttacagaatgtgagatgttatgaaagaatctataatgggggacctcagaactttctaactggtagatgaattgaagatggactcatctaattgaagatgaataacttgcctcttccccaacccccagttctcttcttaccttacttttactccctgttgcaagagggagtttgaatataattcaagaagatgctcctagtaacaggaaattccttcatttgaggattctggtgggctagaccacagtaggttatgaagcaaatttgagaacagtaagattaaggaaatggaatggagataactcaatgtgatagaaataacagtgaaatgaatattaggttttgttcgtttgtttgtttgtttgtttttgagacagagtcttgctctttcgcccaggctggagtgcagtggtgtgatctcagctcactgcaacctctgcctcctggattgaagcgattcttgtgcctcagcctcccgagtagctggagattacaggtgcatgccaccacacccaactaacttttgtacttttagtagagatggggttttgctacgttggccaggctggtcttgaactcctggcctggagagaacagtcaaattgttatttcagcctcccaaagtgctgtgattacaggggtgaggtaccatgccctgctgaaatcaatattaggaaaacatcctggtcaaggttatgcaactcatgtgatcttggagaagtatattcaccttttgtttagtaagtgttcattgtgagcattgggtcactaggtgatttctcagataccttctagcttaaagtcccatgatttcagggacagttagacagtaatgatttaggtcaatgcttaaatgtgtgtgtttagtaagaagttgtaaaaggtgttgggtaagatatttaatataatctatgaaaacataaatgaccatttggtgcattcaggcttacagtataatactgcaggcagataatatgaagaaactaattgggagtatttggttgaaagaaatacaagaaaggaaataagattatatttgattgaaagaggaaaaaaggaataaaatcactcagaaacttacctttggtaacgtaggcagggcagtggtctggagggccagttacactagctccttcactgcagctttgatcagcaaccatacctgtattcttattactgatcaagtgtttttctgcagccaaattcttactttcaccataagctgaaatactcctaaacacagaagaaaaaaagattagactgaagtcctttgttttctgggagattagcacagggatctaattaggggaacttgtgatttccagtctctgctcttgtaaccaactgttgcctctccctaaataagcttgtggaacttcactctgctcactaggatatgagacagtgggattttcattggtgtatgcccaaggataagttggagttctttgaaggagtcagatagcctgctggggcctgctggaagaacggtacaagcctccctgcagctgttggtgtgctgtgtgactaatacaagatgttgatttcaaggaccatctggaatggaggcaaaccaataaattcattttagcggactggtaaaattctttgcaagcccggcttttgattttttttttttggaattccattctttgaagttagaattctttggggaaggggttgggttgaccataaggcatgatctttcatttattcactactgactagtacaaataataatatggtacactgtgacatgcagtgtattatagccttgaacaaaggactgtgggcatagtggatagcaaaattgattagtcctaataggggagcacagtccctggtagttctgcttgtgacaagtgagggcaggcttccaaaaggatatatcatttagctggatcttgaaagatagatagaaagtaaaaactcaccagatggagaagtgaaaagaaggtccaggtagagagagaatcatgtacaaagaaagcatttggtgtattcagaatccagcgtccttggggtttgggatttgtagtgaggagtggtaagccaaacccctggaaagagggtaggttagggctagattatgaaagatgttgaatattgtgccaagctagggagttgaacttgatcctgtagttaagagggagacactgtaaattttgaagcatgatcagatccgcattttagaatgatcaacccgacagccacatgaagaatggattggaaagtacaaaattgcagtcaggaaaatgaatttggaagctattgaaatacttcacggaagaaaagccacaacagtatgtttggtgtacatatttgttattaaggggaaaaaagaatataagttaagattttcttgtaaatgcatacaaatatattgagaggttcacataaaacagcagtattttgaggaaggggaaattggcttgaggaatggggtaggaagaagaatttattactaatactccaaaagcaaatgcagcaaaaaccaaaataaataaatgggacataattaaactgaagattttctgcacagcaaaagaaataatcatcagagtaaacagacaacccacagaatgggagaaaatatttgtaaactatacatctaagaaaggactcatattcagaatctgcaaggaactcaaacaaatcagcaaaaaaaattaaaaaataaaataaaaaaactccaaaacccaaataatcccatgaaaaagtgggcaaatgacatgaacagacatttctcaaaagaggatgtacaaatggccaagaaacatgtgaaaaaaggcccactattactaattattaggaaaatgcaaattaaaaccacagttcaccacctactaccttacccgagccagaatggctattattaaaaagtcaaaaaacagtagatgttggcatagatgtggtgaatacagaacacttttacactgctggtgggaatgtaaattagtacaccctccatagaaaacagtatggagattgtttaaagaactaaaagtagatataccattcaacccagcaatcccactactggctatctacccaaagaaaaagaagtcattatatcaaaatgatgcctgcacgcatatgttttttgcagcacaattcacagttgcaaagatatggagccaatctgagttcccatcaaccaatgaatggataaagaaactgtggtatatatacatatcacagaatactactcagccataaaaagaaatgaaataatgtcttttgcaatgacttggatgaagctggaggctgttattttaattgaaataacacaggaatggaaagtcaaataatgtatgttctcacaagtgggaactaagctatgggtatgcaaagacatacagagtggtataatgcactttggagactctgaagtggggagagtgggagggaagtgaagattaaaaactacgtattgggtacggtgtatgctacttgggtaagaggtgcactgaaatctcagaattcaccactatataatacatccatgtaaccaaaaaccacttgtaccccaacaacaattgaaataaatatatgtagacatataaggtaaataaaaataaatttaaaagaattcactttatgccttttttaactttgaattttttcacctctgggaatatcttacctgtttaaaaattaaattaaagggccaggcgtggtgagtcatccctgtaatcccagcactttgggaggccgaagctggtgaatcacttgagttcaggagttcgagaacctagccaacatggtgaaaccccatctctactgaaaaacaaaaacaaaaacaaaaacaaaaaagcaccgcaaaaattagctgggcatgtgggtggtgtgcgcctgtaatccggctacttgggaggctgaggcaggagaatcacttgaacttgggaggctgaggttgcagtgggccgaaatcacgccattgcactccagcctgggtgacagaacaagactccgtctcaaacaaacaaacaaaaaaattaattaattaaattaaagaaataaaagttaagaaaccagtaaacttaaaaaaaaaaaaaagcagcagatcttcaccttataatggccatggtaaaatctcctgagtagaagttcttgaagatgttgacagtaggcaagagataatgagcacctgaactaaggcagtgtggctttaatctctttttaaaccacaggttcatctctttttcgtttttcttgattcttttctcttttttttttttcctaataacaccttgagtttgttctcttgagtctcccacagtctgggttttgctagttgcatccctgtggtgtactttataaatgttcctctgtcctctttattttatgtaaattggtagggattgaggtgctttcagatttagattaattttcccttttcaagactatttcatatgtggtgtgttcttccatcagggacagatcatgtcaggttgcctcatttttgtgggtcttctagtacttttatggtttcatttttaatattttagtctttgttccacttggagtctatcctggtgtctggtgtgagtgtggttccaactttttcttttccagttggctgtccagctgtcccagcaacacttattgaatggtctttctccactgacttaaaatgccatttttatcatatatgaaattctcaaatgtatttggtctgttttctgggccttctgttctattccattgatttacctgtctattcatacaacagtttcacactgttttaattgttactgttactatctttttaaatttttttagacagggtctcactctgtgcccaggctgaagtacagtgacgcagtctcagctcactgcatcctcgaacttatgggctcaagtgattctaccacctcagccttccaagtagctgggactacaggcacttgccaccaggcctggctaattttttaattttttgtggagacagggtcttgctacattgcccaagctggtcttggattcctggcctcaagcaatcctccctccttggtttcccagtgttgggattacaggtgtgcaccaccaggcctggcctgttttaattgatgaggtctgtaaaacatcttaatatttgacagagctagtttctttttattactctttttttttcagagttttcttcgctatttttttttattggaattgcatttgatttccaagttaagaagaatgacatctttatgatgtcagtttttcctatctgaggccacactatgcttttccatttggtcacttgtctgtcctttaaaaatgacttgaaattttgttcatgtatcaccttcacatttctattaagtttacatctaggtcttttgttgtgttggctgctatacttgaggtcttttcatccattatatcttctgtttgttactggtggaagccattgcttcacattgatcaggcttactaaattttcttgtgttttaatagtttttcaggtgattatcttgagtttttcatcatatcatctgtacatagtgatggtttaatctagttaattaggaaaatgcaaattaaaaccacagggaggtacctaccaccttgccccagccagaatggctattattaaaaagtcaaaaaacaatagatgttggcatggatgtggtgaaaagggaatgcttacacatggcgggtgggaatgtaaatcagtacaacctctatattgtatagtcttatattgacctaatttctttctgtttctttggcttaaccatgtacatacttaatcctgcttcaaacatgttttttcttcagttgctagttctagtttaccacatagtgtcttttggcttaaagccagctcttccagcacaagactgctcctggaagcaggtgacctcactatctcccttaccttgaagctgggagccaaccctttaccctgaagttgggagccaactgtcctcaattggtaaaagatctggagagggttgagtgtcagaggatacaagccttagcccatgtgcccttcagtgtccacctgaagtcttcactctttggtctccacacacttattcttgcaaggagattagctcttcatttgtgatcttctctcaacatggttatttatttatttattattttgagatggtgtcttgctctcttgcccaggctggagtgcagtggcacgatcttggcttactgcaaaaacctctccctctcgggttcaagcaattctcctgcctcagcctcccggagtagctgggattatagtacgtaccaccatgcctggctaatttttttgtagttttagtagagacagggtttcaccatgttggccaggctagtctcaaactcctgacctcaggtgatcaacccacctaggcctcccaaagtgctgggattacaggcgtgagccaccatgccagcctcaacatggttattttttgaataaagacattttgattgaatattcctcttctatgtctttctcatcttgatctttatctgttctctttcctccatctcttctgcctccctgaacccgtttcttcttatctgccttccatttatttctctcatcttctatttctcttccatatttctctttccccaagtaccccttattctttgtataatatttgattttgagtcttaggggtgcctaaaatcttattataaagggaaaaaatcatacagcttaattactaggcttgattaggtagaaatatttaggacttcccttttgttcatcattgtgaaagtgagacaggaatgaccagttagtgaagcgggattatcatgcccagtctatctaatgtcttcctggacctttaggaagtaattcaagatcataacattagctgtgaaataatttttgagatattactgtataatacaaggaagtctccatttttaggtagaacccattcttggaagtcacatcttcaagctgttgctgtaaggcagaatcctaaatttgctttctatcctgctcttcaactttctccttatccatttagatattattcagtgtcaccagaaaatgcaatgaatgtgtgaatggaaccctgaaagtgaaatattgggcctgaatgagcaaaatagcaaaagtgaagtcgtaagaagtggggccttcttatccacataccattgggtcacgttgggttttctaccaaggttggagtcatattcattaagggcaggaatcatgccttaatcatcattgaatgtaggactctgactatcccagaggaggcacgttataaatatttgatgatttggtgaactaaactagaccaaaccatctcattagatgggcacattgtttgggatctaggaattgtgttgtgagattggtggttgatttagatcacctttcagtcctggtatattgcgctgcagatcagctgctgagaatgagagaggagaaacgcagatacaagaactatgaagtgagttttcttggcccttttgcgttggctcaattaacctccattccttagggactccagaggactatagtgcaataaatttcattatgatgattcagagtcagcaaaaaagggtaaaattatgttgtgtatgctctgttgctaagagaaaatttgagaaatccatttaagatagtgctatagttttgatgtttgtcccccaaacctcatgttgaaatttgatccccagcattggaggtggggcctaatgtgaggtgtttgggtcatggtagggggtgaatccctcatgaatagatgaatgccctccctgtggggcaagggaaggtgagtgagttcgctatttgttcccaggagctggttgttaaaaagagcctggcacctgccttccttccctctttctttccctctccttcacacctctctctctctgtgtgtgtctctttctctctctctctctctgtctctctctctctctctcccttccttcctccctgtggcttcttctcctttgccatgtgatcaccacacttaccagcgtccctttgccttacaccataagtggaagtagcccgacacctcaccagaagccaagcagatactggcaccatacttcttacacagcctgcagatctgtgagccaaataaagctcctctctttataaattactcaaccttggatgttcctttatagcaacacaaatggactaaaacaggattccagtaaaagtggtcaacataatgtgagagatgtacttttgttaactcaaaatctgctacttcctgcagtcagataagcaagttgttgctgtaaatactgtgactattatataaagaactcattttctttttctgcttgtaacatttcttctgaacatgaacattatggaataatcatagccagacacagtacaaaagtgctggaaaatttcaggtgtgggacacaaaggtgggtaaaaagaatctcaccttcactgatagatacactaagttagaatgttaagtgataaagtcatacaacaacatatcatcagtaacaaggaaacttcctggtctttctgaatctactggcagcttctgggtctcccttgccaaaaattactttacgatccccttataaaaggcagaactagattttagagcagagatcgaccaacttttataaagggccagatagtaaatattttaggctttacgggccacatagaccggctgcagctgttcaactccatcttcgcagtgcacagatagccacaggcagggcttaaacaaatgggtattccaacaaaactctatttacgaaaacaaatatgggccacactttgatttagagaatcacctgggtttttgaaatgagtgctctttctcatgatcagcaacaagtgtgttatatctggcaatacacactgccttacagaaggtaactgtgttctaggacacaatccaccagtggtctacctggtcgtattctctttctttttttctttccctctccctgcctcttaggaagcgcttaacctctacctgtagtttagacctggctcagtattgaggctaattctttacaaagcaggatatatgtaaggagcatcaggtcagtcatgctgcgtgttctcctttcagtgtatacccaatttcaggtcctaggcccctaccctgtccctgccttggagccttcctggtacccccgttactccaagactgaaattctgcctttccccctaaccccggtcatttcagggaccgtgtcctcatatgatgctaggcagtgtatagaaacaaaaatatacctgacttttgttactgtgtacttaatctgtactggacaatggtgtatgtgcatggataaaagtatattataacactctttatgagaaaaaaatttggtcttctaacagaaacaagacttcagtacgttaaacttaacaactatgatttactgtaaattatattgagtacaattaaatgttaaaatatatagttcagtcattaattgcttaggtggaaggttacatctaccagacacatgtgctgagccttgaaggttatacagaatttgcctaagtcggccaggatggtagctcatgcctgtaatcccataatcgcagcactttgggaggccaaggtgggaggatcgctggagcccaggagttcaagaccagcctggttaacataacgagacaccatctctaccaaaaaaaaaaaaaaaaaaaagaattccaggtgagggtgttactgttgttatgagggaagcagctagtgtgggttgcggagaaatcggagagaaggtcagacagatgaaggcaccagattgaggaggacctgaaaagccacactgaggttgtggagttttatcaagaggacagcagagaacatctgatgatactttatgtaggttagtgaaaagtatattgtgatagaagaatgatgggctaaaacccagaagttaaaggttcctgtttcaatcctgccatttattaactaggagaccttggagtcatcatataaaatccttgagcctatgtatttgacaaacgacaagtacatatcacagagatgtcatgaggataaagtgagaaaatagttgtgaaaaatgttttgaaagtcatacataaggttctccacaaatgtaagaaattgcaatgatattataacagtggtgatgcaggaagattatgcttgcaggcataaacaaaatgaattgtaatgggggaagttaaacagcagagacagctcgtttcagtagcacagtggggtggtttgaatgtatgtgtttctccaaaattcattatgttggaacctaatccccaaggtgatgatattagaaggtggggcctttcggaggtggctctgcccttatgaatgggattcatgccctttttgcctggagccccttttgcccttccatctcttccgctcttcgaggacaccatgtttgtcccttctttgcccttctgccatatgagaaggcagcaagaatgggtcatttgtgaggaacagggctttcgccagacactgaatattctggcaccttgatcttggacttcccagcctctaggaccataagaaataaatgtttattgtttataaattacaaaatctaaggtattttgttttagcagcctgaatggactaagatacgtgtgaatgaacggaaaagggcctctaccatgctatgtatggattaccaactgaggaataactcaagcacaataagaaatccacagtaaaactgtattgaacatatatcctgatgcttcttagctgttacaaataccacctcatgatcatcattgtaaacatcctttctaaatgtactgtatggtaccttctgaataaagggaagcttgcctttttgcaaactcagccagggataaggtgtatagcagaatgcaggagctcattttcatcttcattgcttccattgctacccctgcacaactctgtgatttatctctgaatgtcttattatagctctccagtactcagttccttcttaatgatggaaaaacaactaacagggtaaaactttgagcaaatattactgcttagaattaaatattgcttggaaaaagaaaagcatgtctttatgtttgcccctgcactatggattttctgcttattatttccttgtgtcttttatcttcccattaaagcatgaaaatagttcatatctctccccatctgttcaccacattaattgccctgggcaggaagaactttcttcagtataggtcttcttcctctttgtggttttaagtccattacatgccccagctgctttactgtttgacatcttaatcttcttattggttttggggtacgtccttggtgacagctaagcaggttaggtatggtgactgaggtgacccttagctcctttgataaaaagcatgcaggctttttctgcacataatgaatcttgggtggtgatttggccttttcaagttgaaaagcaggtatacatcaattgttctattaaacaacatgtactgagcactgctatctgtctgtggtggccccggtggaggacacaagagacacagggcattgttcctactcaaaaagtagtgatgtgttagaaaagatgaaattgagtcagaaggtctagttctgcgctaacttgcctcatagccttgctttagcttctttttctagaaaatgaagggattgaacctgaacaatggttttcgagcagtgtttctgaaagattcttggcacttaggacctgtcacagagggctgagcttaggctcctaaggtcttcaaagtgctgcaagtctctctcttgtatatattaggtttccatataaactttcaaataaaggtcttcagagctgaaagtatttgcaagcaagtggactaaatgggttccagcatttctttcaattctcattttctgtgagcctacaactacaacaaaatataacaacataaataagtttgtgcaaggtattgtgacatagaattcagtatcagttgttcaacaagtactgactaaattccttgtcgattggagaatgtcatcgcctctgaacatcatagctgtcttcaggtaggtagcttatggacttggatcaccatatatatgtggaatttaatatggttggttgtcctggaaaatatagaaaagtaaaaaacaaaacaaaacaaacaaacaaaaaaattgttaacaaacactttacctaaagagaatcactcttacacttcttctgatttattttccttctaggctatgttcttgtacatcatgatattttaacatagttttgaaatacacacacacactgggtttatcctggctttctgtttaaccctagaatatagatttttttctaagtgtcccaagagaagaggcagtatctattgtccagcaatatgtatccaacacattgctcgatgcctggacaatggtaggtgctcaatgaatattcactaatgaaattacttgttaaataaatatcatgcaaatataaaaatgtatgtttctgactgttctctaatattaaaagcttctgttgcttatcttctaaagctgactgtaggcttgtgtaacccagcagctccactcctgtgaatactcagcagaaatgcatgcatttattcactgagacatgctgtagagtgttataggaccaatactaataataggaagaacgagaagctacccaaatgcctatcaacctaagttgagataaataagcggattcacacaaggaatgcaaagtagcaatggtaatgagcagtccacaagccagatacaaaagagtgcatgctacgtgcttccatttacataaagtacaggaaaaaccaagtcaggatagggagcatgagaagaattctagatgctgctgttggatttcttgatctggatgctggtttacttggttgtgtccatttttcaaaaactcatcaagtgttaaaatgtggctgttctttgacccagcaatttaggtattcagactttatatacaagcagctataaaatggaccttccaatgattaagtcactaaagaacatgtgttgtgtatatgctatgcaccatgaagaaatacctaaggatgtacaaaaaatattagtgagtaatggtgtttattgcagttataataagttccaaacatggagaaaaatgcaagccaactcaactctcccacagtaggagcatatgtacagtaattccgccttcctgctccttatcgcttcgtgtttctgctcccctattcattgccaggcaaccactaatctgcttcctgtcactatagattagtttacattttctagaattttatataatggtatcatacagtgtattctcttttttatctgccttttttaactcaacataattattctgattaactcagattcctctatgttatagcatgtacaaatgctctaacattcctttttattgccaagttaattcctttttatcgccaagtagtattccattgtttggatataccacaatttgtttatcccctcttgatggatatttggattgtttcctatgtggagcttctgtgaatattctagatgtctttcatttttgttgggcatgttttcatttctcttgggtaaatacctaggagtgaaatggctagatcctaaggtagatgtatgcttaactttttaagcaattacccaagtgttttctaaagttgcattcccgtcagcagtatataaggtccccttttgccacatccttgccaacagttagcatatagtgtctttgtagttttagctaatgcaataggtgcttagcactatagtttaaaacatgtatctttatttatttatttatttatttatttatttatttattttttgagatggagtctcactctgtcacccaggctggagtgcagtggcgcgatctcggctcactgcaaactctgcctcctgggttcaagagattctcctgcctcagcctcccaagtagttgggattacaggtgcccgccaccaggcccagctaatttttttttgtatttttagtacagacggggtttcaccatatcgaacaggctggtcttgaactcctgacctcaagtgacccacctgcctcagcatccctaagtgctgggattacaggcttaaaacatgcatctttcttaataactagttttgcagaacatttttttgtgtgcttatttaccatttgtatatctactttgtgaaatgttcatttcttttctcagtttttaattagattatttacttatattaagttgcgttagttttaaaatatattttggactcaaatgctgtgttaggtatagaatttatcaatatcttctccaagtctataacttataatttcagtctcttaaaagtatctttggaagggcagatttttaaatttttatttcattttagttttagagacagggccttgctatatttcccaggctgaacacctgggctcaagagatccacctgcctcagtctcccgagtagctggggctataggcatgcatcactgtgcataggaatatacagttttttttttaaccatcatttgttgaaaagtctaacatttcctcactaaattgcctttacatctttggtcaaaaatcagttgtcagtatatacatgagctggactctgtactgtttatctttcttgtcttctgatttattttttatctggttatttttatgccaataccacactgtattacttgattctgcacctttataacacttaaagtcagatagtgttatttctccagttttgttcatcttttaaaaacctgttttggcaactttagatacttcgcagtttcatatgaatttgagaatcagtcaacttcagcaaaactgcctgatgagaatttgattgggattgtgttgaatctataagtcaatttgggtagcattaataacaatattgagtcttccaacccatgtatatggtatatctcttcaattattaagttattttttatttctcttataattgttttgtagttttcagtgtacagatctttcacatcttttgtcagatttatccctaagtatgttctattttacaaatgatatcatttttataatttcagttttcagttgtttgtctctgttacatagaaagaagttgatttttatatattgatgtatcctgcaatctttctggactcactagatctagtagactccatcatttttaataatagctttattgagatataattcacataccaaaaaattcacccttttaaagtatacaactcagtgttttttactatattcacagtgtcgtgcaaccatcccattatccaattttagagttttcatcacccttgaaacaaactgatactcagtagcaatcactccccattcctcccctccaatagcccctggcaatcactgacctgttttctgtcccctggttttgccttatcagaatatcagaataaatggaattactctggcttctttcacatagcataatgtgaaggttcatccatattctagcatgaatgagtacttaattcctctttatgactgaataatattttccattgtgtggatctatataacatcttgtttatttatttatcagttgatggatatgtatttaggttgttcccacttattaacaatgatagataacactgctgtgaacattgtgtggtgattccatcaatttttaaactctgtttgttataataaaaatattatttttgtaaaaagagaaaatagtgaaacaaagcttagagaagaatgattaaagagtcaaccaagaatggttaaagagccaggatttgatagggtaaaggaaaggcagggagtaggacaaaggtaaccacaaggtttaaagccttagtggtactagaaattgggaaacggtggtggtattgattaattccttttcatatgacaattatatatgatgggacttcaagtgaaaatgtttcagtagacaactggaacataagtagaagactaaagctgaaaacataggcttagaaattagtatagtggtgctataaagccaagggaactgattttctgctaagcacaaacaggaatttaagcaagatacaccttctgttccacctccaatctaattcatagggtagagtcctgttgtgtttaagggcatgttttcaacagttcattgcatttgtatgcatattgcgatatagtagactttaacgtgtctacaaactatggattttaaaagaaataaaatgccttaccctatattcacatgattgtatccttaaagatacagtgggagtaggggaaaaaattgtaaaaacacctgttaagtcttatctggccaaatgccataaagcaatatatcttgggggtgtttgtcaagtcagagctttcatcaaaaacagataagacatctaaagacatccaaaccatttaaggattctgtttaggaacaatgaaatattacagaacttagaaactttcattttgtgagatgtctacgggaagataattttagaggttatttttatttccttggggaaacaagaaagagattagcatgttctgttgtgctacagagtcattaaataccagctcacatctctatcagtaaaagctaagttttttgagtagttgaattgctctctttgaacaaaggtatcagacaaaccatttttctaaaactcacagttgcacaagtgtacagtctctcaggacagtggcagcaaagtactaattgaaagtcatacgctacatgctcagagtagaaagtatgatcatgtccagattagtgtgttaactgctcccacatccacaaatcctcattgttgacagtagattcagcttttgaaacaaaggtctaagcaaccgtacagggaaaaatggattggtttggctatagaaaatttaaaacttttatgataccattcacacaggaaaagagaaaactacatgtatctatatctgcgtagatgcacatacaagacaagggttgggaaggaggagttcaagagggcatgctttctctggccagagttttaagacaagaacatgtttacctactgtgggtgtgccctgcccaccatccgtgcatgaatctgggcctccaccacagcctgagttatctgcgctgggtagctggtggctattaagaactgaattgtatccttgaaaaatgctatgttggaatcttaatccccaggacctcagaatgtgaccttacttattaaaaacagggtctttacagaggtgttgcagttacagtaaggtcattagggtgggccctaatccagcatgactgatgtccttaaaagggggactttggagagaaaaacatgctcaaggaagaggatgtgaaggccacgtgaagagactggagtgatgtgtctgcaagccaaagaacaccaaaaatcgtcagccaccacctgaagctggaagaggaaaggaaagatcttcccctagggccttcagagggaacacggccttgatctcagacttcccctctaagaactgtgggagaatcagcatcttttgtttaagcctcccatgttgtggtactttattgtggcagcctgagcaaacacagtggctaaggaaactaatttcaatcagagacaatattcaaaattcagcactggatattggcaggactaggcactaaccagtcagaagagatgacagctttgaactactcacacaggtgggccactgtggggcacagagatgatgtatggaaaccaggagtcacataggacgatggctcaatgacatgagaaaacagggtggagggaaggaaactaaagaatgctcaataccttgaaaatgggcagcaaaagaaagattaatttagatgcaaccaataaaaatattttcaaagactaaaaaaaaaaaacaaaacttttgtgctgcaaaatatgccatgagaaaagttaaaaagccaacagaaaaaaatatatttgcaacgtattacaaatgtttatattttaaatatgttaaaaatgcataacttcagaccattttccaccaatcagagatggagaggcatgtgttgttggtgaagattcagagaaatctcatgcatcactttttggagtatgaattgctataacccctttggaatgtaatttagccatgtatattaacatttcaattcacaccgacccagcaatcccatcctttggaatttatgctatagaaataaaagcatcagtgcctaagatgtatgaacatctttatttattttaacattgcttatagtgatataaaagaaaaaacctggaatagctgaaatgtccattaatagggggaaaggttggaagaatgagttaaatttaagtatgtggcctggagggatatctatgatatatataataaaatgaagaaaacaaattatagaatgagttatagattataattcctttttattaaaatgaaaccaatatgcattaatatattcatgtaaataaatacataatttaaagagacccaggcatgagccatgatgagtatgattaatctagctttttatagattaaatccacttgtatgcatttaagtcctataaaaaattagtaagaaagatggaccttaggttcaaagaattgggctgattataaattttgattcatgactcactagcttgtcagtaaatgcagcttcatgctatcactttttttgactacctattattgattatgtgcatataaaatatttaatcatttgcctgttgctgaacattttaaatggtttcacaatatttagttttagaaagaatgccatgtaaccatatttttgtaaactctctaggtgttttcctaacagtaattcctagaactgaaatttctaggttaaaagatattacatacacacacacacacacacacacacacacacacacacacacaaacacatacacatacacatatgtagatagagcgatggatgaatcagtcagtagatataaatataggcatgcatgtgtagtatgtatagatataggagatatgtatagatataacccagcaatatatactttcatatattataaatattatatttataacatgaaaatatatgtgttatatgtattgtataatctagttatctagtgctatataacaaactacctctgaactaattgtttatctatccatccagatatataaatatcttttaacccagcagcctatataattttctagttacccagtgctacataacaaactgttccaaaactgagtacttaaaacaacaaccacatttaatttactcatgaatctgtagtccagatagggctcagtcaacacgacttatgtctactccaattgacattggctggggaggcttgaaggctgcaggctggaatcttctgaaggctctttcactcacatgtgtgttgccagtgctgggaagagttgaatagcagggagctagaacagctaggacagctggcatccctctggcatctttctctatatgtggtctctctacatgttggcttcaggatagctggacttcttacatggccacttagggcttcaaagccttgtgtcccaatagagctgcaggtggaagcattgtcgccttttctaacttagccttggaaaccatgcagcatcccttccaccacagtcacaggcccacccaggtggagcaagacacatagactcccacctgtcaatggaacagcatcaacaactcattgtaggaacatggagaggatggatatagcggtgcagccatttttggaaaatacaatctgccacgtcattttaggacttttgatacatattgccaaatagccactccagatactgtacagtgatgaaaataattcttcctgaaactgctaaagaaggatgttattactctttttctgtctttgccaatcagattttttttaaaagatggtatttcattttgtaaatttacttttttggttgctactgatgttgaaaatatctgtacctgtgtactggccattttgatttcttttgtgagctgcctgtttacatccttcctgaaatttgtagttagagttttaaagatcagttagttcaaaatccctcctttcactgattaggaaatggagtcaccaaaagccccaagttcagagttttctaaacttatgtaaagattacatcggcacttcaggcggggtgcaatggctcatgcctataatcccagcactttgggaggccgaggcgggcaggtcacttgaggtcaggaattcgagaccagcctggacaacatggtgaaactgcgtctctactaaaactacaaaaattagctgggtatggtggtacgtgcctgtaatctcagctactcaggaggctgaggcaggagaatcgcttgaacctgggaggcggaggttgcagtgagtcaagatggtgccactgcactcccgcctgcatgacaggctcaaaaaatgataataataaatattattatttaataataatattatagaacttagaaactttcattttatgagatgtctatgggaagataattttagaggttatttttatttccttggggaaacaagaaagagattagcatggccttgtgaagtgggtgtcatcatgccccattcgcaggcatggtgactggcctttaatgtcagagtacatgttgacatgttttatccaagaatgtttttatccaagaatgatacagagagccatcaaaacctccctctcccctaagtttagctgaaatgagatgacctagatgtcatctcattgcatttaataagcaggactgaacctggagcaaattcaggttgtctttgcaccttaaaaacaagtgtctaaatctagaaataggatagatattgtcaagttaaataaacctttgtgataacaaagttagccatcttcagagtcagtgagcattcagcttccccgtgtcctgggacccccgctcccaccccctgccccagactcttatgtgttaacaccaccagactaacacaaaaagctttatcttataattacctcaaaattacagacttctagaatatgcacactttagacagtacagatgaacatctgttctgctgatgtttgtgtgtgaaatgaatgagatgagagtcaggaggaatgattaagcctatgacaggttttttttaacaggacttttaaaaggacattaaattccagatattttcatttcaattattcttttttttattcgtccatctcatatgctccagacacatactagacactgataatacagagctataagacatagtattcatttattaaatatgtatgtatacttttccttgtcccaaaaggcatatgaaatgggttataataaatggcattatttcccacctcaggaaatggggaagatcaaggaggacgtggacaaaaaacaccgtgatagagatatgccaaaggattgccctgtagcatgtggaggttaggtagggggattcctaacacagactggggagggggagtagggtaccacagagaaattccttggaggaacaaattacacaaaactcatcaacgctgttttctgtattgtacattttttcctgtttgcctttttttctggcattaggagggcatcacaattttaagcagagctcagacacagttgctcttctgtttagccaacttgcatgcctgatccttttctttttcttaaattcaaggcctcactttgtcacgcaggcaacagtgcagtagcgtgatcacaactcactgcagcctcaaactcctgagttcaagtgatccttctgcctcaacctccctagtagctgggactacaagcatgcgccatcacacttggctaattttttctgtagaaacaggatcttgctgtattgcccaggctggtctcaaactctacttcaagcagtcctcccaaagcactaggattacaggcataagccgccacacctacttgatcttcaaaaagaagattcttaggtttgtcttctgtgacttcaggccattccttaaacttatttcagaaacttattcttatgtgtctggtgagctgtgctgcacccccaagagttccactgtgcagctatgattaagtccatccgcacacccaccaggtttgcagatgccctgccacgctgtcagcatgatggatgggcctgcattacagtggctgcagtgagggaaagcaggaaaggagctcagagcgttatcagctgtccagcctgcaaagtccgtgttacagtaattgccattttcttttgagtttctggttgacatatggaaaagggcagactataaagtgctcatgaaattttccttagctcttcactgcagtgtggttattcagtacagggcttgtgtgctttctggatccattagtcctcatttctaacttgagtggatttctgtttattgcaaccaaagggtcttgagtaaaagaaatactgaaagcacaagtttatacatctttttatctgaccatcaatcagtggttcagttctccaagataaactttaatttctgaaattctgtttcattgagtcttgtggaagttttctatgcttgctcaattaataaagtcaccgagagaatgagtgaataaaagcaactagggtgaattacccctcccaattcctctgcctctaatttcgtcaagggacttctgtttctctttggaaaccggcatttctcttattcatttaataagtgaatacataactagagactgctatgttccaggcatggttaatagatgctaggaatgtaaagataaggaggacatggaccttgccctccaggagttcatggtttagtgggggagactgacaaataaaccagagatgacagtacaggaaatgcagtttaagggtaacattgggtgccgtggaaacacacaggtgcagtacctgctcagcctttttaagagctcttggaggtgatcaggcgatcaaggaaggcgccttgtaggagacagcacctgaaatgagtttggaaggatgagtaggagtgagccagagggagaaactgaagggcgtgttctatgtacatggcctcacgtgagcaaaactaggaggctgtaagaaagtctggttctttcatgtcaaaatataaagtaagttttgttccctaaaaatatctcagaataaagagaggccttatagattgttaaaaattttttatattacaggctactctctgatttactttattttgaatgacaaagtaagaagcctgaaactacctctgtcactgctagtttgtatgcctatggaggtcaccctaaaaggaagcaaagaaattctgtacagatttagttaagtattggggtgggggatgacttcacaatcgcaagtcttgaatatcgttgccaataaaccttctaaaaatcacttgaaaatgaaatagaattagtgtttactttgtggagatcatgagtatacagccacaggatgaacggaaaaataaaaccatccttattttaagcaaatggatatttgtggcttgagataaaatttccagtaatagcatcatatacagatgaaaaaaatgtttccagtttcacgataatagagtaaagctattttcacttccttctgctcttccaaatcccctacataataaagagaacaagatatagacatgcaagctttggtgacactaggaggcgtgtagccctgaactaggatttatgaagactgaacagtggtgcaggaatggcgagaaagtggtaaggtcaaatctgcgttcctgcaaggatgagcaccccaagaacccctgaaaagctcagaaaaagacgtcgggggccacaggaggcagaggcgatgggaggtcaaggacagggattttaggagaaaacctgtccatggagcacttgaaccccattttcctactcccattccagattaatagggaactaagcctcctctgccactgcataaaaccagaagtttatcccctggaaaaacaaaaccagaggaccaccaggctctgagatagcaggcgagggagggtaggaacgaggaccctatgtgaaaacaagggagtacgtggaagtttgtacacttcacggtgactacgagcagcctggcgcaccaggtaaaggttagagggatgcacccctagagcgcatgagccgccccagagaaaatcctgtagatactgtcatttgagagtcccgaatttggagaagctcctgatgtcccccactgtctattttccctttatcctttttactaatagaacttccccaagttttggcaaagaacatggatgactgggtagagtctgcctcttccagattcccctacagtgggctgtgtccaccagctaaattcttaacagtggtgtgagcagtttctgcttcattctcttaaaagaaatctgtttgtccttgtctttctctcgctctcttcaagagtaggctgtggatgtggtgcctgtgagggagcctcaaacatagatcaagatcaggcgttaggagatagtgatcaaccaaagatcaaggccttaggggatggtggaacaacaaaataggaagaatagaaagagttgcagcatctacttgtcctgtgccactcatcaatgtaaggaatgttagaagagagagaaatgaactcctaacttgtttgagtcactgtattttggagcctcttttttgtagcaacttagtctataaacaaatacactatattaaaaaacaaaacacctggctttttgctcaaatactgcattataattttctccaaaatagcatattatccagtgtaaaatagcattggatttttttaaatggctttctttttttatttttaatttttgtggatacatagtaggtgtatatatttttggggtacataagatgttttgacatgggtgtgcaatgtgaaataagcatcatggagaatggggtacccatcccctgaagcatttatccttcgagttacaaacaatccaattacactctttaagttatttaagaatgtacaattaatgttattgactatagtcaccctattgtactttcaaatagtaggtcttattcattccttctaactatttttttgtaccaattaaccatccccctctccctcaaagccccttactacccttcctggcctctggaaccatgcttctactctctatgtccgtgagttcaaagatagtgtatatttaaattgatccaaaagtcttccaaagacttttctttttctcttttgctgggagacaggaggattgtcttactgggaaaatgggagactacctgagattcaggaccaccttatattggtttctagtctaacgttctgggaacttgagaagattctgaaggcagaagtatagagtgtgaaacagggagtagccctggctcccatcaaaatttacataatggagtttccctaaaaccagggttcatatgctggcaatgatgttatgggcctgataatgagggggcctggaagggggttcatatgctggcaatgatgttatgggcctgatagtgatccccagaattttggtgtgagcacctggatgacttatgctaccattttgtgaagtaatcataaagtgttacacatttaggaaagaacatgatgggttcagttttagacatacggaggtacctacggacatccaagtagaggtccaggctacagatccaaagcttatattggcttttgatatagatgtattttttactttattgctaaaattcagctagtatatgtcagggtggctgtatcagttggtaaaattctgaaatgctctggactcattgataaatggtcatttccttcagactcccacgtgcgtcccatttcccacacaccagctgttctaacccttcttgggatacccccataccaccctacagtccatgatgaaagggttaatacctggcccagaagtgggcctccaggaccctgcccagccctgtggctgtcctgtctgctctgtttgttaaaagttttgaatataactcctgctcacaaatcatgaaggtggaacacatttcccacatagccatgtgcttagtctgtttcacaatcttccacaaatcccatcctaagctgcccttccagtctaattgatatctctcctaagtcccctctgctgcaggcagcattaattacccactgctccctgactccctgcattttctcaccttcatttctttgtgctcatttctcaaaattttctctgatttccaaatattctgtgttttattcatctttcaaggccaattcattttcccttctacaagaaagctgccttcatctagaaatgttaattccatccttgaaataaccacccccttctcatggagtgtatcacttcctatcttatttaatacattaggaatatattacattatcttagtattttctatgaagtctttctcatagtggataggtaataaataattgttgaatgaattcaagtatgaatctaaatcaaaagactctctaccagttaccattggtctgtggttgctagcaattttatcacttctttagaatgtctaatctcagaatccctgaaaatctccctggctgtgatacctatggtatcttttgtcacatgccaaaaaaacaaaactaaacaacaataaccgaaagcaaacaaatgcagaaatgtttactggttttctgaactaaagcctttggtacgttcagttgtgttttggtcatctctctttaatgtaaaatggtaaaagtgattttccatttcctgcactgactttaattaatcttccagaaatgctggagcagagcttttctaaggagtgttgcactatttgttctactgcagcaaatcaagctcctattgtaacactggtggcataggatgaatcattgctttggctgggacaaactgtttcctgaagtcagatacaagagcagaatacctaatggtaccttagtacctatattctgtctcaaacactcagtcccctattgcccttcattgaagtaaaggaaaaatcgaacttccaatgtttggttgagatagcaaataatttgcactcaaggtcactggcatgtaaacagattttattctccttgcaacactgaattgctttttctgtctcttcttttacataagattcaagcaaaatgtagactatgttatgtaccgtgtgcctcatctgttttataaagaaggattgtctggcatttgtcctaggtagatactgatggggaggaggatgggcaggaggcattggccacagcctgaagggtacctaaggctgtgattttgagccccaacctactggcctgtgctctcagccagctctcatgatatgcagtgtggttctcagtgaatctttgtcagatgtgagggaagagacacttccttgagttgccatttttctatcctctgaaagtagaaagtgctgaatggaactaaagcttctcatctctgccctctcatctccctcctttttaattgatatctcctagtgaaaagattatatatcttcacgtggggccttaggtggaaggtgattacaagtgaggttacttgctgtgtctgtaactgcagggtcgggagggatgcatgcacagtcacagggcgggcagttgagctccttcacacaggggttctcagagcaactgtcagggcagaatcctgggttggatcccccactggctgttttctccttactggaattagaactatgtccaaagccaatctaacagtacctgcactcacctgactcatactgtaggagctttttgtcataacataccaagtgccctactgagcttctacatggggcatgcacactcccatggcatggtgtttctgaggggggataatttaccaggtggaagaatctcatgtttgatcgggaaactgtaggcttcaggcagcccagaaggtaagtgtatggaatgtaaagaaaaaggccctgtacttccctctgaaattgggaaatgggggaagaaacaggcatctgttgtcaccctaatgacatcagaatatagcttgcagcttcctgccttcatggcagcagttttctaagacagtgaatcccccaacattgttattattagtagtacttaggcactggtattagtgctagtactggtatggctagtgctaagaatcagtacttgggtactgctgttaatatttagatactgaaaaaagttcgagtacattcatagttggccctctgtaagtcattctctcctgcacttttataagctttgttgagtgtgagacaaagagttgtggtattactaggacaagggagttgcaaataatccaagctttgagctctgtgatcatcctctgtcatggggttgtgggagaagcaaggctaaaacccactgtggcatgagaccctttgcacactacagcctctccttctgccatataagctaagagttggggcccaggtgtagactgtatcttttgaagctcttgagtctgtcttagtagatcagtcttacagtgaatacagtgaagcagtattcttatgatagtcttttcttgccgtggctttatttcttctgttaggagtaattgatgatatattagctacttttccagatgtgtgatttggcagtggttgactggcagctgatagtaactcaggaatctaaagaaaagtccactttggctttcagagttacataaaggatctctgccttcctctcttccagtagttggcagccttccaattaataaataggagagaaaactcacctagagaatcctgttgtgagctgggcacggtggctcatgcctgtaatcccagcactttgggagattgaggcaggtggatcacctgaggtcaggagttcaagaccagcctggccagcagggcaaaaccccgtctctacaaaaaatacaaaaattagctaggcgtgttcatgtatgcctataatcccagctactcaggaggctgaggcaggagaatcacatgaatccaggagggggacgttgcagcgagccaggattgcaccactgcactctagcctgggcaacagagtgagactccatcttacagaaaaaaaaaaaaagagagagagagagaatcctattgtgaagcctgggagtggactttgcatgggatgcgtcatacttacagtactccacagtattttatcacgataaataacatgggagagtgaattctacgaggctgaagattctgtatggtatacccaaggaaatgaataaaacatcacagcagcaccagaatgtggaatgaatctttccagtggtgggactgtgggatcccactagagaatactcagcttatcattccaatacaggctcttcttacaaactagcagcattatttgtttcccactgaagaatcaggagtgttacagagaacagcacagtgcaatttgtcttcagagagtttccttcattcaagtggttagaaaatatttctcaaaataatttgtcctgagtcagagctgacatcttactatggaaaaatgcgcatttgagggacctggtgccgctcatacctggaagactctgtgttttaaacttttagtaattaatctgctcacttttggtgagctagaactagaactcagccagctaagtatttattaagtgcctattttgctcccatcataattaggtaggtcataggcatatatttttaaaaattaagatgccatcaaggctcaatgcattatttttttttttgaatgcacattttcttatttatttatgaaatagttgtgaattatctctatattaaccttacctatgtgttttttttttaattatactttaagttttagggtacatgtgcacattgtgcaggttagttacatatgtatacatgtgccatgctggtgcgctgcacccactaactcgtcatctagcattaggtatatctcccaaagctatccctcccccctccccccaccccacaacagtccccagagtgtgatattccccttcctgtgtccatgtgatctcattgttcaattcccacctatgagtgagaatatgcggtgtttggttttttgttcttgtgatagtttactgagaatgatgatttccaatttcatccatgtccctacaaaggacatgaactcatcatttttatggctgcatagtattccatggtgtatatgtgccacattttcttaatccagtctatcattgttggacatttgggttggttccaagtctttgctattgtgaataataccgcaataaacatacatgtgcatgtgtctttatagcggcatgatttatagtcctttgggtatatacccagtaatgggatggctgggtcaaatggtatttctagttgtagatccctgaggaatcgccacactgacttccacaacggttgaactagtttacagtcccaccaacagtgtaaaagtgttcctatttctccacatcctctccagcacctgttgtttcctggctttttaatgattgccattctaactggtgtgagatggtatctcattgtggttttgatttgcatttctctgatggccagtgatgatgagcattttttcatgtgttttttggctgcataaatgtcttcttttgagaagtgtctgttcatgtccttcgcccactttttgatggggttgtttgtttttttcttgtaaatttgtttgagttcattgtagattctggatattagccctttgtcagatgagtaggttgcgaaaattttctcccattttgtaggttgcctgttcactctgatggtagtttctttttcaatgcattatttacaggcaataaatcttaccagaatacgaggcacctgccttggcagttatctttcaaagactatgaaagcctccatctccacagagaccccttggagtattttggagaaagggagatgcctccctgagcctatctattagctctttacaccagagccttgcacccacctgccgagttttgtgtcattattaggaaatagtttggtttctggccatcttagaaaaaaggaaaattccttgtctcatggttctttgaactgtagtttaaaattgtatgtgtgcctgttactgcctttgtatctgatttatttccaacattactagtttatgtgtttgtccagaattgtaggcaacctgtgggagagttaacattgttttctcactacccagaatactgccatctgccagtgagatctaataagtcctgggatttgggtaaaacaagataaagaaacttattccatcttcgaagtaaatctgaattgccctgtaaaatatctaaaggtctttaactttccttctcattatgtacttcctaatattctttttcctctttatttttttctttctcacgttttgattctctatattccactattctcctttcccttcttttcttgttcctaatttcttttctcttttttgataataagtaagaaatgccatataatggtcaaaacatacccattcattaattttaaaaatttctttttttctcttgttccatcactggtatctaataaaacatttcttaatactagctggcaatataataactaatgtttttgctggacattctactaggtgctttatataccatatctaatttattccttacaagtcaataagctgtgtattattatcactcctattttacaaacaagagagcagaaacttaacagattatggaacttgcccaaagtctcctagctagtaagagaattgagacttaggacaaatgtctacctccagagctcaaatgccttgcaaagaatgagctctcaatctagtagtgttcccaagacacacttttgaaatgcagcaaaatggttaagagcatggtacttggaattagacagacttggtttgaatctcagcactgccagggattaactgtgtaacaacgggcaaatcatctcagctctctgagcttccattttctatctgtaaaacgtggaaaataatacctcacagagtggtcgtgaggtattacatgtaaaactttaagcctggcacatggcctaagtttaatacagtatactaatattactatctatggaaaaaatagtatttgttccccttgcaaccaacttcatttaattacaagcatatttcgaaataactgttctcagtaaccactgggaatttttccttgatctaaagattccttgaatccattcatgtctttatcctacacagctgctggcagttagtaacaagttctggaatttcccatgtgatgtatgaaggagcgcaatatagtgcttccatttaatggttccagaatagtcttcttccatcttttacttaataccctgatggcatataaatactttggatatttggtctaggaagggaagccctgaaaaactgatagagaggaatagagtatgccttgaccgcctgagtcttctggtctcagcgcctgcctggtcaagtgtgtagacatcaggctgagagtcgagaggcctggtttcttcactcatttggcatctaaccttgttcagttagcttaacttttctggtctcacgtagaaatcaaatagtggcttcactgtcacttccagctccttgaaattgatatttgaaaggcactcaaaaaatatcaggtgatgcgattcagcagagacgtgtctggtgtgtgcagattttatttcctttagcccaggccagaattttatattgaaagtgaagcatatatgaaaagtaaagcataatactttcttaaagttctaccccaaattatgagtatttaggttatactcaaaaccaagttcagtggccactaaggctcatgtttaatgaagcgttcttttttccttaattgagaagtggaagattttgtgaaactctggtagaattttggtacttgagaagcaaaatgatcaaagccaaagttgagatctcagcagtatgaacatcggctctggctttggcaatgtcagagagcttatttaatcgctctggcagctctcagcttgtttttgcatacaatgcttttgcttcatttaggcagagtgactgccacatatgcaatggagtgtagataaatcattgttgactcttgcatctaaatgcctaacttactgggaaatgtggccatttttcttgatcagtatttctcaaatattttttacttcatccagagcaagaaatatgttttatatcagaacatatgtatgcataaagttgtgtatatatacgcatataaactgcaaacagaattatcaagaagtagtgccaacattatgttatattttactctattatcttcttttctattatacttagtgttactaagcaattttggtcatgacccactaaattgattgcaaggttcactaaatgggctatcacccactatttgaagaacaccggccttaagattcctcttagtccaaaaaactgctttacttatctgggctttacataccctcaaggaaaaacttcacacactcttccagttcactcccactacacacacataccaccatcacaaccatctctaacaccaccaaactctttgaacgcctaggtacacataactccatcggctgctaccagggatttttttttcccctaacaggctccatcttcttacatgaggccagaattaggaaaactgtgaattgtgaaaagcagcatactctcctcctaactttctgtgggttcactggcatcaggaactcaagaatttctgtgctgtgccagtgccagctcaaggctatagtattgactgtaggactgcagtaaatactcattggctagccatagtcccagatctgtactgaatagagtggaaacagggatcttgtgaaggtagcattgaatagcactggtgatccatagataggctgagtttagcatgcaggatataaagttacaggattattgaagcaggagtccaggcagagtgcatattcctcaatacacacaacaccaagaaaagcaaacagacaaacacaggttagcacagtctggatatactggggcagaattggtcagtgactgaagctgtctctttgcatcattggctcataagtccaaggctgtctgaggcatgactttgcccctaagagtagaacctcaggacttaaaaggaaccctgagcggttcgtgtaattccctgatgtcttagaagtgtgtctgaaggcaggttcacatattttgtgcagctttgaggttcacatgttagtcactcttctcagaaaacctcactgggcctgaccccagggtagcagtgggatgacaggggttggggattcgggttataggactgtgacctattcattctccatgagcatgttcttccctaggagtagagacctgcatcctgatgtaaagaggagacatgaaacgacttggctctcttttagcaacttacagaccatactctggcctctcccaggccctgaaggtcatttattttgcaaaataagccacagtaataacaccactagcaaaatttggcaaacagaccaggaatggagaaaatataatgcatataattaataggtaattgataacgttataagttttatgagccagatatgttctaaacttccttagtttttcaaagaaacagttcgtagaatttatatctaggagggaccctcgatagttcagtcacctcattttgcagatgtgggaactgaggtcctaagaagctagaaaatggcagaggtggccaagcccagatctttaagactccagggtttgtttccccacgcctcatagtctcttcaagtaaaaaggatttctcctcattgctaagaaatagtacacaaaaatgtcatcgtttgagccactgttcatggactcagccatgttaaaagcaaaaaacaaaacaacaaagcaaaaccaaaaaacacagcaatagtttcccaaaggggctgcatttaggtcatagaaatttgaaccataatatgtgtgcttcagatttcctgagatttcttgatgccagctgtggggctcctgtggctgtctttgaggactttggacagtgaagggttgcatagctaacacgtgcatttctaagtcacctgtcaccatagagcccaaattatatcacaaaagcagtttccaaccataaaaggacagaggacagctctgggtttttttcctttactcctacatcacatgagtcagtggtcactattcaaagaggcaatacatcaagatatgggtggaaacttcaatcattgacccttcgaatctcagaattggaaggtcatctgttccaccagtatctggtgcatgagttaattgaaagattctgcagaacatgtagcaattgttatctcttttgtctccccagaataggaccatgccagcgggaatctattactggtctgagctattgtctaagatttagtctgggaaagaggaatgtggttagaggacagtgactgtcacagggctgtttcatctacatgtagtgctctccaatgagagcagaataagaagccaaaagacataaactgtgtcagtgcaacggagtaagtctaagatcaaggaagaatagccagacaggactgtcccacccagtctggaatcctgagacagactatagaatttcattaaaaatcttttaaagcagagttttgtgggggtttttttttttttctgttctcaggtatcatatcagtgtagcactattcacagatcggcacaaaggacaaggcgacttcttattattttcctcaaccatgtgaacactaaggttttcattctgctacctcttgggtttgtacttcatggatctcatctattcaataagcaatcaagcactttgcaatgggtccagggaaggttagtgtcactttgaccctggcccacttcccactggcaccatctagaacccctgctaaacttgtcaagaactgatactcacatagtaaaactagtgacttctgccctacatctctaagagcttttacatactccagcatggtttgagaatttgactttaaactcaccttttatccagcaggaactattactgaacctgcccctagctttaaaaaaaaaaagatcagctggccgcggtggctcacgcctgtaatcccagcactttgggaggctgaggtgggcggatcatgaggtcaggatttttgagaccagcctggccaacatggtgaaaccccatctctactaaaaatacaaaaaaataataataataactaggagtagtggcaggcacctatagtcccagctactcgggagactgaggcaggcaaatcacttgaacccaggaggcagaagttgcagtgagccaagattgtgccactgcactccagcctaagtgacagagtgagactccatctcaaaaaaaaaaaaaaaaaaaaactaaaaattggccaatgaaatcattttgaaatctataactaaacagttatttaattaacctgtattgagtctctgtgttatcaataattactacaatttttctcatgatttctagctgtctaactgattagcccatttgcagttaaaccagtggtagccacaaaagttactaaatgtcctctcctcaacaatcctcaataaacactcttttcttcagggctcatttctggtttatcagcaccattctgctctcaatttaatgaaggcactaatgtaaagacatagaaaccttgaaatttttaacagttcatggttcaaagagtaccaaatggagacactgactctttaaaaaaaaaaaatcagttagcttgtttttaaaagaaatcagtgtcactgcaataacatcacagaggccacaaacttgcaaacatgactcctggacctgctgagaagaaagtaacaattacatattggtaagacctgtactggccaaaagatgagaaataaatcccactaaattttacgggccatccatgtcagtgaaatttctaggggtctagggctgtgaggcatgttgagatgtcccttctaaggtgaaagataagttgttgcatctgacctctccttttaaccagaaaaaaagcatcatgtctggtggcttttctttggattttggaggcaacgtatttctcatttgtgtgtgttactttggcccatttaccttgtaaccaaaaagctgctcattttgaatagggcccaggacaagagaatgttctgcaacaggtccagactgctgttcaagttgctctgccatttgggccatatgacccagcaaatccaatgttgcttgaagggtcctggctgatagggatgctgtttggagtacttggctggcccctataggtgattcacagctcacacacttagaattttggagcaaaactctgccatcctctgtagagaactactgatatggtttggctatgtccctacccaaatctcatcttgaattgtagcacccataattccgacatgttgtgggagggacccattggaagataattgaatcatggaggtgggtctttcccatgctgttcttgtgatagtaaataagtctcaagaggtcagatggttttataaaagggagtttccctgcacaagctctcttctcttgtcggccaccatgtgagatctgcctttcaccttctgccatgattgtgaggcctccccagccccatggaactgtagtccattaaacctctttcttttgtaaattgcccagtcttgtgtatgtctttatcagcaacatgaaaacgaactaatacaactactctccttttaagaaacaactttggcctagttatgaatattaatagaaactgaatgcttaaccatgggccaccaagtttccatgaagcctgagctgcctactgtgaactgggcattgtctgagccactacaccatgaagttaggaaggtacagcagtactccatcatcaaatggaagtggtgtatacatgagatctggcttgagcaggccccgagggcacatttaagctgaataggaagtggcccaaatgcccatggtcctcattcttgctacattatcttctttctctcagcccatatctgtggaatgtaaaccaaaaataaaattctaagtcccccaacagattgaatggacccctacttggccaagggcattccaaagtaaacctgaaaaactagttcaggccattatgggaagggagtgggggtcagtcatacctcattatacctttctccctttggaattcaggcacaactgaccagcgttaacattaaaacagagatcttaagactgatggaacagactctttgaggcaataagatacattacaaaataacaggtagcaggctctgaaagaaatggaagtattttaccctgcagtatattttgatgttcttttttttttttttttttttgagatgaagtctcactatgtcacccagtctggagtgcagtggtgcgatctcggctcactgcaacctccacctcctgggttaaagcaattctcatgtttcagcctcccaagtagctgggattacaggtgcccaccaccatgcctggctaattcttatatttttagtagaaatgaggttttgccatactggccaggctggtctcaaattcctgacctcaggtgatccacctgccttggcctcctaaagtgctgggattacaggcgtgagccaccgtgcctggccttgatgcattttttaatggccctgtgggctgggtgcagtggctaacacctgtagtcagtactttgtgaggctgaggcaggaggattgcttgcacccaagagtttgagaccagcctgggcagcataatgagaacttgtctctacagaaaaaaaaaaaaaaaaaaattagctgggcttggtggcacacacctctagtcccagctactccagaggctgaggtgagagaattgcttgagctcaggaggtcaaggttgcagtaagctgtgattgtgctgccacattcataaagtgtaaagccctgcaaaactgtctcttgtgggggcaacatagtagatcttccaggtctttttctgattctggagagattaactaagagtctggtacctttttaagtctgataagaaacattggccggccatggtggctcacgcctgtaatcccaccactttggaaggccaaggcaggcagatcacaaggtcaagagattgagaccatcctggccaacatggtgaaaccccgtctctacttaaaatacaaaaattagccgggcatggtggcgcgtgcctgtagtcctagctacttgggaggctgaggcatgagaatcgcttgaacccgggaggcagaggtggcagtgagcctagatcgcaccactgcactccagcctggcgacagagtgagactccatctcagaaaaaaaaacaaaaaaaaaaaagaaaaaagaaaagaaacatttaccatttagtctatgaggaggtttcatctgcataagaagaaacttggcctctacaactccttatcttaactcagacattcctttctattgattccaagactttagataataacttaactctttcaactaattgccagtcagaaaatctttgaatccacctatgacctgaaggcacctccccactttgagttgtctgcctttccagaccaaaccaatgtgcacttttaatgtattgattgatgtctgcttgtaacttctaaaatgtataaaatcaagctgtaacccaaccagcttggccacatgttctcagcacctcctgaggctttgtcatgagcatgttcttaaccttggcaaaataaacttctaaattgattgagacttgtctcagatactttttggtttgcaggccttgtggggagttccctatgtctagttgactgagggagagaaaactcaggcctgtttaaagttggttctgcacaataatgcaggcaccacccaaaagcaataatgctgtagccccattctgagacagccctgaaggacagtggtgaagggaaatccccccagtgggtagagctttgagcagtgtatctgattgttcattttgcttggaaggaaaaatgaccagaggtcaagtctataccaattcatagactgggtagtcagagatttggaaggaatacaattggaaaattgtgacagaaaggtctttgggaagaggtatgtggatagatctctctgaatgggcaaagaattttaagatatttgtgtcccatataatgttcaccaaaatattacccaaccatatatgctctaaagtctgaatccagtatatggcactctttctctcatagtcaggattcatgggtctgtaactaaaatgcagattcagtcgctcacactcttgttcaattaacaagagcgagtctggtataaagaaagtgactttattccaaagcttagcttaggggaagagacacaagctcctgcctttaagggtactgcttcacttttggggcaaaaagcaggggcttttaaagtgggacttggcatgaatggcatgcaggggagggagcaagcagatgtgaggtctgcatgactcacttcatctaccggatggtcaagctggcaccattgtgggcagagctaggttgtaagggggctgttgccttgagatcctctctaggtgggagagaattctgttgagggcacacttcaggttgtaaattgacggttgtctcttgaggccatctcctggtgggagagttccaattctggagtttctaagtaagcgcatagataagcttgccctgtagggagtgcctggtgaggggaaggtaaaggttataactcatttctaaagcactaagtaggaggtggggaacagggggaaaggaggaaaaagaaaagaagttatttaaaaacataactcattctctttctcttagaaaaatggagtacttggttacaggtccaggaatcaaggggtagaaataagagtggctccctttactatcactccagtgatccactgtgaaaattgttgttttccatccttagagacttagttccaaagggagggacagtgattccattgaattggaagctgagacagtcatccgacccctgtggctcctgcctctcaatcaacaggcaaagcagggggttgctggactggctggggtgattggtcctgattactaagggtaagctgctgctgtacaatggaagtgaggtagagcatgtctagaatacaggagatccctcagggccttttagcactcctaagtcctgtgataaaatgcaatggaaaaccataacaatcagaacccaattgaggatgactaatggcccagattcctcagagatgcaggtttcagtcttcccaccaagcaaagaatcacaagcaaccgaggtttttgtggaaggatagggaatatagaatggttagcagaggaagatagctataaggatctgccatgaccacatgactggttgcagaagcaaggactctgatagttatgagtgtttcttccttattttgttatgaatgtgtttgcatatatattaacccaacatttttgttttcttccctttgttatccacttatcatctaacataagatacgataatgatagttaactttctctctccgtatttaagttgcagaatatcagagaagtgtgaacgccacccagggactttgcatcctcttctgggggaacgggttagtgtgatttcagatgtaggtgggatacttgtatcttgttagtgaaaggatgactttcttattgactttattaaaaacttggagattaagtatcgtttaaggacatgtgtatagatgccaagttgacaaagggtggagtgtgatgatcttttcgatgtgtcaacttggctaggatatagtccccagttatttaatgaaactgtaatgttgtttaattgagctcttgtgaatgtattttataggtgtaatgaaagtccacagtcagttgactttaagtaagggagattacttgagataatctgggtgggcctgattcaatacattgaaagattttaaaagcagagcagaggctttcctgagagaatacattccgcctttggacagcagcttcagtccatggctgtgaatccagcctattcttcctgataattttgccctatggatgtcagacttgcctagcctggccttggtatgagccaactccttgcaatatatcatctgtctgtctgtctttctgtctatctgtctgtctgtgtatccatccatccatccatccatccatccatccatccatccgtccatccatccctctctccctctctacttcctgctggttctgtttctctgaaacccctcagatgtccttgaaagttttgtccatcagtgtagccagcagggtccagcactgatcctacaggtgttgggtgttcaatactatgtgtagaactgacatgattttaatgtgttcagcctttgtgtaggggtatcctttgctgaggtagttaggtaccacactgatgctgcaaggcgaagtagcaggcagctcccctgccagtattttccacccaaagtcagtcattgattcacggcaccctctgaaactcaagcggtggcggaaaccggcagtggaaggaaacacaacccacacatcttctagcatgtgggagaaatgtggccaaacactgaggcttcacattaaaaatatctccgcctctgttactgcttcttcttcttcttttttttttttttgagacagagtcactctctgtcacccaggctggagtgcaatggtgcaatctcagcaacctctgcctcctgggttcaagtgactctcctgcctcagcctccccagtagcttggattacaggtgcccaccaccacgcccagctaatttttgtgtttttatagaaatggggttttactatgttggccaggctggtcttgatctcctcacctcaagtgatctgcctacctcagcctcccaaagtgctagaattacaggcatgagccaccacacctggccctctgttactgtttctcaatattattttatttctcctgtgaactgtgaaacatatataaaaggaggttgtaacagaccagtggaaaaaaactagaaaaactaaaaattgatatggttttgagaggtgggggaggagaggataagaaacagccaaagagttgtgatttttattgataagtccttgcctagacctaggttaagtagaaacctatttcaggagattctatttaggtgcatatagtcagctctgctataaagccatatatgcattgctaaaaatccacatactttgcaaaatcatgaaatgaaaaccacagggattatggggaaatggggaatatagcattatacccaaaagagtcaccgtactaaaaagagtcacatactaaaaaggatagaaacctaatgaaaaatgtagctcagttttgtacacgtcagatggttaagaaatacatcaatacaataaatatgacactttgccttgaaaaagtcctgaaaaaatttgcctgtggacttggatgtcggaggggttgcagcttgtgcaatattgtgaggtgatggaaggagagtcatctgaaattggacggaaacctgtaacactgcgtgttgatgggcataggcatatttcatagtcactggatacctcagcgatctgaagtatccagaaggtctttggggttatgtatgtatgtgttttgtcttatttctacacacttcggttcagctgggtgcggtgttctacattctcctagtgtaagcttgttcaacctgtggcctagaggccacatgcagcccagaatggctttgagtgcagccagccccacacaaattcataaactttcttaaaacattatgagatttttttgtgatttttttttatagcttatcagctatcattagtgtaagtgtattttatgtgtggcccaaggcagttcttcttccagtgtggcccagggaaaccaaaagattggacactcctgacctactgtttctcacagggtgagataacatataccaatcacgttgaaacaaatttgcactttcagaacaagggtgattgcaggactgactgtagagcattaagagatcactgtcctttatctgtactttcaaaatcccaaaagttctttgtaagtttagcacaaattcatttgttagcaaagcttaatgtgaatactgatgttttcctaaaatattgcacttcgattattaaagtgctgtcacagaccccatgagggtctgaatatacctgtatagagttgtaaaaattctgatttccaaaacacagctggccctaagggaagagggaatggtaggtctatgttgttgagcatctggtttgtgtcaggcatcacgatgggtgttgcagatgcagagacacacaaggcacagtccctgggagacccagggaacttgaagtctagaaggggctaccacactctttgtgctgttgtagtagatgtctgtactatgcacaagcagagaacagaagaaggagtcattctttctagccaaagtgttcaaggcaggctttctagagaatgtgacacctggattgtgtttgcggggagtggttaggagttctctaggcaaaggagaaagtcattccaggtagaagaaaatgtgtaaaggtgtgaaggcacagttacaaaacagcaggtccaaggtgatctcttaaatgtcacacaactataacatggtgtattagtttgtgagggctgccataacaaagtaccacagactaggtggcttaaacaatacaaatttatatatttgtagttctggaggcaaaagttcaagatcaaggtgttggcagcaatgattccttctgaggccactttccttggtttgtagatggccatcttatcctatgtcttcatattgccttccctcagtgtatgtctgtgtcctaatctcctcctcttatgagagaacctgttgtattggattgtggcccaccctacttagcttatttaacctaattaccttttaaagactctatctccaaatattcgcattcagaggtactgggagttaggaccttaaaatatgaaatttggagagaatatttaaaaaatattttttaaagatcaattcacacatgggctggcacaagagaaacatgagcaaagcacacagaagctggaggaaggtgtgatgaattatcactggagttgggggcttgggaaaattttaaggacataggtcttgaagaatgagtagaatttcatcacgttgagttgtgcccgatctctctctctgtattagtctgttctcacactgctataaagacatacctgagactgggtaatttatggagaaaagaggtttaattgactcacagttttgcaggatgtacagaaggcatggctggggaggcctcatgaaacttacaatcatggtggaaggcaaaggggaagcaggcacatcttcacatggcggcaggagagagagagcgaaggggaaaatgctacacacttttaaacaaccagatcttatgagaactcactcactatcatgagaacagcaagggagaaatctgccctcatgattcagtcatctcccaccaggccccgcctccaacactcgggatcacaattcaacatgagatttgaatggggacagagctaaatcatatcactcccctacttcaaaaccccattatagtagtccccctgaataaagtctaccttataatccttaaaaaaaagagagagagaatttcatcacattgagaaggaagcaaatccaagttttaggcctgcattagaagcctaaccacatataccacatataccacatatgccacatatgccatagcctatgtacctaaatgtccaggacctggtattccctgaaaggggctggtccccatgttctctgcctctgacccctgggcctctcaccatctgttcagggatctgaacaaacacacatgctttacaaacaatttgtgcagttaacacaatcatcacagggtcctgaggcaacatacatcctgagcttacaaagatgacaggattaagagattaaagtaaagacaagcataggaaattataagagtattgattggggaagtgataaatgtccatgaaatcttcacaatttatgttcagagactgcagtaaagacaggcataagaaattataaaagtattaatttggagaactaacaaatgtccatgaaatcttcacaatttatgttcttctacatggcttcagcaggtccctctgttcggggtccctgacttcccgcaacaaatatcttctttcctccacgcttcccccagaaaaagagaaaaccgtttcttctttcctcttgtcactggacaagctgccatgctcaccttacctcatgcctcctggaagtaaagtctcagtcctcagccttgtcatagcatggccctggggagcacagcctatctgacatgtggccagctcctctgtcataatggaaatgtgctgggattatgggtcccagcaaaactctgacagccacagaggacttgtgcatgccagtgtgtgtctagtcatttttcttagcagtttcttctcagaaatattcagatattccaaagctaagaaaaggatcacaaaattctccttaacttagtaaaattatgggattcaggccattgttgtatacatgtttgaaatcagaagttgaaataaacattatttaaccaaagtagcccaaaatgcttgtcaactcactcatctttactgagcagtgtactcaggggtatagaggaggggtgtgtgtgtgtgtgtgtgtgtgtgtgtgtgtgtgtgtgtatgaaatatatggtaccaaagaaaagaaaacatgttttaaagaaataatgaaggctgtttcccaaagtgtgttcacaggaaccctagtctcactggttgttgagaaagtcaagtttccaaggccaaacaaggcatctgaggctgaaattccaaacaagtttaggaagccctgcatatcctctgctcttttggagagcaaatgcgataacagcatattaaagactctgaaaggtcccatagtaaacaaacagatttaattttattttgcctggattctcaaaaatgtgctggtaccaacccatagggcacattctgataaatcctggagtaagacatttatgatgcttaaaagggactatcatagcacatttctgttcttcactcggaagcatatcctagaaatccaatgcagaggaattggatgcttttattattgtaggtttagaaatgaaaatgtaggaattgcatccttatgacaaatggaaaatgaatcagatttgcttgacttccctagtgatttttaatttttagaatcttctatataaactagtaattatgatgatgcagccatcaaatggtatgtaatcatacccttgaaataatggataatgagcacttttttaaatgaaaaaaaaaacctgaagtaattattggatgatgaaaataaattaattcaattcagtacttaaaaaatgaaaattactatgatccctgaagcagtatagatgcatatgtaagttctttcataaggaaaattacaacagaaaaatgctgaaatattaagaaaatgtggcaaacactgccttttttcctataaattcagtcttacagcttaagatggcaaatttctagagaggctggtaagcagatgtttcatagctagtaaaagatgggatcaggatttgaggcaagtcctcttgtctctggggcccacatatttaacccttaactagagctgcagtgaggaaaaataaattgatagtaacatttcttccctcctgtccccttcttcccactgcccaaccacccagcaaaagtaaattttgtgttgtaaaagtctaaaatgccatcttaaatagtacagtgttggagaacactttgctaaattatacttctatatggcagttgttccggaatatttcccattagcattgcagacgtgctctgtttcactacattgttaaaattgcttctatcttttaggccccatctgtgtaccacaaaaacattcacatcagcagttgttatttatcaagaaaatagctgctactgatgaccatgtacttaatccagttgattctgtggagataaactgctaatactgccccagcatcataaactgaccataaaatagtttatctagtggttgctaatagacatatgctcaggttttcataatggtcatgcaacataggattgtaaagctttgagaacttgcttttttgacatgagagatcttatatttgagattatcaattggggaatcaaataagagtataactccttacctagtttataaaattttatttcctactaatgtcacttaagtttgccttcctgaatgtaggatgggctaaaatgtaatttctgagtcttttcaggaagtcaatgctagaaaattgatcaagtaccacagtcaataataaaataaccattaaatacacttttaaatttatttaagttttttttttttttgagacggagtctcgcactgtcgctcgggctggattgcagtggtgcgatctcggctcactacaacctctgcctcccgggttcaagcaattctcctgcctcagcctcccaagtagctggaattataggcaccagccaccacgcccagctaattttttttgtatttttagtagagacggtgtttcacgatgttggccaggctggtctcaaactcctgacctcgtgatccgcctgcctcagccccgcaaagtgccgggattacaggcgtgagccaccacgcctggccaatttatttaagatttaaagatatttctggtggaaagtgtattactgattttggaaatgaggaaggggaaattagttttcataaatgagatgtcaccatacactaataagactttggagcagacttttaatgatagcatctatgttctgagtcctcctttgaagggaaattggtgtttgtaggacttaggacctctttttttcttacggtaagaagaattggttgttgggtggagaatccagttaggttttactgttctttcaccgtcctgataataactaaggcattgctgaaacagcgttcccatgtcattataagtgcactgtctgacacttggactttgttccattttccagggtgatgcgtgtgtacttgtgtcaagttattgcccatattaagtgtggcaaagaatgatagggtacctttttgataaacagtcttcaagtaggctagctctataaatgggccacctgaaggaggccattctctgctgccaaaaccctcccagttctcagaactaaggcttccaaatgatggcaccctctcccagcctttttctcatccttgtgtgtattcagctccttccagagcctgttcacttgctgtttcccccaacaatgtgaccagtgcagcaaataatttatatagtagatgtcaccattcacaacagtgaggtgacacagaggacctcatcaaccctcttagctgacgtgcagagattacctgttggttaaatagatgagtaacctgtttagaaaactataatttaatatctttatttagagttaactcaaattaaacttcaactgaacattattaaattcccctgactttatggcagtgatgaactttttttctaatcaataaattctaacataatctacaattctctgcttatctcgaaagctaaatctgtggacccaggctgggataatgatgtcataattgatattcttataatgttgctattgtattttggaatgtttctgattagaaattttggggttatagtcaaggagcagtgttgggtaaaaaaagcaactgtaaaaaaaattatttttaaaaagatagaaatttgggggtttgatatttagtggggaaaaggcaactgatataaaaggaaaaaataattttaccttggaaataagtggaatataatataaatagccatttgaccacttactgtgatgctgccaaactagaaatcaggcactgtttacatattttcagccttggacagtcgtagagaaagttttcaattaatacagcagtcattgccaaagatcagttatagaatagtgcaataatgatacctgtggtgccttacagaatgtttttacatttaaattttaaaaaatcaacctttgtaaggacattcttttaacacatgcctagtgctcttggatgatcttcagaaactactgattatagttcttaaatattattcattggagattttattgataagaacctaaagtaggtgtcatgaaaatcactggcctatattcacttctgaataaataaccaatgaaaagatacaaacattctgaaatcaaaccctctattttttgtaaaccatttttaaatgatatctcaattgtattacatgatgtgttaggccattcttgcattgttataaagaaattcctgaaactgggtaatttatgaagaaaagaggtggccgggcatggtggctcatgcctgtaatcccagcactttgggaggctgaagtgggcagattaattgaggtcaggagttggagatcggcctggccaacacagtgataccccgtctctactaaaaatataaaaattagccaggggtggtggcccacgcctgtaatcccagctactcaggaggctgaggcatgagaattgcttgaacccgggaggtggaggttacagtgagccaagatcgcgccactgcactccaacctgggcgacagagtgagaccctctcgcaaagtaaaaaaaaaaaaaatttaattggtccacagttctacagactgtacaggaagcatggcgccagcatctgtttgccttctggggaggcttcagagagctctacagggctgaaaggcaaagtaggagcaggcatgacacatggcaaaagcaggagcaaggtcgggggaggtgccacactttttttttttttttttttttgagacagagtctccctctgtcacccaggctggagtacagtggcatgatctctgctcactacagccttcgcctcccaggtttgagtgattctcctgcctcagcctcctgagtagctgggactacaggcacacgccaccacacctggctaattttgtaagttccacacttttaagcaaccagatctcacaataactcattcaatatcacgaggacagcaccaggccatgagggatccgcccccatgatccagtcacctcccaccaagccccacttccaacattggggattacaattcaacatgagatgtagagggaacaacatccaaactatatcacacactttcctgtctttcaaataatacacagtaaaaataatttaactcttttttgtacctagcacaatgcgtatgtatagcaggcatctgatatgttttaaatatcctttcctttaaatgtgatctgacacaacgtcgtttcaggggaccactgatgttggaggctctgtttgcacctgtactaatgttcccagatgattgtctttttgtaattggttattattctgtctgcgtcctcagcaccttatgccgctgcttaggatgaaatagtttgaaccacttcttctcttcaaattttctttttcttttttttttttattttttagagatggggtctcatattgcccagggtggttttgaactcctgggctcaaatgatcctcccacctcagcctcccgagtaactgagattacaggcgtgagccaccacatctggcagcacttcaaattttctgtgacatctcagtaaggccagaattgaagatcacagaggaaatgagacgtctggcttgtttcctcactgacctcatttgtgtgcctggattcctctatggatctggccagcagagctctggggcctctgatagtcagctgggtggaaggtgggggagttgtatctgtgcgttttgtgcaggtgtttttcacttcttgttgcgagcctctatctttacttctctctcaaaacttcttactccctgttcaaagatatgtttcctgtgatgtaggcatgctattttatctcttcgtgtctcaggttcctcatctgtaaaatgggcatgttaatagtgtcaatgtaataggattgttgtgaggattgactgagttaatatttataaagttcttagagccgtggtacatagtaagggttaaaacatgtttttaggccaggcccagtggttcacgcctgtaatcacagcactttgggaggccaaggcggacggatcatttgaggtcaggagttcaaaaccagcctggccaacatggtgaagcaccgtctctactaaacacacacacacacacacacacacacacacaaagttagccaggcgtggtggcaggcgcctgtgatcccagctactcgggaggctgagacaggagaatcacttgaacccgggaggcagaggttgcagggagccaagatcgtgccattgcactccagcttgggcgataagagtgaaactccatctcaaaaaaaaaaaaaaaaaagtttttaaaaatagttgtcagaccactagaaaggtggctctttaagcttcttaaagaaaaacgaaacatccaggaagatgctgcttctggtagagggtgacttacactttcttttccaaggaaagagtggaataacatgaaggaatttgtatccaaaggcggaggactgaaaggtattacctaaaatacctccaacaaatgttggcagcaagcctagttcctgactaatgaagtaatatatgggaagatgttcatagcaactcctttggggctcttcatagtagattttaaaaagagacaagggaaataaactggaaatatatggggatagagggaattagggggcaaagcttatgtcaggagttggcagttatcttctgtatctaataaaggccaaaacagaatgaccctcaaactggagatatgtatagatagagataaaaatattaaaaaaaaaacaaaactatctgacttaagtgtttttctcagcctcttcagtggagaagggcatttggctatctgctttgttaaagaaagcaggcactgccttattgcatgtgcaaagaggtgctgtgctggccaccatgaagcttgaaatcttttctttttcttttttattttatttatttatttattttttgagacagggtctcactctgttgctcagactggagtgcggtggtgtgatcacagctcactcagcctcaacttcccaggctcaatcaatcctccagcctcagcttcctaagtagccaagactaaaggcgtgcaccaccaacccgactaattttcttatattttatagagatgggatctcactgtgttgcccaggctggtctcaaactcctgggctcaaatgctcctcccacctcagcctcccaaagtgttgggattacaggcatgagccaccatgccctggccacttggaacctcttcttgttctccccagatgtttcttgggagcctgggggacagacgattcaccatgcctttggctcgtgctctgcctccctgtgcatggatcgcgctggggctggcgccgacattcctggcacagggcttggtcgctcattcaggctgatggccgccctttgccctgtctcctttggccggaggcagctgggttataatttgctccttaggcttggaagtgcagccctgccacactgcagcatgtgtttgttttacaatccacagacaagaagaagggaggcaaattccagccttttaaaaagttgtttggcaaaaggaaaaagaaagacccttcgttgttccgggtgccgtcgttggggaagaagagttactctcaccagagtgtcagcaatgggaccttctcttcggatgaggagaccctggaagacaatctaaggtaataacttgcactttcctttcagatctttggtggagtcccagggtggggaatgggatcccaaaggaagtaggtgctgtttttggttccaggagacaagaacagaatcccaaacggggcagggtgttgggatcactcctgtaatcccaacgctttgggaggccgaggcgggcagatcacttgaggtcaggagttcaagaccagcctaggcgacatggggaaaccccgtttctactaaaaaagtacaaaaaaattagccaggtatggtggtgtacacctgtaatcccaggtactgaggaggatgaggcacaagaatcacttgcttgaacccaggaggtggaggttgcagtgagctgagatcatgccactgcactccagcctgggtgacagagtgagactctgcctcaaaaaaaaaaaaaaaaggatcacaaatgggttccatctctgggaacgtgtaagacttggtgtattctgcatggagaagtcaccttggggagttatcaaatgagtctgacctcattttctgggagtgcacaggaattgggcattcatttcgctgctcttgtttgtggaaggaggcaacatttcactggcttggctcaccagggttcctcagattgaagaagactgtgtttccttatgccattgctttacaaatagaaaggttgtcatgggctagactttacacccttgttgaggatgcaggttgctcaggcacaggtggtcacccttcatacccctggccatctctagcaacttctggagcctgtttatgatggagcttttgcctgcctgcctgcctgccttccttcctttcttccttccttccttccttccttcctccctccctacgtccctccctccctccctcgtttcttccttccctccctcctttcttccctctctctcccccacttctccctttcttcccttccttccttccttctttctttccccgcctcttagaacacaggcactaaatctgggtgtgacagtgtcaggaactcagaaaagtagggtcaggaagtactttcttacctgagtgcttggaattgaagtcagtatcagagctggttaaactctgatactgacagcttagaaaccagctcctctgagaaaccttttccgacaaccccatctgatttgtttgcccttgcctgtgttcttgtagcattgtgtgcctggtttcagcagagaacttgtcactttctatggaaattattgatttgcttctgtcttcttcacttgactgtcagtttcatgaagtcagggactaggtttcattcagccttgtattacgtgctcaaaaaaatgttttccatgaatgcctgacactgcataagctaagcggaaggaatagatggtatcatatgtgatattctcaccgtgcttcaaggacagagacaaaaatatcctctgtggtgtgtgtcagtaagtaaattctaatgaacactgctgttgtgtctaaattacaaaaccctcagaccagtggtacacattaattttacagcaaatattcaccaacagcatttgttagtcctgatactgactcttttccttgacagccctgtgtttattttctgttgtctttactctgtagggtaagaaaatgatttaatttgacgcagggaaagatgtaactgaaaggagagcacagctagtgctaactcactcagctgttggaatgttgtcccagtggatagtcaaggagtgtgcagtttgaatccattttgattttacttcaggttttcaattgtaaaataagagcgtgaactttttggcctcacggtatcaggatgaggaacagatagtaaaatgagagtaagtggcagtttaatacaaaatgaggtcaagtctggaaagttctcccttagagggacagttctatggaaacacaacccatcctttttgtagtatagtaggtatagcatagttttgccaagtctgatttcatattgagccatgttggactcttacaggaatgtggaccctggaggttctcttcccatttaagtcttatattctgttaacttcttggggttttccttaaggtttcaggttttacaaagccttgggaaattccactttggatcaaatagctgcatttctaataatgtcacctgtcctcgttattgactcttgtccacaaacctgcatttatgagacgtgtactatattttaattaaacctttttataataaacacatctcttaagtaaggatataaaaggataagctttggactattaatttttaaaatgtcactttaaatatttaaaaaattagtgggtatatgcccagaggagtataaagcattttaccataaagccacacgcatgcaaatgttcattgcagcactgttcacaatagcaaagacatagagtcaacctaaatacccatcagtgacagattggataaagaaatgtagtgcatatgcaccatggaatactttgcagccacaaaaaagaacaagatcatgtgttttgcaggaacatggatggagctggaggctattattcttagcaaactaatgcaggaacagaaaaccaaatactgcatgttctcacttataagtgggagctaaatgatgagaactcatgacacaaagacggtaacaacagacactggaatctacttgagtgtggagggtgagtggggggaaaggagcagaaaagataatttactgggcttaatacctgggtgatgaaataatctgtacagcaaacccctgtgacttgagtttacctacgtaacaaaccttcacgtgtacccctgaacgtaaaataaaagttaaaaaaaaattaggatagaaacacagcaaggtgtggcagcaagtgcctttaatccctgctgctcgggaggctgaggcgggaagatcatttgagccaggagttcaaggctatagtgcgctatgatcatgtctatgaatagctactgcactctagcctggacaacacagaaaaaaaaagttagaagcacaggaaaatagaagtaattaaaaaatacatatttctcttttctagggaattgacaattgcaaagtaatttcacctacaaagtaaatactacatatgttgattatggtataactgagcttctaattatttgccttatttacagatggagaaaatgaaaaatgttcttttcagaaattcttatttttagttcatggttcaattaacagactgttactttacattgtgtaatgattcaaaaaattttctgtacattttatttgctatctccaaaatggacagttctcacaaaagcacaaaactcaaagctccattaacgtgattttgggtagaggttacaagaaggtagatttcagcccaatgtgagggagaatttcctaattagaactgcctgaaaatgggaggcttggcatgtgcccacaaaggttgaggccagtgaaggtgggatttcggcactgggtgggaattgaagggagctgaactttaacatcctgtcaaactcccaagaatctgaaattctagaaatgttcccatgactgagaatagctccttattgatctgctccttctgcctgaaaatttccatttcctttgggtttttaaagcattcttttctttctctaggttagaagcctttatctctcctaggctgctgcttgtaaattatacattccttgggaaaagcaaagcaataaaacatgatccatttttaagaatctaatgtgatttcttttcttaattaaacacaactaatattatgttcccaaaggcgtgttaaaacagttgttaaattttaaaagagggagagggtcatcttggtaaataggtttggggaattctgaacaaaaacaaattaaataggattctttatgtgggactcgacagaacttttactatgcgaatgtgtcctgtgaatccctaggaagaaggatgtagtatgcagtatttcaatattcctttgaccgtagaccctttttccactgagaatatccaatggcatgtattaaaggtaccactaattgaagttattacagtgtattcacttttgcataggtgaactcatataatatttaccacaactatttaagattgatattattatcaacagttcaaagatgagaaaactaaggctagcaggtaatttgcctaaggtcatatagcttataaatccctgagccactattcaagcaataaagagtgcattcttaaacatccactactgtgcctctcaaggaggctgcagcctcactagggagctactcatatggccctgaatcatcatactggtcctgagtcactaggctcagatgtctgcctgcctccagctgcctgattgaggctctgatacttactgggactctacttgtcctgcttccagtttctactgaacacccagtgtttgttacatcatgcataagtacaacactttatattaagtgccagatgtaagcacagtgagatgtgaaggagttctggagaatatgagctcacttggactggaacagtcgggaaagggttcaggaatgagggggccttgagctgattccaaatgatgggcaggacatggagtagctgagagggaaggcatgaacctgtcagataatggcataagcagaaattttcatggaagaaggaagatgacaaatagaataggagggaactttccaactctgtgaggccagtgttatcctcatattaaaatcaggcaaagatatcacaagaaaaaaactccacagaccaatatcctttatgacaatagacacaaaaatccttaagaaaaaactagtagcctgaatccaacaacatgtaagaaggcttaagtaacatgaccaaatgggatttatcccaggagtgcaaggttggtttaacataaaaaagccaatcaatgtaatataccatattaataaaataaaggataaaaaccacatgatcatctcaataaatgcagaaaaactatttgacaagatccaacatcctttcatgatttataaaaaaaaaaaaatagacaacactggaaatagaaggaaactccttcaacttgataaagagcatctgaaaaatccacagctaatatcatatttaatgatgaaaaatgaatgtgatccccttaagatcaggaacaaaacaagggtttcttatctcattccttctattcaacactgtattctacagtactatactgttggctatagctgggacatttagaaaagaaaaagaaataagaggcattaatcttaggaagaagtaaaactgtacttgcagatgccatgattgtatatatagaaagtcctaaggaatacacacacagaaagctattagactaataaacaagattgagcaaagttataggatacaagattggagtttttgtatatcaattgtatttctgtactctagcaatttataatctaaagatgaccctaggaaaacaattccatttacatagcatcaaaaagaataaacgacttaggaataagtttaaccaagaagtgcaagacttgtacaccaaaaatgacaaaatatcattgaaagaaattaaagaagattgaaatgatggaaagacatctcatgttcatctattggaaaacataatattgttaagatgacagtactccccagattgagctacagattcaatgtggtccccatcaaaatcctagctgtcttttttcccccagaaattagaagtggatcctaaaattcatatggaattgcaggggacccagaatagccaaaacattattgaaaaaggagaacaaagatggaagactcacactttccatttaaaacacttactacaaagctgcagtaatctaaacagtgaagtactggtataaggatagatataaagataatggaattgaattgagagttcagaaataaactcttacgtttgtggtcaattgattttcaataagagtgctaagacaattcaatgggcaaagaagagtttttcaacaaatatttctgggacaattggatagccacatgcaaaagaatgaaattggacccttttttacatcatatacaaaaattaactcaaaatggatcacagacctaaatgtaagaattaaaattataaaactcttaaaagaaaaagtaaatttccatgaccttgaattaggcagtggtttcttaggtaccaaaagcacaagtgacaaaaggaaaaacagaaaagttggactacatcaaaattaaattttgtgttacaaatgatatcatcaagaaagttataaaacaatccacagaatggatggaaatatttgtaagtcatatttggaataagtaaaaataaaaaacaaaactcccacaactcaataataaaatgaccccctccccaaatttttttttattgggcaaaggattctaatagacatcgctccacaaaagatataaaaatatcaattaacacataaaccatacttgctcaacatcattagccatcagggaagtacaaatcaaaaccacaaatgagatattatttcacacccattaggaaggctacaggcaaaaaagatagacagtaacaagtgttgatgaagatatatagggattggaaccctcacacattgctggtgggaatataaaatattaatggtttagggtaatgtttagttctgatcccataccttcactttataaatggggaaacaggctcaaagaggtgacagtgctattagtgttagaaatgtgactacacccactgtcctgcacccaatgtccgacaatccccagtgagatgcacctggtacctcagatggaaatgcagaaatcattcatcttctgcgtcgctcatgccgggagctgtagactggagctgttcctattcggccatcttgggtaaactaaagagcttctgcacagcaaaagaaactaccatcggagtgaacaggcaacctacaacatgggagaaaatttttgcaatctgcttatctgacaaagggctgatatccagaatctacaatgaactcaaacaaatttacaagaaaaaaacaaccccatcaacaagtgggcgaaggatatgaacagacacttctcaaaagaagacatttatgcagccgaaagacacatgaaaaaatgctcatcatcactggccatcagagaaatgcaaatcaaaaccacaatgagataccatctcacaccagttagaatggcgatcattaaaaagtcaggaaacaacaggtgctggagaggatgtggagaaataggaacacttgtacactgttggtgggactgtaaactagttcaaccattgtggaagtcagtgtggcgattcctcagggatttagaactagaataccatttgacccagccatcccattactgggtatatacccaaaggactataaatcatgcggctctaaagacacatgcacacgtatgtttattgcggcactattcccaatagcaaagacttggaaccaagccaaatgtccaacaatgatagactggattaagaaaatgtggcacatatacaccatggaatactatgcagccataaaaaatgatgagttcatgtcctttgtagggacatggatgaagctggaaaccatcattctcagcaaactatcgcaaggacaaaaaaccaaacaccgcatgttctcactcataggtgggaattgaacagtgagaacacatggacacaggaaggggaacatcacacactggggcctgttgtggggtggggggaggggggagggatagcattaggacatatacctaatgttaaatgacgagttaatgggtgcagcacaccaacatggcacatgtatacacatgtaacaaacgtgcacgttgtgcacatgtaccctaaaacttaaagtataataaaaagaaaaaaaaaaagaaaagaaatgtgactacactccaagcctgcccattttgcacatggtagtgcttgtttcttgaatagccccatcccccatctccacctccttcctttgtctaattcctctccatccttgagttttctgcacaaatgtgccttccttaggagagcaagctttctttgattccctcagcctagatcaggccccttcccctgacattgttctcacaacttccttgacctttccctaaaagtaagctttgtgacttgccattcgttgtatttcccgcctctaacgctgggcccggcacatagcaggtattcagtaagcatttattcaatgaatgaatgcattgattactgctcttccccatactgacttttcccactggacaagtcaatattcatctaatttggcctccagtttcccaccttggtaaagagtatcactgtccctcagacctgctggaaaaggaagaatccacagttggtgccatgagacttcatgttaccaatgaagttatactgaagtgcaggctccctgcttaccgttgtttgcattgattcacctgaccttgctgcgtttcagaggatgaagtcagaaaggacctgttttacttgactgtttatcctctatccttaggaagctgggatgtgctgaaattgaatagggaatggtgaagaggtgcaaaacccattaaataaaaattaggtactaagcaggaaaatcaacagagctgagctgaatatgtctagagaaaaagaaggttgatgaatcagttatagcaggggtccccaacccccaggtggtgaaccagtaccggtgtgtggcctgttaggaaccaggccgcacagcagggggtaagtggcaggcaagggagcattactgcctgagctccacctcctatcagatcagcagctgcattagattctcatgggagcatgaaccctattgtgaactgtgcatgcgagggatctaggtggcgtgctttttctgagaatctaatgcctgataatctgaggtggaacagtttcatcctgaaaccatcttcccagccccgtccatgaaaaaattatcttccacaaaaccggttcctggtgctgaaaaggttggggactgctgaggtatagcgattcttagagatacaatatgtggtaaatgcagcagaacaggagctagggacctctcaggaagccaggtgtctcactcgagagctgtgtgaccctcacctagctagcgccttcgtctcccaggattattaggaggacaaaaatgcatatgacattgcgctatctgcaataaagcactttaaaaagcaggttaatattagtattgagataaagaggatattgatgactactatttccagagcatgaaccagaggaaaattgattcaaatgacagctacagaggtttatggaaagatctttctccacatggggaaacgtaggagtggaataaatagcatggaagcctgtgaagtgggctttagaggcaagttagaagatcgtttgtcttaggtggtgtcttaggactgagcttacagaccggagtagatgaccctctgacttcaattctaagattctccatttgagattccaaactttcctcctcttccttgaatttgtatgacgtaccctgtttcttttgtaattaacaggtaatttggtacactatagcctatcaaatagcgtatattttgatagaatacggaagttcaggatgagcctctaagtcagataatctgactccagtctcttccagcaactctagtttgtttgatgaggatatttaattgctctttaacatttcatttgaatgagactcacggatctgtttaggaagaaaactgctgatcaattgcaattgcccctgttgtcatggaaacaagctgaaatgggactataattatatttccttattcctgaagtgaatccctaatcattgccatagtaattacccaatatctatggtcccaaattacatgattcttgtccaaaaaagacaaaggataaggaataggagggctggcctgaggcatgcattcactgtgcagctgcagaaagccttctccttttttggatgggaagaatttccctctgtaggctcacactccacagttggatgatgtcagcaggtcttagattgtgcccagtgcttagaagagtggctagaaagctgtatcaggtaggatgattgcagttttaacagaaatcagaactactagcatcttcaacaggaatgaagtatattgtctgatggaccagaaagtctggaagactttccaagttccaaggttggttgacgaaatggcccagcaacatcaccaggatccaatctgagtccctttttctctggcatcctcagggagtggccttttgtcctcaggtttgttccctcatagtcatcacaagatggctgtcacagttccaggtgtcataggcggatgacaaagaccacagacagaaagaaggcagtccctgtcttgtatgattgtgaatgaggagaactttctcagaaaggcctctgcctaccaaactgcctcttgcttttcattgttcctttcgcatagatgctatctttcgcagatagtggcaccagacgacagagcttaaaatagagatagctcttcctgacgcctctccgctctccttagctctaagtgcctagtgtgtgagagatggagtagtgtggctgcagggctaacttagtttgttttgctttcctttgcaacctctctctttgctctgaccttcaagtgtgctgagctccaggtcacagacccagcatacacctctgtctcatctctcccattcctccagataggtatgagcatagagcactgggcctgggtttcagcatcccaggaccatggggtgtgacaacctttgctctcaggcagcagcacatgccaccaagaaagaagggcagcctcctggggagaagtagaatcacaatacagggagttgtgcaagtgagtcatccatccaggtgggctagactagaagagagaatccagacgcagacctagaagcatagtgtggtagctgtttttttggtcacttagccattagcatccagttccccttctcaagtcaaggtgactccctgaaagctccttcccttttagggagttgtctttaccttgctgtgtgtagctctggtaggacatagtgcctgcttcctagggcagaaatcaaaaggatcagatcttccccttcccctcccactgcagcctggtgtaagcctgcaacccagcctggccaatcacatgttctcccctaggactttgacttggcaggtgagtcaaagatgtagggaacacagcttctaggaggagcagttactggctcactgtgcggcctaatggcggctgtggctcctgatgcctaggctctagagctctcctacctaactccagtgtttttccaagcctgcagtctggtttcttttgttctgtgagcctcaactgtacttctagtacattttctttaggtagagtgaaacaaagtttctgttgcctacagatcagactggtaactgacacatgtagacaccaggaaaactaggtgtgagagagaaggtttgaaatagaaagtgggaagcaaagcctggagcagctccctggtttaagttgaaaagaagtctcaaaagaaaccttgagagaggctgaacagcctcctgacttgccacccgttggcttcttggagctttctgcagtgacctcctggaaaacagccatgatctgaacatattctgcgttttcccataacacatctgcctcacgctttccattgtgatctctctacagaaaacccacctggtaaaccaactcaccctacagtagtaatcattttcttatcctttgaaaatgtttggtggggcacagcggctcatacctgtaataccagcactttgggaggctgaggtgggaggattccttgagcccaggagtttcagaccagcctggtcaacatagtaagaacccatcctaaagtaaaaaaaaaaaaaaaaaaaaaaaaaattgctgacaaatttgataatagaaagcactatgggaaaaacaaagataatagatgtgatccctgacctaacatagtactggggtggagataagatggtatcactattgtcagtaaaatcacattggccaggcatggtggctcacgcctgtaatcccaacactttgggaggctgaggcaggtggatcacctgaggttaggagttcaagactagcctggccaacatggtgaaaccccatctctactaaaaatacaaaaattagccaggcgtggtggtgggtacctgtaatcccagctacttgggaggctgaagtaggagaattgcttgaacccagaagatggaggttgcagtgagccgagatggtgccactgcaccccagcctgggctacagagtgagactccgtctcgaaaacaaaaaacaaaaaaaaagaatcacatctgtgtcgtactttacaacatgcaaagcacttttattttctctctcattaaaggcttgattacagtaaccgtaaggtcaaacagcatgagattcatacaaagagattcctgagggacaaaagggagcaagaaaaggtttgtggggctgataaggtttgagctggatctcaaaagatggtgtattagtctgttttcacactgctataaagagactgtgtaatttataaagaaaagaggtttaattgactcacggttccacaagcttaacaggaaccatggttgggaggcctcaggaaacttacagtcatggtggaaggtgaaagggaagcaagcatgtcttaccatggtggagcaggagagacaaagaacaaagggggaagtgccacacacttttaaccatcagatcttgtgagaactcactcactatcacaagaacagcatgagggaaatccacccccatgatccaatcacctcccaccaggccgcccctccaattcaacgtgagatttgggtggggacacaaatccaaacctcatcaatgggtaagaaccgaatttcgagactggcactgggcagtccatgcagcagaagaccctatgcggtaatagaacccagtgatggtatttgaggaacttacaggtcaggtttgcctcatgggtgcttgaagtagggtgacattagataataactttttttttttaagagacaatgtcttgctctgtcacaaaggccggagtgcagtggtgggatcacagctcactgcagcctcaaactcctgaattcaagcaatcctcccacctgagcctcctgagtagctgggacaacaggcacgggccaccacgccccatgaattttttattttttatttttagagacagggtcttgtagtgttgttgcctaggctggtctcagactcctgacctcaagccatcctcccgctttggtctcccaaagcactaggattataggtgcccagcactgcttacaccattcttagtgttttacatatcataaatttaattctaatgaaagccctgtgaggtaggtcctattattatccccatttaacagttaaggaaactgaggcacctggaggtttagagacttgctgaaagccacacagctggtaaatggtagaactaggtttcagaggtaagaactaatccctaagaggtaagaggtaatccctacactacacaacctctgtttcatagagccagagtactttagggctctggcatgaagagccttaaatgccaagcaaccactgcagctttatctgggaggattttggcatgggaaaacaccagtggtttctgagctggcaaattaactcctttaagattaatatagggggctaggtacagtggctcatgaccgtaatcccagcactttgggaggctgaggtgggcagatcacttgaggccaagagtttgagaccagcctggccaacatggcaaaaccccatctctactaaaaataccaaaattagacgagtgtggtggcacgcgcctgtaatcccagctgcttgggaggctgaggcgtgagaatctctggaaccccagaggtgggagttgcagtgagctgagattgtgccactgtattgcagcctgggcaacagcgtgagattctgtctccgaaaaaaaaaaaacacaaaaaactcgggaggccgaggcaggagaatggcatgaacccgggaggcagagcttacagtgagccgagatcgcgccactgcactacagcctgggcgacagagcgagactccgtctcaaaaaaaaaaaaaaaaaaaaaagattaccgtagggtttcagagaaagctgaattggaaaagatgcaacttggagatcatttacagatgtcaattatattgcaatagagtggaggtaaaaccagggcaacagtaacaattatacactcattgatttttcgactgctctcggggttcctgcatttatttctgcagattcccgttaacatcttactgtgtgttcaagagcaagtcctctggctcccactgctgccgtggtcagggtgatgagcatcatgccagtgacttcctctcaaaaggtccgggaaaacaaagtctgcaacggcttcaacataaaaagtaataataaaaataaaagcttcacctgagcaaaggttacagtgtgtgagccctaaccattgctgctggcatgcttattagcataatcatcctatccatatagtattccagcaaattgcaatgactcatccaggcctccgctgagtttcctaagctcttgacaactttaagcacagaaacaagcccttcaaaacgccctgtattttgatgtatttgctgccaaagtgagcctgacagtactatgtttttattctataacagtcttttattcccttttatttttagaggcaaggcctctgtcacctaggctggagtatggtgacgtgatcataactcactgcagcctcgaattcctgagctcaagcaatctgcccgcttcagcctcctgagtagcagggactgcaaatgtgcagcactatacttggctaatttttttttttttgatacagagtctctgtcacccaggctggagtgcagtggcatgattttggctcactgcaacctctgtctcccaggttcaagcaattcttctgtctcagcctcctgagtagctgggattacaggcgtgaaccaccatgcttggctaatttttatatttttagtagagggggtttcaccacgttggccaggctggtgttgaactcctgacctcaggcgatctgcccacctcggcctcccacagtgctgggattacaggcaagagccactgtgcccggcgaacctggctaattttttattattttttgtagagatgggctcttgctatggttcccaggctgatcttgaactcctgggttcaaactattctccctgctcaaagcgttgggattatagccattagccaccatgcctggccctaaagtcgttgtttggagcctctgggtaaaatcttggagtttaattcatctgactctgggtaaaggaaaggaaagaggaggtggagtaaaggagaaataccaatgtgtgtttcctgctgtctttctaaacccataatgagttagatcaaagggcttaaatgttttaagatgtaggtagaacaggaccctgtaaacctctgtgagtttttcttagtgctaaacgcatcttcccttagaattgactaagcctattcaaagcctctagtctgtagctaatggttcctggagtgggttcatggtatttgaaccttcttgggtaggagtggcatggatggaaccctatgggctattgttctgtgcatcaggtaccaggatcaggttttcgagaactgacctcaaaatttcccatgattttaggcaaatgtcaaggatttttcctcttcttctccttttttcttcctcttttcttaatttcctcctcttcttcttaccttcctcctcctgctcttctttttttaaaaaattccatttttatttcagattcagagagtacatgtataggtttgttacaagggtatattacgtgatgctgaggtttgagcttcgtttaatccagtcacccagatagtgacgaaagtacccaataggaaatgtatcagctcttgccccccgctccctccctctctcctattggagtccctaatgtctgtgtgttcccaagacttggttcccacttataagtgagaacatacgatatttagttttctgtttctgcattaattcacttaattgcatgtcatcctcgcacagggaccatgataatctccatatcgttccagttgtagtgtatgtgctgctgaagtgctcctactcttcctcttcctcttccttctcccctttctttcacttctttggtcttatgagatcgctactgatctttacagatattgactgtttaatttgggtggaggagatcaagatgatgtagatcttctatgtggaatggggacttacggcacacctatttactttttcagccgtgtctacacatagatatgagtcataaggctgcattcctgtatttttaaaatcttcatcagcacacccatgttcattgcagtgctacttacaatagccaaaaaggagaaacaacccaaatgcccattgatggatgaatgtataaacgtgatatgtacatacaatggaattattcattcttaaaaaggaaggaaattctgacacatgctacaatgtggatgaactttcaaaacattatgctaagtgaaataagccaggcacaaaaggacagatattatattattccatttaaaggaagtacctgaaatagtaaaattcaaagagacagaaagtacaatagtagttaccagggactgcggagaggggagaatggggagttattgttgcatggatatgaagtttaggatgatgataaggttctaaaagttgatagtgctgatggtttcattgtaatatgagtgtatttaatgccactgaactgtgtacttaaaaaatgttaaaatactaaattttatgttacatacattttatcgtaataaaatcttgatcaatattatacaaatatgaaaaaatttatggctgctgggatcccacttggtaatgacagattttgtgtttaagaattaaaactgggctgggcatggcggttcacacctgtaatcccagcactttgggaggccaaagcaggaggatcgcttgagcccaggagtttgagaccagcctgggcaacatggcaagatcccatctttatgaaaaaaataaaaacttagccaggcacggtggtgcacgcctgtatttccagctacttgggaggctgaggtgggaggatcccttgagcctggagagttcgaagctgcagtgagcagagagaccactgcagcagaatgcctgggcaacagaatgcctgggcaacagaatgagactctgtctcaaaaaaaaaaaaaaaacaaagtaaaactggtatatcctcttttgtataacatttgcaatcgtgggtgaactggaaccctcttaatgctcctttcttgtcgtgatctagcagccaccattcatataatgtcattttctctaagaaatccaaacatctgtaaacactgtattaagccgtgtcaataggagccaggagcttgagctctggtttctgttttgattgagtctctctcttcactttgctgggcctcagcttctccatccataaagacttgggtcttggactccatgagcacagaggggccctttctgcagtggctgttggctgtgtgagggctgtccctgtcatcgctgatacagtacactgccttttgctgcttccagtttactcgtagagactcactagagatgtgaagagcagcgctccaggcctccaggcataggtgcagagaaatattggcaggcagagtggaatgcaggctcagaataggtctgcgagctcaggatttccagtcttctgcatgagtttttacattgtctttgaaggatttctgaaagtgaaagcacaggcgatgttatctgttaaggtttttgcattttatcttcctcctaatctggactttacctcacttacaaaataatatagcacagagcccgggggatgagagtaacaaagaaatagaaaagataggagttctgtgggaagattgatgaattcatgttaagtatgcagaaacagtgggaaagtcactccactgtagctggagacacatgaggagaagaagagagtattggagtgaggcagttattaaaggtaaagccagaagagcaacctcaggctgttctcccatcaatgtctttggaaagataactgcaggaggcagtgaaaagtagaggggcaagtccaaaagctggtatctttgggctgattagaaatgcctgatgaaatgtttcaaagcccaacctgtctgtcaataaaaataatatcaatgacaacagcaaatcaggacagaaatgtagaaatgacagttaaaacatctcagccatgctcctttgtacatgtacataggagagctgactgccttctaaagccccaggaacttctgctcttgggacctccaatccaaagggaccatttttctggcctctgtaagtcggggctgtgattcttttctaggcttatgaaaactgtgaaaactgttgctcagataccagtgctgttctgaacttcccaagtgggcctttcttcctgtctttgtagagttggcttttaccatgcgtgctttgcatttgacttcaaatcttgtttaaattaaaatgattgttaaatgactatattgacaatcctccagttgaaggtttaaaatctgtgggattttagaggtctttatacagctcttctcacaagcaagaggctgctctggttctcagtagcagaagagaaggttcccacctggcaagtccattttctatcatttgagcagagagagagtgagggaaagttgcagcattgaagctgaaaggcccctctctcttggttccctcttaaaaggaagcagggagaggtggagttggcctgcttcacaatcaactgcgaaaggtctttaaatgtcaagaataaagaagtccggacgaactctgctaaggtacaatttgtggtaaattgcctctccacctcccaatcatgtaatttgcacttcccagatggttaaggaccatggttccaccaagctctgtgttcattagaacatggtttcaagctgagatctccacgcaaaggctattcagtttcaattccaaccctgcctcaaattttggaactttgggcaatatttttacccacctcagcttccccttcagagaacaggaaataatctacattgtagagttgtttggagctggaactggtaaccatgctcaccaaagatttaatattagatttaatattatacaaatgctgccctctttctcctgctctcaccacatgactgacatacctgcccccattttgccttctaccatgattgtaagcttcttgaaaccctcaccagaagccaaggagataattggtgccatgcttatatagcctgcagaaccataagccagttaaacctcttttctttataaattacccagcctcagatatttctatgcagtaacacaaaaatgacctaatatagaaaactggtaccaaagaatggggcattgctataaagatacctgaaaatgtcaaagcagccttggaactgggtaacaggcaaaggttggaagagtttggagggctcaggagaagaaaagatgagggaaagtttggaatttcttagagactggttaaatacttgtgactaaaaatgctgatagttatatggacagtgaaggccaggctgatgcggtctcagatggaaataaggaacttactgagaactggagccaaggtctcctttgttgtactgtagcaaataaattggctgcattgtgttcattccctagggatctgtggtagtttgaactcaagagtggtgacttagggtatctgttgaaaggaatttttaagcagcaaagcatttaagatgtggcctggctgcttctaacagtttacacgcagatatgccaaggagggggaccttaggaaataacccaggctctcagttgaggctctgggaggaccacaccctagaagtggaggcaaaacagaagtagtctgagccttacaaagatttctaaccagccatgaattagctcagtctttgattggattgaagtgatgtgcttctttgctgtttgaagccttcaagaagatcaggtgagtcctctctggaaggagagaacccagcctctaaattttttttttttttgagacagagtcttgctctgtcgcccaggctggagtgcagtggcacagtctcggctcactgcaacctccacctcccgggttcacaccattctcctgcctcagcctcccgagtagctgggactacaggcgcctgccaccacgcccagctaattttttgtatttttagtagagacagggtttcaccgtgtcaaccaggatggtctccatctcttgacctcgtgatccacctgcctcggcctcccaaagtgctgggattacaggcgtgagccaccgcgactggccacctctaaaatttttgaggcatgatgtgtgaagtctaattaaaaattaccaagcatctaagaaacagaccacaagaaaaacaagataatagacagagacctaaaggtgacctagatgttggagtttcagatagactttcaaataattgtgattaatatattcaagaatatagtttacaggatggagaatttcagcagagaacttaaatttattaaacaattaagtggaaatttgagatctaaaatatacttctgaaattaagaactcagcagattggacttaaagagaaaattagtgaactggaagcaggtccatagaaatatccagtctgaatcatattgagtaaaaagaatggtagctataataatgagaataaaagttatgtggcttgtagttaaaagggtttaacatgggaggatcagagagagattagaggaaaaatggggcacaacagtatttaagagataaaggctgagaattttccaaagctgatgaaagacatcaagctacagattttagaagcattgtgtaacccaagctgaataaattaaaagaagctcacaccctgctacaccagagtaaaactgctaaaaaacaaagataaagaggctaactttaaaatcagctataaatgaaagatagctgtattagtgtgctcttgcactgctctgaagaaatacctgagactgggtaatttataaagaaaagaggtttaattggccgtgatcctgcatgctgtacaggaagcatagtggcttccacttctaaggaggcctcaagaagcttccaatcatggcagaaggcaaagagggagtgaggtgtttcacatggcaggagcaggagcaagagagagcaaggcaggaggtgctgcatgcttttaaacaacaggatcttgcaagaactcactcactaccatgaaaatagcaccaaggggattatgctgaaccgttcatgagaaatccatccccatgatccagccacctcccaccattggagactacaatttgacatgagatttgtcggggacacagatccaaaccatatcagtagatcatgtgtcttttcaaagatgcagtaatacaagcttatctacaaaaattctatgcttcaggtgttcaggtgttcaggtgtggtggcttatgcctgtaattccagcactttgggaggctaaggtgggaggattgcttgaggcaggagttccagaccagactagggaagatggcaagaactcatctctacaaaaaattttaaaagtagccaggtatgctggcatgagcctgtagtcccagctacttgggagactgaggcaggaggatcccctgaatccaggagttcaaggttgcccagcagctatgatttagccactgcactccagccttggtgactgagaccctgtcttaaaaaaaaaaaaaagaatcagcagtcatgttattataattgataaataaacttagcaaagtctctggttataagatcaatatataaaaataagttacattttatatccactaattaaaaaattagaaaatagaaattttagtctataccatttacaataaattcagaaacaccaaatatataagaataaacctatcaaaatatgtacaagacctctatacagaaaacttcaacacatttgttaagagaaattaaagatgatataaatacatgaggagtcagcccatgttcatggattaaaagattcaatattgtaaaaacatcagtttaaaaagttatagatttaatgccatctaaaagcaatctcaatagtatattcatgtatgtgtatatgtataaatttatgtagaagccaggtgtggcggctcacgcctataatcccagtactttgggaggccaaggtgggctgatcacttgaggccaggagttctataccagcctggccaacatggcaaaaccccatctctaccaaaaatacaaaaattaaccaggcgtggtggtgggcacctgtaatctgagctacttgggaggctgaggcaggagaattgcttgaacccagaaggtggaggttacactaagccgagatcatgccactgcactccagcctgggtagcagagcaagaccttgtctcaaaaaaaaaaaaaaaaaaaaagtaaaaagaaaaaaaagaaaagaaaagaaagaaagaaaaaaacccagaaaaccagagctgaaaaacttaaactactagatatcaagactccttaaaaagctacagcaattaagatagtgtgttattggtataaaaacaggtaagtaaaaaaagtaaaaacaaaacaacaacaacaaaaaacagacaagtagaccagtggaacagaggccagaaaaaattataatatagacagttacttaatttatagcaaattgctcattgtcttcaaaccttagtttccttgtccataaaacagccttactaacagtgcctaccacataagttttaaatattatatatcaaaaagattctgatattatgttaaagaggttagcatatatgcaagatacatcacaagtgtccaataaaatttagctaggataaatgttaccactgtgaccaccactattataattactactactgctattattacttttcattttctctatttttcaatatgatcatctggaagtgagtaatgaatggacatcagatctttgccggcaacaggaatgtttggagttcaacaccaaagagcaggagagtgccaattcttagcctatgtggaaaaataaatcagggggatagacttcatgacgcagtcaaggttgacttagaaactggaatggaacttagcctagcactggtgtattctgtacacacaactgtgagaaattagtaaacatatatatatatatatatatatatatatatatatatatatatatatatatatgccctttgcaaaaatacaatgtagaaatgaagtcatttaccccttctctcaactgagtcataaccagggatctgaaaaagaagtttagacagagaatattcagaagtgcgattccacaacttcaaatgaaaagtttatttcataacatttttaggtgaacttggaagctcagtttgtgacataggtcccaggttctttgaggacagggagatcataacatattaatctccctgcatgtttcctaaaagagtgcctcatatttcataaagggaattgctgctatatggtgccctgggttatttagctgaagacgtatgccttattctagctatttagtgtcttcaaccctctcacagtccaggccccatggcatctgcaccgtcttcctctcccataccctgtgtcactcatgatggcaatactatatgaccttctaccactttaaaatatggcagctggctggcatgagattattctcagcagatctgagttcagtttctcactctactccttcaatttggatgtctttatataagttatttactctctgagtttcatctgtcacaagatggtgatgatggggattaaatgagataatgaaagtaaaactccacacagttttttttttaaatcaaagtaagggttgatgtttataataattattattattgcctaagatcacatagccaggaggctcacatccaagtctttcatttgtaaacctcgcacacttttacaccgtgctgcctgtaatttagcaaactagatgataaaatttggtaattagtcttcccaactgggtctagacttgggcagataacaagtacagctgccccaggaccttgcccactgcattctgtaattcagttcggaggcactgcctgggaacacctgcccccaacgctggctattctttcatgcacttggtcactgagaaaaccccagtaggggcccctttctggggaggggaaggaggaggttgtgctctctctcccctccaagtgctgcctgtgttgcctggcattgtggcaatgtgcatgccttgctgctcttcctgcccctgtgaggagctggcagcctcagtgtgtactctttcccagagataagttagtttccaagatcaagtagggaacagtttgcttccttactgctatcttactcgcttacttctgctgcttcctctttgtgcatttctttttttttgtttgtttttttttttttttgagactgagtctcgctctgtctcacctaggctggagtgcagtggcgcaatcttggctcactgcaatccccgcctcccgggttcaagcgattctcccatctgagtctcccaagtagctgggattataggcgccagccatcatgcccggctaatttttttgtttttgtttttgtttttttggtatttttagtagagacggggtttcaccatattgcccaggctggtctcgaactccagacctcaggtgatctgcctgcctctgcctcccaaagtgctgggcttggcatgagccaccgtgcctggctgtctttgtgcatttcacacggcttatacctcattgtctggtagaagtccagacttcctccaagtccagactttcaactaaaaagtgttttagctgggcttagtggctcatgcctgtaatgccagtgctttgtgaggaagccaggagttcaaaaccagcctgggtaacatagcaagaccccagccctacaaaaaataatataaattagctggatgtgggagcagatgtctgtattcctagctactctgcaggatcacttgagcccaggagtttgaggctacattgggccatgatcacaccactgcactccagcctgggcaacagaataaaaccttgtctctaaaaaatataaataaataaaaataaaaatttaaaaagtttttgttggataccagccacctataaggtgttccatatatgcaaagcctgtcagaatggccctaacacaaatgtctcccattttcccgaaattgctaaagcatttattgtctctatcaacaattctctagtcctcttccaaagtctttgtttgggatgtgtacatctttcttccagtttggttgtcatctgaaagaaagaaatccttgcctcttacttctagatttgcatgttacttaataaattctggttggcaagacttactgggacaaaactgatagtgacagctcagctggagaaaggctcttccaattaaaagttctgcagtgccttctgtcttggatcctatacaaataagtaactgtctttgtgttctcacggtgaatggctctgaaccagggctatgtaagagatggggacccttttgtctacccagctccttggctgacccccagcagacagggacacaatgctgaaagtgcttgccgaatgagactgggaatgtgggtggagtccctccaatcaggaataatggaaaactgaattgccaaaagaaattttatcctaataaaatgaagcacatgatttaccttccaggtccttcaactattctatgggaacccgggcattttcccatgacagtatttttatccctgatgggggagcagaaagtgagcagacagttcaagcaatgtcacaggacaacatcctgggcaaagtcaaaactcttcaggtaagacagcttgagagtggaattacgagccataggaggggcccagttatgaagggaagtgggaaaagtcccgagcttggccttgagtaatggattgggaggtccagaggtcactcctggtgagaattattgctttcttgaattcaactgtattctctggaaacctcctgcctacctgcaagagctacactatcaccactgcagccatctgcatgacacaccctctccttttctttcaaattgttccctcatattttactggacatgaaaacaagtacccaagagaagctgcaggacttggggccaggcgcggtggctcaggcctgtaatcccagcactttgggaggccgaggcgggtggatcacttgaggccaggaattcaaaagcagcctgggcaacatggcgaaacactgtctctactaaaaatgcaaaaattagctggatgtggtggcacacacctgtaatcccagctacaagggaggctgaggcaggagaatcacttgaatccgggaggcagaggttgcagtgagccgagatcatgccactgcactccagcctgggtgacagagcaaggctctctccccaacaacaacaacaacaacaaaaagctataggacttggatgagaggaagagttcctaaccgttaagcattgcccataatccctgaatcagggctgactgttgactgagcgtgtgcacaacacatatccactttccgagtctctgtaattggacagtgaatgatacgactctatttttctgttgtatttgtaaatctcgccaccctaagccaccttgtctcagaagaaaatcacaaagctcttaagccacttccagttcactctgcagagtggggcagttttcctacctaaaatctactcgggtggtacctccctaacaatgaaaatataataaataattattcactacatatgattgaaatgacagataatacaggaaaagcaagaagagcagaggcacttagagcctgactatgaggtctgcctagctgcttggcagatagaattctctcatctggccaggcacagtggctcactcctataattccagcactttgggaggccgaggtgggtggactgcttgaactcaggagtttgagactaacctgggcaacatggtgaaaccccatctctaccaaaaatacaaaagttagccgggcatggttgtgcatgcctgtagtcccagcttctcaggaggctgaggtgggaggatggcttgagcccaggaagcagaggttgcagtgaactgagattgcaccactgcatgccttcctgggtgatagagtgagagcttgtccaaaaaaaaaaaaaaaattcgcttacccaagagaaatgcccaagcaagcacttctctgaggctctccagctagctgcttggagggtctccaggttatgaacagagggctctggtctgctggcttccacctgtctgtaagtctacaacaatggattaaatgaatgaatcaataaacgagcaaaaaaaaaaaaaggaaaagagaacaactgccctcagtagctactgatatgctgaagcactgtactcagtagagatcagcaggagatcgagaccatcctggctaacacagtgaaaccccgtctctactaaaaatacaaaaaattagctgggcgtggtggcaggcgcctgtagtcccagctactcaggaggctgaggcaggagaatcacttgaacccgggaggtggaggttgcagtgagccaggattgcaccactgcactccagcctggcgacagagagagatttcctctcaaaaaaaaaagaaaattatttgtgaggtgttcttgtttctatggagcgtaggctgtgtattttgtgatattttgtggaaattgtgtctggtcacatattccacataacacccagctaaatgtagcatgtggcagacagggaagtagccaagagaccttggaacgacacccaacttgcctaggtcttgatgcctgctgccaccgctgcccaaagccatagtcctgccctcagggccaacccccagacatgtccttcaaatcttagcatttcctaactggcttccattcttggttctagctggccgtgctctaacactttttatagaaaaagcaagctgtgacttcttataggttgaagaagagggaagtatggtgatggccaaagaaaaccttgacccccctcctccttacctttccttcttcaagtcttttgattcttgcaatattattcctaagaagttgtgaacttctggttcattggatcccctttctaagaggaatgacttacagatttcagttcacaaaacagctgtattttatgagagctttttaggagtttttaaaaaatcagataaaaatctcttgtcttcaatgatacctgctctgtcacatcataccacatgccactgccacgccaagaagtggatttagtgttgtaaaaaagtatactatataattctgcagtattggaaagatagaaacccaataaaaatatttctgttaacagtaaggcgtgattttaaataacctgatgtcataattaataaaatgtaaaatgactaacttccccgaagtgacaattgcataaacacaggaagaaaaatgtgagtaaagcagaataactgtttaatttgtgtgcgctcattttgacaatatctattcagatgaagtctgcctagttttgcttccgctgcatggattcacaagcttcctttcagctctgtagttatacttttgaaaacataaaaggctttgttcattctttgaggagggaaatggggaccattatcatagaaaatgtgattttttttttggcgtgacttgagatataactgaatcatccccaaaaagactgtgctttatttttcagtcgactaagcagtatgttcctggtaagtcgtagaagtgatagtaactttattaacttgcatgaatgctttgcatttttccatgacaacgtgatgctggtattgatgcttagtaagcagcctaagagaccgcccccttgtagatgccagcatggaatgagagaatttagttgtgtctgaggcatgtatgtttttatgtctggaattgtctttgtgtatgtgtgtatgtttatttttaaaaagagagaagtaatggaaaacacctatttgacagtgtatgtcctggcaagctgattagccaccattattaagacattcttctgagatgagatgtctactggagtgccttttttctctgtggcttaagaaacttcccagcccttcgagttcctagagacccacggaagggtgtctgtctgtaatgcctgcctttggaaaggctgccctctagtgcctgcacatggtgggctcaccgagaactgtcttagtttgcaggttggtatctctccacggagtacagaagaactcaatacagcaaaaaccagcctcccctttcctgagtaatgtgaatctaccatctgccacaatttctgtggcagatttaaaagaaaaaaatcactatttaaaagaaaaatcaccattttttttctaaagataaaaatagtgcacgtgcagagtgaaaacaaattttaatatatggggcagttatagggacaaaaccaacagtggtgtcctttgtgaggactctgtacataacagagtcgctctgtggccagtagtgtgaataccatttgaatgagtgacagaatgcagtggaatataaagccagccccacctggctgtatggctttgggtgaagtcgttcaacctctctggcactttctcctcctgaaaactaaggggcatgcacacaaggggtgatctcagggcccctcctgctcttaagatctgcgatctctatacaatcactattgaactgctgtagcatggagcggcttcagaagcttcgcacttcgttgcatttcagctacaatgaccttgacattccctacagctgcccaccagcatggatcagggagggtgcctgtttgtgtaagatcagaccgggctgtgaggtatgtaccaactggtgataaaactcaggggtaccacagtctgaggctgcaggtaattgttaggattataccacacctttgtcaggaaatgcttagtctgtttgtaccacggattatctggtgtaggagggaacaccgccatcctgagtggcttgtatctcccaccgagctggatttcacttacaaataccaaagtcatacattcggggattttgacaccttactgcagctgtcaaggacacaaagaataaacacccgctcttagccacttcttcctagagcaggatgtctttaattctgtatgctttttctttttttttattattattcattttaactatggagatacctgtagtttgctcaaaaagacagcaactttacttatttatttttttctgctttgctctttagacatagtctgaaggataggaaaatctagacactggcagagagctgcagaatatggtgtgctcggcatttccacattgtaggaataagccttataaatatggatatgcattcctgtaatgtcattctccagcattccacattacaacaaaatggtccaatttgaatgaataaaatatagttccttgtagctcacattccagtctcaacagtaactccattcatggccaccagcaacatggagtgtcagttgaggcacagatttccactctcccttctgtttatacttcccatgtgtataaagaaggagtctggaggctgggtgtggtggctcatgcctataattcgagcactctgggaggtcgaggtgggtggatcacttgaggccaggagttcaagaccagcctggccagcatggtgaaaccccatctctactaaaaatacaaaaattagcaggacgtgcaggcatgtgcctgtaatcccagctactcgggaggctgaggcaggagaatcgcttgaaccccagaggcggaggctgcagtgagccgagatcgtgccattggcactccagactcggtgacagagcgagactcctttgtaggaaaaaaaaaaaaaaagaaagaaggaacctagggatatatattttttttaaagatgggaggagtagtagtttatctctctgaaaacttaaagtctggcttatcttaacagtctggttttcagtgattgtttatttcatagttcctctcatgacaatgcctgagtagtgggcagaattaaagtaacaaaaaagacacatttatccacatagtcaattcacatgacacctgagattgtcaaacaggtgtgagcagtaaacttaattgttgatacaataaatcacacaaaatgtcctaacaaccagtctcctctgagttggctgaaggaagcattcggaggaggtaccacagggagagcctgtaggggcgaggccttggccttggccttgggtacctgaggactgagcaccatgcgtcggaccctgagtcctgccctggcctgggtccactgtctcatcccagatggctgtagggcatgtcttcgaggacagtgcttcgtctggacatagaaactgtagccctcctcttcgtcacagccaccattctcctctttcatcgcagtttctcttcctaagttccccagccaccagcctgagtttgttttctctggggggatttcaagtcaatttctttactaagatgcacactttcattctaaaaggcaacagcatgatgctgattttgccaggatgaacatatctgtgacatacgtgatagatacattctgcttccctccctccctctgcctcttctccctctgccctcccctgccaacatcccccagctgttgtaactgcagctggtctgctcttcctgggccctgctccctcttcttgcctatgcattttctctgttccctgtcccttcctctcgaattgcctctttaattctcaacttcacttcctaacattactcttttcatttctctgctttgcaccaggcaccttctttttcctgttcttattccttttttttttttttttttctttccatgttctcttttctgtttgtagatataatagtcattccatctttggacattatttcaattcagactgtgattacattttgccttattctttttttgtctcttaagcatcaggatggaccaacatgagtattataacaagggctctaatgaagtaaaacaggccaggtgtgatggctcatgcctgtaatgccagcacttcgggaggcggaggcaggaggactgcttgagtctaggagttcccgaccagcctgagcaacatagcaagaccccacccacctctacaaaaattttaaaaattagttgggcatggtggtgtgcatctgtagtcccacctatttaggaggctgaggtgggagaattccttgagcccaggagtttgaggctgcagtgagctatgatggcactactgcactttagcctgggcaacagaaggagaccccaactctaaaaaaataaaatttaatttaaaaaatttaaaatgaagtaaagtttaagtatattcaatttttgtgtgtgtgatgatggcaaaaatcctaattaaatggtattagagtgttaggccaggtcctccttggaaattcattaaagaattatcctttccagcggggtgcagtggttcatacctgtaatcccagcaccttgggagcctaatgcaggaggatcagtggagcccaggagtttgagacgagcctgggcatcatggtgagaccccgtcactacaagaaaatctgaaaattagccaggtgtggtggtcgatgcatgtggtcctagctacttgggaggctaaggcaggaggatcacttgagcccaggacatccaggctgcagtgagctatgatcatgccactgcactctagcctgtgcgacagaaagagaccctgtctcagaaaaaaaggaattatcctttccactgtaagcacaagaaatgtcctcatctcagcattggtaaaaagcagaccctcccaccaggacatgtctcaatctaaggggatttagaacagtttccagttcttggccaacactcctagagaaggctgggctgggcggacacaggaaccattcttctgcacaggtccccaccccctctcccaaggctgcagggtgaaatgggcctgttaccttgttattccatgtcctcttgtctaactccatccattggctgttctaaccatgcctgcttattgatttgcttagagtagatagatactacctgccacttcctgttggacttgtttttagaagacacccttttcagccttctcctccccacaacccttccaggctgctgacgctgtacttcccttgctgaacttggcttttcatgtgtgctcctgtcctgtgaggctgggagagccaggcatacaagcccttgcctggctgtgctcctgacttggcatgctggggtccccagggggcatgtggaggggacccttgggcttatctctattatatctctgcagtctcactgcccactgtgcaaggctgagggggagctgggcaaaggtgggtggttttggtaccgctgagttcaaagggagagaagacatttccctcaagggattcttgcgccagggaacatcattgaagtattagaaatactctgcctctttatttctgcccctggaagaaagaagtacaaagtcaaatttatgagcaccagtggagtacaatgaaaacaacactgaatgttatttttaaaagacctgagttcagattccttttgagccactcattctttccgtaagcttgggccagtcacctctctccactgggcctcagacattttttgcaaagtgaggggtttggagtaggtgattgctatggctttttgcagctctgtggggttaaatattagccagattagagataaatatcaggccaggtgtggtggctcatgcctgtaatcccagcactttgggaggccgaggtgggcggattgcttgagaccaggagtttgagaccagcctgggcaacttgttgaaaccccatctctacaaaaaatacaaaagttagctggctgtggtggtgcatgcctgtaatcccagctacttggaaggctgaggtgggaggatcacctgagcatgggagaatcatctgaacctgggaattcaaggttgcaatgagccaaaattgggccactgcactccagcctgggcaacagagcgagaccgtgtctcaaacaaacaaacaaacaaacaaacaaacagagaaagatgaacatttcagaaaatatattctttgaggaatataatgactatgtaacccaaggacctaggtctagagcagtggttctcagctgggggcaattttaccccccaggggactttgggcaacttctggagacatttttgcttttctaatctggccttcctctacttgcaaatactatttaatcttccgaatttctaccccattttcccctcccttttccctgtccttctagccaccactcaccagtagtcagtccctccctggcttttccccatttggttcctctgtctcctttgtcacggttaggtggccacagcaaggcaaagaggacgtccagattgttcctatcctttatagggttttagtattgatcatggaaagacttgctggccctggggccttctttgccttggcagcgacccagtgtggcagaatgcaatgttctggtttggggtctcaagctaagggctggtgaggaaggctgcggaagtataaatcttcaaagtgaatatgtcccaaaggggctggagagttgcaccaacctttagggtcttgatttccctcagtggttcctacatttcatgtaactgttttctataattttttttgcacttttaagagactttttatgtaaatgaatttataggttaatgaaaaatttttgtcataacatatatcccaacttttggttcagaaaatgtggccaccatgcccactgggaaatgttgggatctccatgaaagaggtggctggatgaaaaagctcatggcttgaaggtgggaaagaaaaaaaaagaaaagagaagaaagtggaaaacaaattaacttattacaggatggcatcatggtttcctggcatggtgttgagtctagaaatcagttgtgcacaaggtatgcctcagtgctcactagacatgctggagaacctggttgtggtggttgtgaactgcttcactgcttcagaatgtctttcttctgtttctctccagcaacagttgggcaagaatatcaagtttgggcagcggtcacccaatgccattcccatgaataaggcaaacagtggagaggctagcttagaagaggatctgttcctgaccagtcccatggaaattgtgactcagcaggacatcgtcctctcagacgcagagaacaaggtaagtctcctccagggaatgacttgatggctcataaaccagggcaggacattgggcctccagtaaccctggggtctgcagcaggggaattagagggaggagcttttctcatgagtagctcagggcttgagggcacttcctggtaggtgtcctgacctgtagccagtgaagaggacagggaggaagaggagacaagccctttgcaggcggtcttcccagtgtctttcacttacccttcaaggcttatgcctacctcttctgggaagccgtacctggcctcaccccaagctgtactgtcttcttgtgcctttgctgtgtgtctttaccatttttcacacgtctgttctccctatctatgtccatgtaactgttttctctccatctctaaacatgggattccttgagaacaaactgggtctgacacatctttgtctccctaggactgagccactgcctgctttgcagtactgcctaattatttgtccaagtggactaatttaaagggaaatgaaaaaagaaatgcgtaggggctccatgagatagaagacatcaaacaggccaacttgaagagtacctagtctggaaagaaagtcacattccagcaccatcctgtctaaatttgatctcttgacactttgagcatatcctgaaatgagagttcttccaaagcagcagaaaagatgcccttagacctcttagggaaaaaggagcaaagtccaaccagtagcgagtcaggaattctctaggtgaggcactggggtttcactttaaaaaaaaaaatgaaaaaacaaacaaaaaaaaaacccattctctaggctctgcctatcaagacccctggaattttgttgggtgttattaaaatgggcatgtctcagaagaaatcatgcattatcaactgatgtgtcatgagagtagtgagaaagacgagtgatttgcagaggcaagtgaggaagggatgtgaaaaaggacattcctcccctgttgcccattgtgacacctggcacccacgcattgacaccctttgtgtggtaggtcaagcagggatgggcccatctctcccggcagctctaaaattgctcttcccaacctctccagtgctaggcagaagcaacagccatcgccttggtgcaggggtatcctgagatctgaagcaaatgtcctcacagttattgatgagctcataagtgctgggcactgtggcctgggggattgtttgttcagcaggctctgtctcagatatgggtattacagaggtgagcaagattctacaaggggccccccatctctgtagtttacaccctaatgagagggtgtaacaaacaacaaacaagtcaaccagtatataaatagaatcatttcagatcaagaaaaatgctggctgcacagaaaataaaacagggtaatggaaaagtgagtaacttggtggtggagaggtctcttatttgggtgaggagtgtagcaggaccctagtgggagcaaggggagggtagagagaggtgccaagccggattgtatagaccatgggaaaagggtaaattctatttggaagataataggaagcctctgagtaattttaagcagagcagtgacataatctgatttgtattttctgaagattcttctaagtgtggtgtggagaacagacggaggtagggcaagctgacatggttgctctggaagggaagaaaagactcttttgtaagaaatggcaatacaggatagatggtgtcgcaggggccaggcagtatggctcatacctataatgccagcactttgtgaggctgaggtgggaggatcacttgatgccaggagtttgagaacaacctgggcaacattttgtagagacctcatctctacaaaaattataaaataggctgggcgtggtggctcatgcctgtaatcccagcactttgggaggccgaggtgggcgggtcacctgaactcaggagttcgagatcagcctggccaatatggtgaaaccccatctctactaaaaatacaaaaattagccggatgcggtggcgcatgcctgtaatcccagctactcgggaggttgaggctgcagaatagcttgaagccaggaggcagaggttgcagtgagctgagatcacggcactgtactccagactgggcgacagagcaagactttgtctcaaaaaaaatatatatatataaagtaaaaagttagccagacgtggcacatgcctctagtcccagctacctgagtggctgaggcttgagcccaggagttctaggctacagtgagctgtgactgtacagctgtactccagcctgggagacaaagtgagaccctgtctcaaaaaaaaaaaaaaagaaaaagaagataccactataggaggcatagtgggccatatgaaaggtacaaatgacctctgggggtctcctgggcatgcctaggacatgggggtgtgaatctttagcctttttcttctccctttctgctgttttcttggcccctccctggtctttcaccttctcagcccagctctttgcatgtggagttggtaggccttctttcttctcactcattgcttagatgggggaggtgtggctggagaaggggagaggcagccagcaaggccaaaagcattgaggttggaggccatgtatgagacacagccctgcaccccagggaaagtggctgttgagctactcacattctgtcaggcagtggagaaaaacacaaatgaccgagactggggactacccaggtgggaaacacattgaactcggggagaggctggtgcaccctctgtgtctcaggtagtgctggtggagtttggatattagcatagtctccactgggacacctgctggctctctgaggccagctgcacccctgtgtagaggagggggtgaccctacccaggcacagacagtgtctggttatttgcccagaacttcctgttcaggcctttgacttgaatgctctcttactgttccagtccagtgatacgccaagttctctaagtcctctgaatctccctggagctggaagtgagatggaagagaaggtaatatgatttgaacttatttatttggcttctttccttacttaactttcatcttcccccccccttttttttttttgcgacctgctgcctcattttccattcataaatgttgccttcatatatttaaattccttcagaatgccactagtgacagatgttggagcatctgtttccatggcaaggcaactgctggaactgaactctgctctgaaaactagccatactcccagcatgcctgtgtttggggtcctagaagttggtagctttcctcaaaggatcatgtacttcaagatcctgttaattgattgaaaaaggcattccagaatatccagtctgtaaggaaacgagtcctcttatatttagagaggcaaaacaaaaacaaaacaaaaaagcactttagcatttctctacttttatgttgttttttaaacttttctgtgtccttttttttaaacctgggactttacctgcaggagtgtaagaaccctgtggactcttctccccgggcacctcttctgtaggagccgatctgccccattgaggacctttcatctgcacaaggggccaggcattctcccaaggcctggcagacagtataggaagcaggatctgctcctgaagaaggggatggctcaagacagtgctgccgcccagacaatgaggaagccagctgggatagctagaaacaaagcacagcacttaaatctcagcatcaagtgcttatctatgtcttcaatctgtcacatttggctccgactcctttttctcatgcatctattaggggatggaaacaaatgtttcattcagcaatagcttagaatctcatgcccattataaagataaccataaataaatgaaagctagaaggccaaaacttgatttttctgtgcttcttgtcataaattaatatatactgagcatccattttgcttttagagctagctgcttggtctttcatcttttgtgcatatagaagataattgcaaaaagcaagcccatctgctaaacctcaccactccatgcctacagcagaaacaaacaaataaaccctggccacatcggagctgctggcatagtgccgcaccccctgccacactctagcaggagccctttgcttgctgccagcctgtgaattctctgtaggtacaggcgtggtgtcctaccttctaattcagtgtggcctgtgggttcgggctgtgtcacgatctctctgatctttccaaatctacccttcatctgaggttgtgtttttttttagtgattgcatctgtattctagagctgcaggccattccacaattcatcctttgaaggaccgcacttgtcccggtggcagatttttgccgctcatttttctcatcaggtccctcttccttttatcttctcagtgcagtcagtaccctgagacttctttggagcgattgtaccaaaacttttgtgtgtgtgtgacagagtcttgctttgtgggctaggctagagtgcagcctagcgatctcagctcactgcaacctccgcatcctgggttcaagcaattctcatgcatcagcttccccagctgggattacaggtgtgcaccaccacacccggctaatttatttttaaagtatttagtagagatggggttttgccatgttggccagactggtctcgaactcctggcctcaagtgatctgcccgcttcagcctcccagagtgctgggattacaggtgtgagccatcgcacccagccataccaaaacatttttgtcgatcaggaatttcgtgttccaggtatagatgctatactttattttcctttattccttcaacagatatttattgagcactgaccaaatgaggtttgctacgtgggtgtaaagggtacccatacaaagatgaaaaaagacacactcccagcctcaaagggactaagtcctgtgtaggagctgaggcatatatgcagtgtctgagagtttaacagttcttagcacagaggtgatctaggccaggggtcagcaaactactcattattttaggctttgtgacatgaagctacaagtactctcctttgtgccactcttccttcatagcacaaaaagcaaccaaagacaatgggtgtagctgtggcccggtaaaactctgattctccaaaacaggctgtgggcaggatttggcctcctggctatgttttgctaatcttggagctactctgaacctcatattagtcaaagtaggaaaattagttcctaaaagttatatgacttttacaagttaataccagtggacgctggcagaacaaatagtcaatgtcctttggttccaaaacgggtgttcatttcattttctgaggagttccctctgctcacctgcattccctgggccaggctgggcgaggcgcacactggaacgagtgccaccgttctgcgattccctgcaggttgtcttctgatcccaactgactttctattttaatctcccctacaggttgctcccgttaaaccgtctcggccaaaaaggcacttctcttctgctggcaccatcgaaagtgtcaacttagatgccatccccctggccatcgctcgcctggacaacagtgccgccaagcacaagctggctgttaagccaaaaaaacagagggtgtcaaagaagcacaggcgccttgcccaggtgtgtagagcctgcacgggctgaccaggcaggtgcccttgcctactgggcactaattctacaagtgggttggcattggggtggagccatgtaaagacctgagagtctccccatcgggaacttgagtgtgtggcggtgttggggaatacacaggcctgtttactttcctcgccctttctggcatgaggctggtggacctcagagggagcggttgccttttgaggggctccagacccgttgtgtttgctttgcagtggaaaagtggtttagccaatgctccctcagtttgactaggataggcttccaagtcacaagctccaggggacattaatgaagtccaagtctctttttgctcatctaatgcttgaatattggttttcctcgtttgttcatattaaggaaaggaattagggaatgacaaataaaggagctggtggggaggggggcgcggaaacagaatacacgtccttttctccattcgcacgacagagtcttgcgtggggtgaccgatgcctgagtttagctatccctgaacttgagaatacctgcttccaggtgttcttgagaaattaagagggtcgctggcactgtgaataggaaaaggaacgactgtgggtggagaaagcaaaaggctaattgtgttttcctttccaatgttaggatccacaacatgagcaaggcggccttgagagtcggccctgcctggaccagaacggacacccaggcgaggacaagccaacgtggcacgaagaggaacccaatccgctggattccgaggaagagagaagacgccaagaagactactggcgagaactggaggccaagtgcaagcggcaaaaggcggaagcagccgagaagagacgcctagaggagcagaggctgcaggcgctggagaggaggctttgggaagagaacagaaggcaggagctcttggaggaggagggcgaggggcaggagccgcctctagaggcggaaagggcgccgcgggaagagcagcagcggagcctggaagcgccaggttgggaggacgcggagcggagggagcgtgaggagcgcgagcgcctggaggcggaggaggagcgaaggcgtctgcaggcccaggcccaagcggaggagaggcggcggctggaggaggacgccaggctggaggagcggaggcggcaggaggaggaggaaggaagatgcgcggaggagctcaaaaggcaggaggaggaggaggctgagggatgggaagagctggaacagcaggaggcggaggtgcaggggccgcccgaggcgttggaggagactggggagggccggcggggcgcggaggaggaggatctgggggaagaggaggaggagggccaggcgcacctggaggactggagggggcagctcagtgagcttctgaacgactttgaggagaggctcgaagaccaggaacgcctgaaacccgaaggacaaagagaacactccgaggagccaggtatttgcgaggagcagaacccagaggccgagcggcgaagagagcagcagggaaggagcggggatttccagggggccgatcgtcctgggcccgaggaaaagagagaagaaggggacacggagcctctcctgaaacaagaggggccggtggaagccgcgcagcctccggtggagaggaaagaagccgccgcccttgaacaaggccgcaaggtggaggagctgcggtggcaggaggtggacgagagacagaccatgccccggccctacacgttccaggtgtcctccggagggaagcagattctctttcccaaagtcaacctgagccccgtgacgcccgcaaaggacacggggctcaccgctgctccccaggaaccaaaggcccccaaagccagcccagtccagcacgccctaccgtcgtccctgagcgttccccacaccgccattctggtcacgggcgcgcagctctgtggcccggcagtcaacctgagccagatcaaggacaccgcgtgcaagtccctcctgggcttggaggagaagaagcacgcggaagccccagctggggagaaccctccccgaggccccggcgacgcgagggcgggcagcgggaaggctaagccccgccaggagtctcccagcagcgcgtccgcactcgcagaatgggcttccattcggtccagaatcctgaagaacgcagagagtgacccgcgcagcagcgagagggaccagttgaggcccggtgatgagtccactcccaggggccggtgtgattcccgcgggaaccaacggaagactccgccagtcaatgcaaagttctctattatgcctgcctggcagaaattttccgatggtggcacggagacctccaaacagagcacggaagctgaaagcatacgaaaaagacccatgctgggacccagcgaagagacagccccccagcctcctcctgctggtgttcgcgagctcgggaagggtccggagaagtcggagatgcaccgggagcccgcagacaccaccgagggatgcaaatttgccaaagacctcccgtctttccttgtcccaagccttccttaccctccgcagaaagtggtggcccacacagagttcacgacctcgtcggacagcgagactgcaaacgggatagcaaagccagaccctgtgatgccaggtggagaggaaaaagcctcaccgtttggaataaaattgagaaggaccaactattccttgcgcttcaactgcgaccaacaggcagaacagaagaagaagaagaggcacagcagcaccggagacagcgcggatgcagggccgcctgcagcggggagcgctcgtggagagaaagagatggagggtgtggccctcaagcatggtccatccctcccccaagagcggaagcaagccccttccacccggagggactccgctgaaccttccagcagccgctctgttcctgtggcccaccctgggcctccaccggccagcagccagaccccggctccggagcacgacaaggcagcaaacaaaatgccactggcacaaaagccagcactggctcccaagcccaccagtcagaccccaccagcatccccactttccaaactgagcaggccctacttggtagagctgctgtctcgccgagcggggaggccggacccagagccaagtgagccgtccaaggaggaccaggagagcagtgaccgccggccaccctcgcccccaggccccgaggaaaggaagggacagaagagggacgaggaggaagaggcgacagagaggaaacctgcttccccacctctgcctgccactcagcaagagaaaccttctcaaacacccgaggccgggaggaaaggtaggtagctgcagggtgggtaactgctgccagccgaggtgtcagagccagggcatcaagaagagatccacacgcaggttcatgagaataatttaccaacaatacagatttgaaaaaggaaagttttattagaacgctgcagaacaaaaccgtggggcgcctcagtgagaggactgagtgccctggtggattttccttaggagcatttatggaccttaagtcgagagcttaagggtaattggaagggtaatttgggccacattagccacgtaggtcgtgataaatgattacatttgtggacattttggtgccttaatgtcagcaagggttgcaaaatgagttttgccatgacattccagagatgtctagaaattctagttataaaagttgaaaagcctggaaccagatgcctatgttagatactagggaagtttaattctgaattccccagataaggagttttgcctctggatggtctgtttgatggtcaccaggtggtccttgcgctccttgtctgcctctgtccagctcattgactacgtcactgctagaaccagaagtgcccaacgccagaggcagccagtggagctggtgttgggcacaccttcattaattagaggctggtgtgggattcccgaaagacactcactcgtgattcatagtaagccttgttacttctcattctttcaaatttgggaaatgctgaccaactctgcagtgtgtctgcagttcactcttgataatgatacttatttacacaagcgataaaaggtgccaacagttagatgaatgccttttcggttggcaatagaaattgaaataataatcccaacgactgaagatgtcattaaccattttgagggggcctcgcagtgatgataaaactggagtgtcccctaccagtgtcttcactgtatctctgggcagtagtggcaccatgatggcagtttaggggactttaggtgtctccatcagacctatggatcctctctatgggataattgactgtctccattttatgtaaaatgctctgcaaatgcagcttgggtccctccatccccccacccaccccctaccctcacccagctcaccactgcagagccctcctacaaagaaattttggagcaagccttacctctggctgaccctgatgtttcttcagattaaatgtttgggccaacaaagctgtcagttggattagcttttgtgcccccagagaaccttcatctaatactttttcttttctattatgcagagtataggaggtaaagtatgggtcaaagccaaaagttactcacatttcccagagaaattgtcccctgaggttttcttaggagggattgttttctcctttgttcaagtatttagatttggggcagtttttgcagaggaatgatttgtttcctgaggagtgttggtctggttacttgcctttacagaagaccccatatatccttattttattttattgtttattattgttagtatctagagacagggtcttgctatgttgcccaggctggtcttgaactcctgggatcatgcatccctcctgcctaagcctcctcgtaggtgggactacaggtgtgagccaccgcacccagcttgtccttttttaaatagtccacttgcttggcctggttttctggacagacatgttcatcagcagtttctagaccatttctccctaatgatttctgtttgtcctgctggatgaggggcccgtttttggttttgccactagtgtttgtggcactggctttcatagtatctgcaaagtctctctcacagcctcgtctgctatgtcacttgccttctccaaagaagtcatgcttctgctcacttccttctcttagggctgtccccttgattattataattttctccccaaatctatcactgtccctgttttctttcccagtggagccagtgaggacagattctgggctgtcacactctgctatttgaatttttcctgattcgatacagaaatagcctgaaagcaaggatcactctctccattcactggggttttgttatgcaacttgctgctgtaggccaggactggccaaatttgtctgactgaacaccccatcaggataaaaatgttaggcaaggacctgcaatttatttgttgattgtatacatgtagtatcattgttaactaaaacccctggagcaccagctatacttacacttaacaacagtggatctaaatctgcaattgcaagtcatggtgctattttttattctctttggccaacttcttcttggatatgatttcttcggaagtagcaggcaaagagttcctcagctctgttattttctcttactcgtattattagtagtatattgtctgcaggactttctctatgccatatgccatttgtctattgtggaagggatcatttagttaaaaggagatataaactcgccaaactgcagaacctcccatatgctaaattcaagaaccactgagaacaaaaagcacccaccacatgcagccccacatagccttcccagcttccctggagattctttaaacataccatttgttattacatggcctttgaatatatgggctatggggtcactgccagtcagggtactaagtattagaaaagcttgattttggccagacgtggtggcttacacctgtaatcccagcactttgggaggctgaggtgggcagattgcttgagcctaccaggagttcaggaccagcctggcaatgtggcaaaaccctgtctctacaaaaaattcaaaaattagctgggcatgatacacacctgtggtcccatctacttgggaggctgaggtgggaggattgcttgagcctagtaggtcgaggctacagtgagctgcgatctcaccactgcactccaacctgggtgacagagtgagaccctgtctcaaaaaaaggaaaaaaaaaaagcttgattttgtttttatccttacatttaaaaatagagaaatagaaattctaatctttctttcttaactccagtgaattgcctctcacatttcctgtgacgtacgcaaccatttttggagaccagtgctttataaagaggcctgcattgccaaggctggggccagtgaggacaaatatgtagacttgtagggtgttgactctgaatctacctggtgagattaaaacagcaatgataatccccatgtgcttgtactataaacactttcaggccaggcacggtggctcacacctataatcccacagtttgggaagccaaggcgggcagatcacttgaggcaaggagttcaagaccagcctggccaacatggtgaaaccctgtctctactaaaaatacaaaaattagccaggtgtggtggtgggcacctgtaatcccagctactcagaggctgaggcaggaggattgcttgaacccaggatgcagaggttgcagtgagcagagattgtgcactgactccagcctcaaaaaaaaaaaacaaacctttcattacacctagcatctcattctgaaattctaacgtacttagggtggataaaacagaaaaatagcttagtatccctttctccaaggaatgccctttgggagtagtgactagaaccctgtgatccttgctcatctcctcagaacttgaggaggcaactcaggtggactatgatacgcctgtccactgagtttagaatgagagagaatgggtttatattggagcaaaatacatttttaattaggaattttgaactcctcaaataggtgatgcaattgactatctttcaaaaccttgactgtaataagagattttactgtgtttggatgatttcaacactagtcatcctttgtgcgacatcatttacaaagttatttgcatcgtctccttcggtgctcacagcacacggataggtaggtagtcttggctccatcttacagacatggacagcagtatctgaaaagttgagtgacttgcctgctccctacagtggttatgatggcacatggaggagttctttcctagactaagtgatcttccgttatcacagccccatcatagtgtgagtgatggtccagtgttgaagcttctgaatatatactctttggtatgggtgacttcgccatcttgggtgcctcacgtggaggtggggaggcccttccaccagcttcataaaataatggcagtaaccttcatgatcccaaagcaacctctactttggtagcagaagcctgtcaggcactggcctccccctgaggtggactcagtttatatataaaccagatctgaattccacattgtggtctttcactgccacgtcttgtgcttctaagagaacatctttaatgatttgggtccctttttgtcgctgaatcccagttgagctaagcctggtcagtggacatttctcctaccaattttgccaaatacaacatcttgtctttgctgtcttttagttttctttggtattggtagatttctgctggtctctgaggttctgcaggcagttgtggaggataaacggttttattcttcttctcccatttttgagaagtgtcaagagaagcacttgtgtggacctgggattggggtaaaatgctgagatgaaggagacctgccaaggccactgcgtccacattgcacccagctgttccagtactgcaaccactatcttccctcctcctcctacccagagatttcttttttcaaattagtcaattataaatttcattactaatacttaaaggcattttgacccttccagtaaataatagtctaagttgttggcaggaaactggctggttgttttagtgaccttcccaagcaagttcagatgtagtgtttagccagaatcagaattccctttggtataatagctttctatagaaatcatttagatcttggcaacttggtttttagaagttttctaaagaagtgttacagggacctggagtaaaatacagaaacttgttaagtttcagtgtaaagcagaatgtttgaggtgatgaattctttttgattttctggttaactaaagatgaaacaaaaactctttcaaattcagttttgttttaaaatacttctaagagatgtcagtcttattttctctgttagatcataactgaatcgttatttgatgatttagggatattgcagtgccccaggctcattataaatatgaattctctttgtacagcattgtagatctaaagaatatagaaaaataagcagaatctgccccctgccctttttgcttgaatttctaatttgaatttattttctcatcactgctctttcttttcatcctggaatacgatataaaatccagttgactgagagccctggaagtaaggttctggactaccaaagtgtaaacttctattggatttcaaaaacaatactatagtgagctcctttcctttgagataataagagattcaataactgattatctctgaacatgcataatttttacttgagggaaaaggagattcttgtctcataggcatataagaacagctcacttttgtagagtgaccaggatttgccaagaactgttgtaaatgttctggttcccaggatctcttttaattttcatggcaacccaataagacattatcatctccactttctagattagaaaactaaagcttagagaagttaagtagtttttgtaagatcatcaaagatcaaatccaggtctgctcaattttagagcctagtactcaacctgtcacatgaacctcctgtgaggtatttacccccaattacataggtgagacagtcaaccacaagaaaaacagagacggaagtcagaaggcctatgttctagcttcagaagcctgtgtactaactgctgagtgaccatgggcatggcacttggtggctggagtactcacatctattaaatgagtgcagtggaccaaaatcatgggcttcccacagtgttcttcagcttccccattaggcagagtagtgctcctttttcatctttccaacattggagttccacgtagtatgttctttgaggggaaaaaatggttccatggctaaaaataaatttcatttaaagcaatgaattagggccgggtgcaatggctcacgcctctaatcatagcaccttgggaggccaaggcaggtggatcacttaaggtcaggagttcgagaccagcctggccaacatggtaaaaacccatctctactaaaaatacaacaatttgccaggtgtggttgcaggcgcctgtagtcctagctactcgcgaggctgaaacaggagaattgcctgaacccaggaggcagaggttgcaatgtgccgagattgcaccactgctccagcctgggtgacagttcaaaactctgtcaaacaacaacaaaaaggaatgaatttaaaaaagaacaacgaaccaaatacctatctggatgccctggaggcctgagatgttatgaccctggagatttatttgagtttttttctaacagagtaacttcttccatttctagggaagacaaatacccttgtttttctggtgatcaaacatgttaccttcccacccagtggagccactcaggcatcagcacagaggttgtgctaggaaggggccagctgaatatgccatagggttattaatatgtcacaagttttagggggtgaggaactgaggtaagtccgcagttaagttcattgcaaaccgttctttgtcttattccccacagagaagccgatgcttcagagcagacactccttagatggctccaaacttacagagaaagtggaaactgctcagccgctgtggataacgttagcactgcaaaagcaaaaggggtttcgggagcagcaggcgacgcgggaggagagaaagcaagccagagaggccaaacaggcagaaaagctctccaaagaaaatgtgagtagcctgggcttcagctgtgattttgctttcctgagcttggttctcttttcagtcacaaggatacaaaacaaaaggctagctgggctggtggaaagtacttagagagggccaagcagtaaataaactgaccaccattaaaccagggaagcgttttcagtgtgaaactgggtttggtttgtttatgctcttaggttaacctgatttgccataatccacgatacgcttacaacagtgatatacaagttacatgagaaacacaaacattttgcaaggaaactgtggccagatgttatagtcagtttgatgaggctcttctgggaaagtaactttccctgttaggcacactggctctgagctgccccctcaccggaagccgtggttgagcgtacatggctcatacatgtaatccagcccaccgttggaagcagaggtcaggggctggcaggcagaggccccgaaggcctgcagggtcagtctttccatgtcttaggttgaaaacatgtttcccatgactgtctctgcccacgcaggtcagtgtcagcgtgcagcctggaagcagcagtgtcagcagagcaggttccctgcacaagtccactgctctgccagaagagaagaggcccgagactgcagtgtccaggcttgagcgcagagaacagctgaaaaaggccaatactcttcctacgtctgtgacaggtagagagcaggtccattgctttgtaactgtagttccaggtttctctttgtagagcgtgctttatatcctacagtgtaatgactagcagagcacctcaggcatttcaaagcacaggctatctgataacctcattcataaacgttgacactgattaagctcatttgataaagaccaccaggagctcacccactatcagtggtgtgttggtgaatatttaacagttagctcttgagggggtagagagacctctgtttggagcatcttcaatttctcagtgtaaatactcccaccatggcctgttcaaagctattataccaatatgatgtcagctggctcactacatttgtgaacgtttagcacggcagtatgagccatctccagcaccctctgcctatattctgacaaagttgggtttattaacttacagaagaaccttctaaacaagagaaaagacaaaattatagcaggacttggggtaaagggtgaagtttaggtaaaatttaaatggagtagcattttaataagtcaaatcaaagccatggtgtccataaaggagataatatcaagactgagctgaaacgtttgctcaggctcctgtttccttcaaaactacaaagttaagttaaatgtttgaaatgtttgaggtcatggatatccaacttaccctgattgatcattatacattatttgtatgtattaaaatgccacatgtacccccaaaatatatacaagtatggtgtatatatatatcaattttaaaaatacagaaaagaaagataaatgtgggccaggtatggtggctcatgcctgtaatcccagcactttgggaggccaaggcaggcagattgcttgagcccaggagttcgatattagcctgggcaacatggcgaaaccccgtctctactaaaaatacaaaaattagccaggtgtggtggtgcatgcctgtagtcccacctacttgggaggctgaggtgggaagattgcttgagcccaggaagtggaggttgcagtgagccgagatcgtgccactgcactccagcctgagcgacagactgtctcaaaaacaacaaaaacagaaaagataaatgtgtaaaatgttgtatctgaaaaccactaccaggagctccgcacccgggttggaaatggaaactgcatctctgtgatggtgacacgtggctcagaagctccaggcaaaagtgagatggtctgttctcactgatgtgatttcacgcagcgggtttctgatagtctgtggctttacagagtaaagtttctcagcacagtgtctttgatgttaattaacaacagcagtttttatatgttcataacatgtaagagatgtacacatttagaaaatattctttatttggttaaaaggtaaaacgatgtaatgtatccaactatctccttattaccaatcacttgaaggatggatgactctgaacaggctccctaccagtgattaatagggcatctcttttccccactaggctccactattccccaaagggcgtctaatctctagacccaggcttttctctgccttggctacctgaggtcaagagatattaagaggtcttactattaaagatatatttactactggtgacacggagggaagctttatatttgttttttagttttgtttggcattttgagggagagacagaatcttgctctgttgcccatgctggagtgcgatggcgccatctcggctcactgcagcctccgcctcctgggttcaagcaattcttctgcctcagtctcccaagtagctgggagtacaggcacacgccaccacacccagctaatttttgtatttttagcagagacagggtttcaccatgttggccaggctaatctcgaactcctgacctcaagtgatccgcccacctcggcctcccaaagtgctgggattaaaggcgtgagccaccatgcctggcccaaagctttatatttgaaaaccactttagaatgctgtgtaatttcttaagaaccgcaggcaggcattatgtcatttgattttacttataggaattaagggttctacctgttagaaccagaaagagaaagagtgagaaaaagagagagaatgagtttctttcaaaataaagtgaaagccccaaagtcaaagaggtcaaatctttctctgcctgatttctcagaagtactaaaggattaatgcaactcaagagtggctctagcttaataaagcaagtctttgttctgaagtatttgtcttctcagtcagtatttcctgagttctagaagcatatgtgtaagccattgccataggcactatttatgactcaaagataagacaagcaccctctcacattaagaagcctatacactctgataaagtgatacggtgcaaagaactgtgagacaaggatgaaagtcatgggagctggcaggatctgtgagactcagaggtagaggcacccagtggatgcttttgtggggacggtagcttttttttttttttttgaagcagagtctctctctgtcacccatgctggagtgcagtggtgcgatgtcgattcactgcaacctctgcctgcagggttcaagtgattctcctgcctcaacctcccaagttgctgggattacagacacctgccaacaagcctggctactttttgtatttttagtagagacagggtttcaccatgttggccaggctggtctcgaactcctgacctcaagtgatcctccctccttgacctcccaaagtgctgagattacaggcgtgatccaccacgcctggccaggaaggtagcttttaacctcaccagatccagtcggctgggttgatctttttcttcatggaattgactggttatcatgcaggcatagcttctttatatagattaggcttctggaaattctttgaaattagaactgactactttggttgttgtaattctgtgtgcaagagatataaacacatagcttgctttccttcattctcctcactgagggagtccaggaatttgcctctctgtgtttcactgggttttcttttttcagtctcacacttctgataaatcaaaatatggctggggtggggggtgttggagagatgttcatcaaaggatacaaaatttcagttagataagaggaataagttcaagagacctaagagagtagattttaaatgctctcaccataaaaatgataactgtgaggttttgtatattttaattagttagatttagctatttcacaatgtatacatatttcaaaacaatgttgtacatgacaaatacagtttgtcatgataaatacatagtttatcatctgttaattaaaaagaaaatttgtagtgtggctgtgaacttactttttccttttccttcaaaacaaaatccagtggagatctccgactcggctcccccagcgccgctggtaaaagaagtcaccaagaggttttccaccccggatgctgcccccgtgtcaacagaaccagcctggctggctttggccaaaaggaaagcaaaggcttggagcgactgtccacagattattaagtaaagagtgactctcacccatccctactgccagttattggctcctctcttgccctttttatttatttattttttatatggggtaaagaaatcaagctagggaaaagaagcatgttttataggctccaaaataatgtttagaaactgaactggtggtgttcattgtaaagagtggatttgcacaaccctaggtcctggtgcctcgagctcctcctagttctcaagagaaaattccgtccacaggaccacatgaagcaaaatctctaagctaagaactcgtgagagcctgccatgcccatttcatggccttgcacacacacccacccacacaccattcagaacatgtacttttgccaacctttggtaatggttttttgattctatgcactaattttctttgtccaaaacatttactctaccatatgtctgggaatgtttatcctttctacagtaatggtgaaaggatcatatctagctaaaagcaagaacacccattctcctgaatgcagtgagtaattgggaatcacaaggaacattctggcacccaactgtgcccatcttagttttcatgagttttccccactctgaagctgtaacccagaaggcacatccattcacatttttaccgcactgtggattcatagtgtggggccctgttattccaataccctccttaaggacatgtgaagcatttggcccagttggctcccagggaacattttaatttaatgtagtgaagaaagacaattctagatcagagctacaagttcactttctgtctctgagaatctccatctagggcagtagttcttatgatgtgtaggc

SEQ ID NO: 462 - DNA, 46825 bp, Homo sapiens
gtgctccagacaaagatcttagtcgggactagccggccaaggatgaagcctcacttcaggtaccgctgcccgctctacccgctgggcccctctgctgccccttcctgcctggtggctctgctgggcgtcagccctggcctccccctgccccagccccagccctgggctccctcccctctggctcccctgcccccgccactcccagccaggctctttttcctgctctgtggttgccccactgctgcttctgaataggccgcttccccacctgccccagcccaggtgccctgctgagactctcccccgccaccgaaagtcatggcagggctggtgctcccggccctgggagggtgctccctctgtgttctttccgccattcctgaactctggaactgggagaattgaaccaaaggatgattagagcaatgtggaattttgttcacagtgctttgatggattttctgtaacatttactttgcttaaatagcaagtcttaggagagggtgtggggagggaatggtctctgaagcacaagataaatcgtatcttccaaggatgtctccactgtgggcagaggaggatgcagatgaccccaaacacacgctcctcctccactatcagcattcactgtttataaatgacacgagtaacatggaatatagtggccgggtgcggtggctcacacctgtcatcccagcactttggtaggctgaggtgggtggattgcctgaggtcgggagttcgagaccatcctgatcaacatggataaaccctgtctctactaaaaatacaaaattagccgggtgtggtggcgggcgcctataatccagctactccacaggctgagacaggagaatcgcttgaacccaggaggcggaggttgcagtgagccgagatcgccccatcgcactccagcctgggcaacaagagccaaatttcgtctcaaaagaaaaaaaaacaaaaacaaaaaacatggaatatatgggaaaaaaactcaatgatcaggagaaatgctattattttaaaatttagtaagaagagagtctggtccccaatggctccctcctgcaaggctggtgacacagagactggacagggctggtctggtaagaggccccagccccatccgtccccagctctgtggcctgggcaggttaccccatctctctgcgcctctggcacctcctctgtaagatgggaatggcccgtgcgggcctagggcagcctcacatgagctcacatccgcgcagcacttagaagagtggcctgggcctcagaattcggttctaccatgatttaacaatagtaatatacagaggtgaaatgtcagaaggaactggctgaaaggttaaaatctattattttggggtgaatagttttattctctctctcttttttttttttttttttgagatggagtttcgctcttgtagcccaggctggagtgcagtggcacgatctcggctcactacaacctccgcctcccaggttcaagcgattctcctgcctcagcctccacagtggctgggattacaggcacccactaccacgcttggctaatttttatatttttagtagagactgggtttcaccatgttggtgagactggtctcaaactcctgacctcaagtgatgggcctacctcggcctcccaaagtgctgggattacaggcatgagccataatgtccagccaagaactttgttctcttttgcattttactaatgcgttggagaatgggtgggagaaatactgggaaggtggggaatgtactcctggaacgaccagagctggaccctgagctggaagaggtcagcctgcccctgctgcccatgccagcatccccttttcttgctctctccccggtcttcctgcctgggaaggaagcaaaaattctcagggctgtggaggggttggggaggcccagagccatgcagggggctgtgtttagtggacatcagccctgagggctcccgggagcgctctctacattggctggtttctctcttgtgtcttcagaaacacagtggagcgaatgtatcgagacacattctcctacaacttttataatagacccatcctttctcgtcggaataccgtctggctgtgctacgaagtgaaaacaaagggtccctcaaggccccgtttggacgcaaagatctttcgaggccaggtaccacccggacttcaatcactttgcaggcaggagctaagccagctgggaaagcaaaccacgcactgataagtgaagtgcccggcggcgggctatccagtgtgtccttctctcccacactttccaagtccgtggccctgaccttcctgctggaccgtcctgggatcggatcgtggagggggtttgcctttgcacaaaaggccttgtgtttttttttttttttttttgagacagagtttcactcttgttgctcaggctggagtgcaatgacgcgatctcggctcacagcaacctctgcctcctgggttcaagcgatgctgtcgcctaagactcccgagtagctgggattacaggtgcccaccaccacgcccagctaattttttttttttttgtatttttagtagagacaggattttaccatattcaccaggctggtctcgaacttctgacctcaggtgatccacctgcctcggcctcccaaagtgttgggattacaggtgtgagccacagcgccggcctaattttaatatttaattaatccaatgtggctaacatattacttcaacattaattaacataaaattcttgacaagataatgaagtttctttttgtcacactgagtctttgaaatgagctgtgtaggccacgcttggtgggtggctcgcgcctgtaatcccagcactttgggaggccgaggtgggtggatcacctgaggttagatgtttgaaaaccagcttggccaacatggtgaaatcccgtctctactaaaaatacaaaaaaaaaattagcccggtgtggtggcagtcgcctgtaatcccagctacttgggaggctgaggcaggagaaccgcttgaacccatgaggcagaggttgtagtgagccgagattgcatcattgcactccagcctgggcaacaagagtgaaactacgtctcaaaacaaaaacaaaaaacaaaaaaagataaatgagcggtgtatggtgtatttttcaggtgcccaggtctttcatcagagccccatttcaagtgctcagtagcccctttggccagtgcgccccaccacatgggacagcgcaggtccagtggcctccccagctgaccgcaggcagggaacaaggcagaccctagagggccaggccacagcaggggctgaggatgcctggtgaatggatgcctgggagaatggatgccagaattcacgcatgaggctctgaacagggctgggaaaacttccaaacgaagggaagctcatgtcttggtgcactttgtgatgatgcttcaacagcaggactgagatggggacatttacaataaacagaaatgtatgggctcgagttctggcctctgggaagtccactgtcaatgcaccagcaactttccagggcctgcgagctgcacagtcacgtgggggtaaaggttgttgccagaagttcaggggatgctccagacagagtggcctgggatgtcgagtcactgctgctccatgccacggggacaagaggaagcagtttagtctgacatactgcccccccagctagagggcaagagacagaaagaggggctgaagtcgcccttgaataaacacgccagtagcacccacaaaggtgcagcccccacagcctcatagcctcttctaggtgccacctcttaaggccattacaatagccattaacactgaacgtgagctttggagcagacaatcactcaaactaaacaggggggatggaggaaaggagcttcaatggcaagatcccctgggctcctgtcctggcccctcctctccctgccccacccctgcactcctcctgctccccctctcagagcatcccctgccccctgctcctctcccaggtgtattcccagcctgagcaccacgcagaaatgtgcttcctctcttggttctgtggcaaccagctgcctgcttacaagtgtttccagatcacctggtttgtatcctggaccccctgcccggactgtgtggcgaagctggccgaattcctggctgagcaccccaatgtcaccctgaccatctccgccgcccgcctctactactactgggaaagagattaccgaagggcgctctgcaggctgagtcaggcaggggcccgcgtgaagattatggacgatgaaggtgagaggtggaggggtcaggggagcgtgagcgggaggaacagcatgaaagatggatggatctgcaatgccatggctgggggtgtcccagggcagcctgcaggggcggggccagcactgacagcaactgacagccaggagaccaggcctgggagcgcgggcccagggtcagggcagagcctgactgcttcctgcctcttcgtctcagaatttgcatactgctgggaaaactttgtgtacagtgaaggtcagccattcatgccttggtacaaattcgatgacaattatgcattcctgcaccgcacgctaaaggagattctcaggtgagggtctccctctggcctcatcgtctgtctcctctcgcctcctgctcatcctcctgaggcctcccctggccaggccctcctgccctccgtcctgccccctgcctgccctcatggttacacccctcacccacactccttgtgctccttccccttcttgcctcctccctctttcctgggcccctcctatgagtgagaggccccttctgcctccagagcaacctccatccaccttcgaggccgccctccccacagcctgggatccccaacctggctccttccatctccctggcataatcgaatttgtcataaaactggacgtaagtgggcatgaatattcacaaggccgacagccagaagctttgagcaacatccttcaaggccgacctgagtccctgagaaggagcagcctctgtggaaacttcaggcttcgactgccatagaagatgcccccgggccgggtgcccacagggcaggcatttattttctcacagatctggaggctgcaagtccaaggtggaggggtgggcggggttgtgtcttctgcagctgctcctcttggctggcagggggtcccttccagccctgtcctctctggcctttcctctgtgcacctgcacccctggggtctctctgcctctaaatgtcctcctcgtttatggaccccagtcagacaggattagggcccaccctaagggccatgagttaatttaatcaccactttagtggacctgtctccaaatacagttatcctgtgaggaggtggggatgagggtttcaacatatcaatgtggggaagatacaatttagtccatgacaatgggtcaagcttgcgtggggcatgcaggggtccctgttctgtgtgtctgtctcccaggcgagtcctgccctgactctcacagcccctccctccagaccttgctgcaccctgggccccaccccatggcttccccacccaacagcacccagcccggcctctgctcacgcctgtcccttctcaaatctgcccccaacagggatggagatgcagaaagagccaaacaaacactcagtgatcaaggtcccaattgaataagattttttttttttttttgagacactgtctccctctgtcgcccaggctggagtgctatggtgcgatctcggctcactgcaatctctacctcctggttctagcaattctcttgtctcagcctcccaagtacctgggattacaggctcatgccaccacactggctaatttttgtatttttagtagagacggggttttgcaatgttggccaggtgttgagtaagattttgcaaaagagtaggcttggataatgggaggcttgagatgccaggagctctccaggaagcacaatagaaaaaggcaaccagagaccagagaggccatagaaagggatctaaggccctcgggagagacgggaactgagcacctgggtcttagaccggaggagcaaactgcaagacagggtggccggggacaccagcctccacccttctgtgacatagggacaagagctcagcctgccagggaacaactctgggcaggagatgtggaaggaaggagctcagtgtgggggcacgcatggcatcctggggggacatctgagggcacccccacccgctattcctccctccaatggtggcctttgaatgtgaaggcaagggggaagcagacacctgcccctcactctccctccctaccacatagctaccgggtggggggcgtccctgggatgattcctgagggcaggatccaggagtccctctggaggtcctcccatccaggtgagaaagcagcataaagtgagacctgcactcagatgggcctgtgaggtcactcacagcgcaggtgtctcctggaacaagggccctggaagataaaatagaacccaagcccaggactaccatcagggccaggacaagcctgccagggagggtgcacatgaagccccagatcagggaccactgcccgctctgcccacggggcctctgctgccccttcctgcctggtggccctgctgggcctcagcctggcctccccctgcccctgccccagcgctagtctctctcccctctggttcctctgctgctcccactaccagccaggctctttgccctgctatgtggtcgcccctttacagcttctgaatgggccatctcccccacctgccccagcccaggccccctgctgagactctcccccgaaagtcacccctttgctattgctccccgccctgggatggtgctccctctctgtgcttctcgccattcctgagctcaggaactgagaaaattgaaccaaaggatgattggagcaatcaggcattttgttctcagcacttccatggaatttctgcaagatttactttgtttcaacacaaagtcttaggagaggatgtgggggagggaatggtctctgtaccagaaaataagtcacttcttccaaagatgcctccactgtgaacagaggaggatgcacatgactccagacacaggctcctcctccgtgagcaccattcaccttttagaatgaaacctgcaacatggagtgtaggaaaaaatatgatgatcaggagaaatgctcttattttaaagtttagtaagaagagagtccggttcccaacagctccctcctgcagggcctgtgatgcagaggctggacagggctggcccggaaaggggccccagctccatccatccccatctctgtggcctgggcaggttaccccgcctctctgtgcctctggcacctcgtctgtaaaatagtgatggccccctgcaggcctcaggcacataccatgagctcagaccctcacagcacttaggagagtggcctaggctggccgggcacagtgactcacgcctgtcatcccagcactttgggaggctgagtcgggcagatcacaaggtcaggagttcaagaccagcctggccaacatggtgaaacccagtctctactaaaaatacaaaaactaggtctggccgcgatggctcacacctgtaatcccagcactttgggaggcaggcgggcagatcacaaggtcaggagttcaagaccatcctggctaacatgatgaaaccccatctctactaaaaatacaaaaaattagccgggtgttgtggcacgtgcctgcagtcccagctagttgggaggctgaggcaggagaatcgcttgaaaccaagaggcagaggttgcagtgagccgagattgtgccactgcactccagcctggcgacagactgagaccccgtataaaaataaataaataaataaaagtacaaaaatcagccggacgtggtgacacaagctcgtaatcccagctactcaggaggctgaggcaggagaatcacttcaacccgggaggtgcaggttgcagtaagctgagatcgcgccactgcactccagcctgggcagcagagggagactatgtcccaaacaaaaacaaaaacaaaaaaaacaaaaagagtagcctgggcctgggaattcggtgtgataccaacgtaaaaagaatcatcatcatcggacaggtgaaatgtgaggaaggaattgagctgaaatgttcaagcaattattttagggcgaagagttttattgtctgttgcattttcctaatgggttgggagacgtgtggcagaaaaactgggaggttgagggtgtcccattggtaggcccagagctgtggttccagctgggagaggtcaccccggcccttctgcccctgccagcatcccctcctctttctctctcccagtctttctgcctgggaaagcagcagacattcccagggctgtccagtgagtggtgttcagtgggcatcagctccgaggaatccaggggggtctctgcattggggtttctctattgtgccttcagaaacccgatggaggcaatgtatccacacatattctacttccactttaaaaacctacgcaaagcctatggtcggaacgaaagctggctgtgcttcaccatggaagttgtaaagcaccactcacctgtctcctggaagaggggcgtcttccgaaaccaggtagcaccaaagtcctatttacaccccaaataggagctaagcagctaggaatgcagaaaacacaataagtgacgtgcctggcgtgggctttcctgtgtgtactttcctcttacatttcttttttttttttttttttgagacagagtctcactcagtcacccaggctggagtgcaatggcgtgatctctgctcactgcaacctctgcctcctgggttcaagcaattcttctgtctcagcctcctgagtagctgggattacaggtgcccaccaccacacccagctaatttttattccatttttagtagagacggggtttcaccgtggtgaccaggctggtttcgaattcctgacctcaagtgatccgcccccctcggcctcccaaagtgctaggattacaggcatgagccaccacgcccaacttcctcccacattttttaagtccgtggcccagatcttcctccctaactttcctgggatcagattgtcgaggggttttgcctcttaccaaaaggccttgtttagcgcccagcgccctcactcttgactttgtttcccaaaatcttgtcatggagctgtgcgtccggcagtcctcgggaaacagcagctgtgggaagcggtgggtctggtgtccagcactgtgcctgggccagtcactgtgggctggtggggccgcccccgccactgccctgattcctcgatgtcaaggacacatcctcacagggtggtgaaccctcgctcctcaccctgccgcccccacagcagccactgacctcccacccaccctgtcgtgtcccacccaaccctgcggccccctcctcccaggcaggagattttttcagagtgtgtttggggagggagccgtctgtgtgctgggcaggcctggcctacagcagtgctggcctcggaaacacccaggactcaggatggaagcgcgagtgttcccagtccccacacgctaaaaaggcgacaagaacttgtggaagaaattttagtgtctgcattagctcaattatctcacataggatttcaacatatacttaatataaaatgcctcatgagagagttaaagtttgtctattctcacaatgagattttgaaatgcgctgtgtattttacacgtgccaacgtttctaatcagagccccatttcaagtgctcagtagcccctttggccaaccttcaactccatgggacaatgtgggtccaatgaccttcccagcagaaggcagacaggggacaaggcagaccccataggaccaggccacagcaggggctgaggatgcccggttaacggatgcctggggaacaggatgccagaaatcacacatgacctatgatgagacaggaaaagactcaataaaataaagaaggaaggggccgagtgcagtggctcacgcctgtaatcccagcacttagcgaggctgaggcgggcggatcatgaggtcaggagtttgacaccagcctgcctaacatggtgaaatcccatcactactaaaactacaaaaattagccaggcgtgggggtgtgcccctgtagtcccagctacttgggtggcttaggcaggaaaatcgcctgaacccaggaggcagaggttgcagtgagccgagatcttgccactgccccccagcctgggtgacagagcaagactctgtcactcaaaaagataaagaggaacggccaggtgcagtggttcacgcctgtaatctcagcactttgggaggccaaggcgggggatcacgaggtcaggagcttgaaaccatgctcgctaactcggtgaaaccccatctctactaaaaatacaaaaaattagccaggcgtggtggcgggcgcctgtagtcccagctacttgggaggctgaggcaggagaatggcgtgaaccccggaggcggagcttgcagtgagcggagatcgcgccactgcactacagcatgggtgacagagcgagactcagtatcaaaaaaaaaaaaaaagaaagaaaaagaaaagaaaaaataaagagcaaggagaaggatggaagaagggaaattcaatgagtaaaaagccctggggcctagtatgtacccaaaaaaatgagaagtaaagaaaataaggccatgcatgtggtttatgctcatagtcgcagagttttgggagggtgaggcaggaggatggcttgagcccaagagttcgagatcagcctgagcaacatggtgaaacccagtctctacaaaaattacaaaaaaattaggcaggcgtggtggcacgcacctgcagtcccagctaatcaggaggctgaggtgggaagattccttgagcctgggaggtcaaggctgcagtcagccccagatcgcaccactgcaccccagcctgggcaacaggagagaccctgtctcaaaaataaataaggaaacgccctggggctccaggcccgccctctgctcccatcgccccacccctgcactcctcctgctcctagtctgagctcccctgccctcctcctcctccttccccaggtggatcctgagacccattgtcatgcagaaaggtgcttcctctcttggttctgtgacgacatactgtctcctaacacaaactacgaggtcacctggtacacatcttggagcccttgcccagagtgtgcaggggaggtggccgagttcctggccaggcacagcaacgtgaatctcaccatcttcaccgcccgcctctactacttctgggatacagattaccaggaggggctccgcagcctgagtcaggaaggggcctccgtggagatcatgggctacaaaggtgagacgttggggggctgaggagagtgggtgcgggagggacagcatgaggggcaggtgtgtctgcaatgccgtggggcggggcagtgtcccgggaagcctgcagggatggcgccagtgtccactgcaactggcagtcaggagacctgggcttggaggggagggcccagggctgggagagaagcctgctgggccctcactgctttctccttgttttttctcagattttaaatattgttgggaaaactttgtgtacaatgatgatgagccattcaagccttggaaaggactaaaatacaactttctattcctggacagcaagctgcaggagattctcgagtgaggggtctccccgggcctcatggtctgtctcctctagcctcctgctcatgttgtgcaggcctcccctccatcctggaccagctgtgcttttgcctggtcatcctgagcccctcctggcctcagggccattccatagtgctcccctgcctcaccacctcctctccgctctcccaggctcttcctgcagaggcctctttctgcctccatggctatccatccacccaccaagaccctgttccctgagcctgcatgcccctaacctgccttttcccatctccccagcataacctaatattttttttttttttttgagacggaatttcgctctgtcacccagactggagtgcaatggcttgatcttggctcactgcaaactctgcctaccaggttcaagcgattctcctgcctccgcctcccgagtagctggaattacagacgcctgccaccacgcacagctaactttttttttttttgtatttttagtagtgactgggtttcaccatgttggccaggctggtcttgaactcctgacctcaggtgatccgcctatctcagcctcccaaagtgctgggattacaggcgtgagccactggcccggcggcacaaccaaatcttattaaactcaccctaggctggccgcggtgactcatgcctataatcccccagcaatttgggaggcagaggtgagagaatcgcttgagcccaggaattcgagaccagcctgggccacatgacaaagccccatctctacaaaaaaattacaaaaaaaaaaaaaacaggtgtggtggcatgcacctgtagttgaagctacttggaaggatgaagtgggaggattgcttgagccggggaggtggaggctgcagtgaactgagatcacgtcactgaactccagtctgagcaacagatcgagaccctgcctgaaaataaatcaataaataaactcaaccgaaatgggtatgaaagttgaaatgggtatgtaagttgaaaaccagaagttttgagaaacatcctttgttaactttcatcctacaaattgggtcattcatgtcctacgcagctaaaacagagcccaggagccagggaggaaaagcagtcaggccacacaccattgctcccaaaatggacttctctgcaagcctgactcctgaaactgtgcattgtaccctgaaaccagctttatccatagcttctgcaataaatggctgtaagtcttggactccttgctataatcgcagctattcagcaatggaacctcccagttcccaacccttcctagtgcccatgggctttcccataggacaagagaacatttctccttttctttttttttttctttgaaatggagtctcgccctgtcacccaggctggagtgcaatggtgcggtctcggctcactgcaacctctgcctcccttgttcaagtgattctcctgtctcagcctcccgagtagctgggattacaggcgtccaccaccaaaccaggctaatttttgtatttttcataaaaacgggtttcatcatgtttcccaggctggtcttatttttattttattttttgagatggagtcttgctctgttgcccaggctggggtgcagtggtgcaatctgggttcactgcagcctctgccgcctgagttcaagctattttcctacctaagcctcccaagtagctgggattacatgcgcgtgccaccacgcctagctaatttttgtgtttttagtagagacggggtttcaacatcttgaccaggctggtcttgaactcctgacctcgtgatccacccgtctcggcctcccaaagtgctgggattacaggcgtgagccacctggccaggcttaggctggtcttaaactcctgacctcaagtgatccaacctccttggcctcccaaattgctgggattgctggtgtgagccacagcgcctagcccatttctccttttaataggacctgttgctgtctctgttctcccaacatggtgaacaccacccggactgcgtgtatgtcccaaattacaattctttctttgcaaatgaaatgtgaaatttagaggcccttctccacactttaaatttgacttgacattttctaggcagatataagttattagagaatgagattctctataaaaatgatcccttcatgctgtggcctccacagaagatgccctgggccaggtgcccacatgaataatgcgggccacaggcaggcatttattttctcacagatatggaggctacaagtccaaggtggaggggtcggcggggttgtttgctctgaggccgctcctcctggatggcagggatcccttctggctgtgtcctctgtggcctttcctctatgaacctgtactgtacctctggggtctctctgcttccaaatatcttttttttttttttcagacagttttgctcttgttttctaggctggagtgcaatggcacaatctcagctcactgcaacctctgccttccgagttcaagcgattctcgtgcctcagcctcctgagtagctgggactacaggcgtgtgccaccacgcctggctaattttgtagttttagtagagacggggtttctccatgttgctcaggctggtcttgaactcatgagctcaggcgatccactctcctcagcctcccaaagtgctgggattacagatataagccaccatacacaacttttttttttttttgagatggagtttcactctgttgcccaggctggagtgctaaatagcagaatcactgctcactgcaacctctgcctgctgggttcaagcaattctcccacctcagcctcctgagtagctgggattacagatgcccagaaccaatctctgctaatttttctattttttagtagagatggggtttcactgaggaaggagaccacctctctcattgtctcctatttcagaaggaagcaaaaagttagaaagatgcagaagtaagatcaatggccagactgtttggcgctgctacctgggcctggtagttaaagatcaactcctgacctgaccgcttgttttatctaaagattccagacattgtatgaggaagcattgtgaaactttctggtctgttctgctagcccccaccactgatgcatgtagccccccagtcacgtagcccacgcttgcacaatctatcacgaccctttcacgtggaccccttagaattgtaagcccttaaaagggccagggacttcttcagggagctccaatcttcagatgcaagtctgtcaacgctcccagctgattaaagcctcttccttcctaaaactggtgtctgagaggttttgtctgcaaccgttcctgctacatcaccatgtacattccaggcgaggctggtctcgaattcctgacgcccacctctgcctcctaaagtgctgggattaaaggcatgagccatggcacctggtcgaccttctcctttatggaccccagacaaattaatttgtgcccacactagaggtctcatttaaattaatcatcttggtcgggcgtggtggctcacgcctgtaatcctagcactttgggaggctaaggcaggcagatcacttgaggtcagtgtcacacgtgtccatgtgaagagaccaccaacaggttttgtgtgagcaacaaggctgtttatttcacctgggtgcaggtgggctgaaccagaaaaaggagtcagcaaagggtggtgggattatcattagttcttacaggtttgggataaacctatcccaaacctataagtgtacattcttaaaggcatacaaagtacattcttaagtgtgggggagaatattacaaagtaccttcttaagggcaggggagactatatggtatcagttggggtggggcaggaacaaatcacaatggtggaatgtcatcagttaaggctattttcgcttttttttgtggatcttcagttgtttcaggccatctggatgtatacatgcaggtcacaggggatatgatggcttagcttgggctcagaggccagacattcctgtcttcttatatgaataagaaaaaacaaaatagtggtgaagtgttggggtggcgaaaattttggggggtggtatggagagataatgggcgatgtttctcatggctgcttcaagcgggattaggggcagcgtgggaacctgtggtgggagagattaagctgaagaaagattttggggtaaggtgatattttggagttgttagaaggagcatttgtcgtatagaattattggtgatggcctggatgcggttttgtatgaattgagaaactaaacggaagacacaaggtctgaataaaagaaggagaaaaataggttggttttttttttttttttttttttttgagacagagtctcgctctgttgcccaggctggagtgcagtggcacgatctcggctcactgcaacctctgcctccctggttcagacgattctcctgcctcagcttcctgagtagctgggactacaggtgcacgccaccacgcccgactaatttttttgtatttttagtagagaagggggtttcaccatgttagccagatggtctcaatctcatgacctcgtgatccgtccacctcagcctcccaaagtgctgggattacaggcatgagccaccacacccagccagaaaaataggtattaaaggactaagaattgggagtacccagaacatctaattagacagtgtccaagggggttcaacataattatttgcttggttggtgagtttttggcctctatccttgaatttttttatgttgtcatatacctgtccagattgatttaggtaaaaacaacactcttcgtttaaaaatatacagagtcctcttttttttagcagtgagtaagtcgatgcctcggcaattttggaggaaagagaaatgcaaagccagcaattgttcatttaagaaggattagaaatggctaagagagagtttgatagtgtggtggagatagctggggagaggtagagggtagcataagaacggaaccagaataagagtgagtataaaagtaaagaataggacttcatcagggtgaaagtactggagggtaccttgccactgaagatcttctatcgacttcaagagcgacttaagggtggtgatttgaagtaaaaccaggagcctccaaataccaagagcctgagaaccttcttgggtgatttgactaataaaggccggtgcgttatcagactgtatagaggtgggaaggacaaacccaggaattctgtctaaaagaaaggaagaaatgatcacggtggacttctcagaccctgtgggaaaggcctctacccatccagtgaaagtgtctacacagaccaagaggtattttagtttcctgactcagggcatgtgagtagtcaatttgccagtcctgggcagggccaaatcccagagcttgatgtgtagggaagggagggggcctgaacaatccctgaggagtaatagaatagcagatggaacactgagaagtgatttccttgaggatagatttccacaatggaaaggaaatgagaggttctaagaggcaggctagtggcatgtaacctacatggaagaggttatgaaaggacgacagaatagactgggcctgtgaggctggaaggagatatttttcttggtccaagaaccatttgccttgtgtgggaagagattgataggtggaagtttcggtgggggagtaggtgggagtgactgatgagaaggagaaaaaccggccatgagggacagaagttggaatgctagctgcttctttagcattgccctgagcgatgggatccgatgccttttgatggcccttgcagtgaatgactccagcttcctttggaagtaaagcagctttaagaagactttttattaaggaggcattgatgatggaggacccttgcgtagtgaggaaacctctttctgcccatataacagcatggtggtacaggatatggaaggcatatttagagtcagtataaatattgatgtgtagtccctttgcaagagtgagggcctgagttaaggcaatgagtttggcttgctgagaagtagtggagtggggcagagtggtagcctcaaggataaatatggaagatactatagcatagcctgcctttgctggtgagtggcaattaggcctgatggaactgccatcaataaaccaagtgtgatcagggtgaggaacaggaaagaaggaaatatggggaaatggagtgaatgccaggtgtatcagagagatacagtcatgggtgtcaagtgtggtatcaggaataatgtgggaggccagattgaagtctgggccaggaacaatggtaattttgggagactcaacaaagagtgagtatagctgaaggagccggagagcagaaagtatatgcatcaggtgtgaggaagaaaatagattttggaagttataagaactgtagagagtgagttgagcacagtttgtgatttcaagggcctctaaaagtattaaggcagtggcagctgctgcacagagacatgatggccagcctaaaacagtaaggtcaagttgtttggacaaaaaggctacagggcacagtagccttgtgtaggaatcctggtccttgtgtaaaaattccgactgcacagccctgtactttggctgtgtgtaatgaaaagggttgggatgagtcagggagagctagtgtgggagcagtctctaaagctgtcttcaaggaacggaaagaggagtagggaaaggatttaggatctatggggtcagctaggtttccctttatgagtttacattaggttttgttagtacggcaaaaccaggtatccaaagatgaaagtatccaaccatgcccaggaaggaaagaagttgtttttttgtagaaggggttggagtttgagagattagccagacatgattggcagggagaacatgcatgttttcatgaagaattatgctgaggtaggtaacggatggggaagaaatttgagctttggaggggggatacctgatatcctctggagaataaatgttgaaggagcaggagggtatcttactgagaagactcaaaggagggactacaaagtaaaaggtcatccatgtattgaataaggtgggaagcagaggggtggaaagaaagtaaatcacgagaaagggcttggctgaagtaatgagggctgtccctgaagccttgtggcactatagcccaggtaagctgctgggactgacgtgtgtcagggtcagtccaggtaaaagcaaagagaggctgggatgaagggtgcaaaggaatagtaaagaaaccatgtttgagatccaggacagaataatgggttgtggagggaggtattgaggataggagagtatatggatttggcaccatagggtggataggcaagacaatgtggttgataaggcacagatcctgaactaacctataaggcttgtccagtttttgcacaggtaaaaggggggaattgtaaggagagtttataggctttaaaaggccatgctgtaacgggtgagtgataacaggctttaatccttttaaagtgtgctgtgggataggatattggcattgagcagggtaagggtgattaggttttaatgggatggtaaggggtgcatgatcagtcactaaggagggagtagaggtgtcccatacttgtggattaaggtaggaagacacaaggggaggacgtgaaggaggctctgaactggggaaaagggcggcaatgaggtgtggctgtagcccaggagtagtcagggaagaagaaaatttggttaaagtgtcctgacctaataagggagctgggcaggtggggataaataaaaaaagagtgcataaaagaatgttgtccaagttggcgccagagttggggagttaagaatgttgtcccagttggcgccagagttggggagttttaagaggtttagaagcctggctgtcaatacccacaacagttatggaggcaagggaaacaggcctttgaaaagaaggtaatgtggagtgggtagcctccgtattgatcaagaaggggacagacttaccctccactgtaagagttactcaaagcgtccgtgatggtccaggaggcttctgaggcaatcggacagcgtcagtcttcagccactaagccgagaagatccgggaaggagtcagtcagagaaccttgagccagagttcgaggggctctgggactgtctgctgggcgagttggacagtccgatttccagtggggtcctgcacaggtggggcatggcttaggaggaatcctgggctgtgggcattccttgccccagtggccagatttctggcacttgaagcaagatcctggggaaggcagtcctggaggaatgcctgacccttgcagtttaggcgttctgaagttcttgtgtgctggagatgtggctggggtttctctcacagaagaggcaagtaatcgcaactcttctctattattgtacaccttgaaggtgaggttaattaagtcctgttgtggggttgagggccagaatccaatttttggagctttttctaatgtcaggagcggattgggtaataaaatgcatattgagaatatgacggccttctggcccctctgggtctagggcggtaaagcatctaagggttgttgccaaacgggccatggactgagcggggttttcatatttgatgaaaaagagcctaaacactaactgatttgggagaggttgggtaaagaaaaaggagcattaaccttggctatgccttcagctccagccacctctctaagaggaaactgttgggcaggtgggggagggctagacgcagaacaaaactgtaagccagacccggtgtgaggaggggaagtgatagaaggattatagggtgggggagcagaggctggcgaagagttgggacctggctcagcctggcgaggagcagcctgaggagaagaggagaggtcagatgagtctgtggaaaaggaggattcaaaggactcagagcttggggtggagactgaaggaacagacaggagagaaagaagaaagttttgggatgagtctcatcaggagcagagattaggaagggactgaagtgtaaaagaatgcctggacatcagatacctcagaccatttgtccattttatgacaagaattatctagatcttgtgggatggagaaattgaaagtgccattttctggctatttggaatcattgtcgagtttgtactggggccaagcggtgttgcagaagaaaataagacgcttaggtttcagttcaggtctgagttgaagaggttttaagtctttgagaacacaggctaagggagaagaaggaggaatggagggtggaaggttgcccatagtgaaggaggcaagcccagagaacagagagggtagagacacggagaagagggggtagtgagcagccctgggctgcaatgtgggtgagcagccaaagcaggcatccccacaattgactgaccaccaagggaatgtgggtgaataatcaggcaggcgtccccgtggagatcagacaccaatggagtgtgggtgaataatcaggcaggcgtccccgcggtgattaaacaccaaggaaaggctgtcttcccgagtccgtgactggcgccggagttttgggtccatggataaaatgtgtctccttgtctctactagagaagaaaaagaactggaattggaaggacaggaagattgaagggtagcgagagaggaaggctggagggtagtgagagaggctggagaagagcgaaaagaccacttacctgatttgaaattggtgagatgttcctttggctggttggtctgaggacccgagttgtaggtggatctcctcacccagtgaaggtgaggacaggggaccggtctcccgaaggagtcctcccgtcccgagttttggcaccaaacgtcacgcacgtctgtgtgaagagaccaccaacaggctttgtgtgagcaacaaggctgtttatttcatctgggtgtgggcgggctgagtccgaaaaaggactcagcaaatggtggtgggatcatcattagttcttataggtttgggataggcgtacaaagtacagtctcaagagtggggacaatattacaaagtacattctcaagactggggagaatattacaaagtaccttcttaagggcgggggagaatatatcatatcagttagggtggggcaggaaaaaatcacaatggtggaatgtcatcagttaaggttattttcacttattttgtggatcttcagttgcttcaggccaggtggatgtatatgtgcaggtcacaggggatatgatggcttagcttcagctcagaggcctgacagtcaggagttcaaaacaagcctggtcaacatggtgaaaccccgtctctactaaaaatacaaaaaaattagccaggcgtggtagtggatgcctgtaatctcagctacttgggaggctgaggcaggagaatcgctggaccttgggaagcagaggttgcagtgagccgagatcatgccattgcactccaacctggaagacagagtgagactgcatctcaaaataaaaataaaaataaattaatcatctgttggctgggtgtggtggctcacacctgtaatctcagcactttgggaggccaaggtaggcggatcacctgaggtcaggaattcaagaccagcctggccaacatggcaaaaccccgtctctactaaaaatacaaaaagtagctgggcatggtggcgggcacatgtaatcccagctactcgggaggctgaggcttgaatcgcttgaaccagggaggtagaggttgcagtgagccgagatggtgccactgcactccagcttgggcaacggagtgagactccgtctctaaaaaaattaattaatgaattaattaatcatctgttgaaaaggacctgtctccaaatacaaccacacattgaggtagaggggttagggcttcaatatattgatttttgggagaaacagggcaacatggcaacaagccacagtcactgtgggcgggcctgagtggggagtgcaggggttcctgtcctgtgtgtctgtctcacaggggagtcccgacctgaccctcacagcccctccacccagaccttcctgcatgttccacccagcccaccctcctgcacccaagagcacccagccctccctcctgctcatgcccctcccttctcaaatccctcccagcagtgcagctctgggctaggacacagcctagggaacgtgactgagaaagagccaagaaaacttgatcagtgatcaagttggtgtttaagtaagattttcaataaaaagtagaattgggtactacatggaggcctgagatgttcagagctttttgagaaagcagaacagaaagtagaagggcaaccaggaaccagaggtgccagagaaccggaagcgcgggccctccgaggagacagggagtgggcacctgggtcttgggcctgtcgacaaacagagtcaaactctgtaaaatatttgaagagacgtattctgagccaaatacgagtgaccatggcccgtaacacagggctcaggaggtcctgataacatgtgcccaaggtggtgggggtgcaacttggttttatatattttagagaggcaagagctatcaatcaaatacatttgagaaatacaggagctgggtacagtggctcatgcctgtaatcccagtgctttgggaggctgaggtgggtggatcatgaggtcaggagttcgagaccagcctggccaacacagtgaaaccctgtctctactaaaaatacaaaaaattagccggtgtgatgatgtgcacctgtaatcccagctactcaggaggctgaggcaggagaatcacgtgatcctgggagacggaggttgcagtgagccgagatcacgcaagggcactccagccagggcgacggtgtaagactccatctcaaaaaaaaaagaaagaaatacattggtggctggacacagcagctcacgcctgtaatcatagcactttgggaggccgagccaggtggatcacgtggggtcaagagtttgagaccagcctggccaacatggcaaaaccctgtctccactgaaaatacaaaaattagctgagtgtggtggtgggcgcctataaccccagctacttgggagactgaggcaggacaattgcgtgaacccaggaggcagaggttgcagtgagccaagagcatgcaactgcattccagccttggagacagagcaagactctgtatcaaaagaaaagaaaagaaatacattggtttggttcagaaaggtcggatgactcaaagtaaggggagggggtttggggggcttccagggtacaggtaaatttaaatattttgtgggccaggcacagtggctcacacctgtagttgcagcactttcggaggctgaggcaggcggatcacgaggtcaggagatagagaccatcctgactaacacggtgaaaccccatctctactaaaaacacaaaaaattagctgggcgtggtggcggtcgcctgtaagcccagctgctcgggaggctgaggcaggagaatggcgtgaacccagaaggcagagcttgcagcgagccgagatcgcaccactgcagtccagactgggtgacagagcaagactccatctcaaaaacaaacaaacaaaaaacattttctggttgacgattggttgagtttgtctagagacctggcatccatagaaaggaaacgttcaggttaatataaaagattgtggagaccaaggttctttcgaagtctcatagtggctgcccttagagacaatagatgacaaatgtttcccattcaggtctttaaaaggtgcaattagttaatatgtttaggactgggaaggtctggaagaaaaagatccagctatattaatagagattctttacagatgcaaattttcccccacaaaggacaactttgcagggccatttcaagatatgtcaaagaaacatgatttggggtaaaatgttttgtcttctttgtcacgtaattttgtgcctgagtcagactggaaaatatctcacaatatatagggttaaataaaacccatctgggccgggtgcagtggctcatgtctgtaatcccagcactttgggaggcctaggtgcgtggatcacctgaggtcaggagttcgagaccggcctggccaacatggtgaaaccccatctctactaaaaatacaaaaattagctgggcgtggtggcgggtgcctgtaatctcagctacttgggaggctgaggaaggagaatcgcttgaaccagtgaggcagaggttgcagtgagccaagactgcaccattgtactctaggctgggcaagaagagtgaaactcagtcttaattaaaataaaatgaaataaaataaaataaaaatagaagccatctgatgaggatatatgcttggtagggcatgactccccagacctcttagatagtgtcacacacgtccgtgtgaagagagtccacagtaggctttgtatgagcaacaaagttatttatttcacttgggtgcaagtgggctgagtccggaaagagagtcagcaaagggagataggggtggggcagttttataggatgttggtgggcagtggaaaattacagtcaaagggggtttttctcttgtgggcaggggcagggcttacaaggtgcttggtgggggaacttctgagactcattgtccaggagaaataacttcacaaggtaatgtcatcagttaaggcaggaaccggcaatttttacttcttttgtggtttttcagttgcctcaggccatctggatgtatttgtgcaggcttgggctcagaggcctgacattcctgtcttcttatattaataagaaaaataaaacaaaatagcggtgaagtgttggggcagtgaaagtttttgggggtggtatggagagataatgggtgatgtttctcagggctggtttgagtgggattaggggcatcatgggagagattaaactgaagaaagattttggggtaaagggtgataaaccaagtgtgatcagggtgaggaacaggaaagaaggaaatatgaggaaatggagtgaatgccaggtggatcagagagatacagtcatgggggtcagatgtggtatcaggaataatgtgggaggccggatttaagtctgggccaggaacaatgataattgtgggagactcaacaaagagtgagaacaactgaaggagctggaggtcagaaagtatatgtgtcaagtgtgaagagaaaaatagattttgaaatttatgggaactgtagagagtaagtggagcatgagcatagcttttgattttgaaggcctctaaaagtataaagcagcggcagccactgcacagagacatgtgggctagcccagaacagtaaggtcgagttgtttggacagaaaggctacagggtgctgtcccggctcttgtgtaaattccgaccgcacagtcttgtacttcggctgtgtgtaatggaaagggttgggttgagttaagaagcgctagtgtgggagcagcttctagggctgtttttaaggcatggaaagaggagtggggaagaatttaggatctatggggtcacctaggtttccttttgtgagtttatgtaatggtttagccaggatggcaaaaccaggtatccaaaggcaaaagtacttaaccatgcgtaggaaggaaaggagttgttgctttgtagaaggggctagggtttgggagatttgccagacacaatcagcagggagatcacgcgtgttttcatgaagaattacagtgaggtaggtaacggatggagacaaaatttgagctttggagggggatacccgatatcctttggagaataaatgttaaaggagcaggagggtgtcttgttgagaagattcaaaggaggggctataaagtagaagatcatcaaaatattgaataatgtgagaagtagatggacggaaagaaagtaaatcatgagaaagaacctggctgaagtaatgagggctgtccctgaagtcttgtggcaggacagcccaggtaagctgctgggactgatggtgtcaaggtcagtccaggtaaaagcaaagagaggctggtatgaggggtgcaggggaacagtgaaaaaagcatctttaagatcaagaacggaatagtgagttgtggaggaaggtattgaggacaaagagtgtacgggttgggcaccaccgggtggataggcaaaacaatttggttgataaggcacagatcctgaactaacctgtaatacttgtccagtttttggacaggtaggacaggagagttgtaaggagagtttgtaggctttaaaaagccatattgtaacaggctggtgataagaggctttaacctttttaaagcctgctgtgggttgggatattggcattgagcaggataagagtgataggggtgggacagttttataggatttgggtgagtagtggaaaattacagtcaaaggggatttttctcttgcgggcaggggtgggggttacaaggtgcttggtgggggagcttctgagactcattgtccaggagaacggatttcacaaagtaatgtcatcagttcaggcaggaaccggccattttcacttcttttgtggttcttcagtgcctcaggccatctggatgtatactcgcaggctgggctcagaggactgacaggtaggaatttgggaaagataaaaaaaaaaaatcagagcttagtcctcacgcctataactaaaaatagaatcgttagcccccacttaccaactttggcccctagtggccaaaggtatctcagaaaaaccttaaaactgagttcctggccatgatgggaggggaggtcaggcacgcctcattatcacccctcccttttgcagtttagacacaactgaccagcagtaatgttaaaacagaatcataagaccggcagaaccagaacagactcttcatggcaatcagataccaaatcacaaccaggacctcaggccgtgccaggcaagggtgaggtcacacaccctacacttcaacagtcaactctgttctgcctgccacaaggtttttcttttgcttgtttagcagctaaacaagaactgcctcgagataaagaagatgaaaacaatcgcagctcatccagcgcgctgacacggagcaacagagcccctgctccacagccctaactccagctttccctgggcaagagactgatttcagtaacttcctccagatcagaagaccactgacaacagactggttctgcatggtttacagacctggcaaatttcggtgccttcatgtcctgaaaagaccctttgacatacaggcttaattgtagtacatttaaatattgtcctttaggaggccgaggtgggtggatcacgaggtcaggagatcgagaccatcctggccaacatggtgaaaccccgtctctactaaaaaggcaaacattagcagggcgtggtggcgcacacctgtaatcgcagctactcaggaggctgaggcaggagaatcacttgaacccagaatacagacgttgcagtgagccgagatctctccactgcactccagcctggtgacagagtgagaccccatctcaaaaaaaaaaaaaattcctcatgagagagttaaagttcgtcttattctcacactgagattttggaatgagctgtgtattttacacgtgccaaagtctctaatcagagccctatttcaggtgctcagtagcttctgtggtcaaccttcaactccacgggacaatgctgttccaatggcctccccagcagaagacaggcagggaacaaggctgaccccagagggccaggccacagcaggggctgaggatgcctggtgaatggatgcctgggagaaaggatgccagaattcgtgctcgaggacatgatgaaacagggaaagactcaatagaataaagaaggaaggggacgggtgcggtggctcacgcctgtaattccagcactttgggaggctgaggcgggcggatcacgaggtcgggagttcgagaccagcctggccaatacggtgaaaccctgtcgctactaaaaatacaacatttagatgggcatggtgtcacgagcctgtagtcccacctacttgggaagctgaggtaggaaaatcccttgaacctgggagacagaggttgcagtgagacgagattgtgccattgcactcgagcctggctacagagtgagactctgtctcagaaaaaaataaaaattaaaaataaagaaggaaggagaaggatggaagcgaatctcaatgaacaaaatgcactgggacctactatgtacccagaaaaatgaaaagtaaataaataaaataaggacttgcatggtggtttatgctcatagtcctagaactctggaactctggaaggctgaggcaggaggatcgcttgagcccaagagtttgagatcagcctaggcaacatgcgaaacccatctatacaaaaagatatgaaaacatacaaaaaaaattagccaggtgtggtggcacgcgcctgcagtcccagctaatcaggaggctgaggtaggaagatcccttgagcctgggaggtcaaggctgcagtgagcccagatcgcaccactgcaccccagcctgggcaacagagagagaccctgtctcaaaaataaataaataaggaaatgccctggggctccaggcccactctctgctcccatcgccccactcccgcactcctcctgctcctagtctgagctccccctgccttcctcctcctccttcccaggtcaatcctgagacccatagtcatgcagaaaggtgcttcctctcttggttctgcgacaacacactgtctcctaacaaaaactaccaggtcacctggtacacatcttggagcccttgcccagagtgtgcaggggaggtggcaagttcctggccaggcacagcaacgtgaagctcaccatctttgccgcccgcctctactacttccagtgtccatattaccagcaggggctccacaggctgagtcaggaaggggcctccatggagttcgtgggctacaaaggtgagacgtggggggctgaggtgactgggtgcaggagggacagcatggggggcagatgggtctcctgatatggtgaacaccacccggactgcgtgtatgtcccaaattacaattctttctttgcgaatgacatgtgaaatttagaggctcttctccacactttaaatttgactcaatattttcaaggcagatgtaagttattagagaatgagactctctataaaaatgaccccttcatgctgtggcctccacagaagatgccccgagtcacgtgcccacatggcaggcatttattttctcacagatctggaggctgcaagtacacgttcgcggggtgggttgggttgtttgctctgaggccgctcctcctggctggcagagagtctcttctggctgtgtcctctgtggcctttcctctttgcacctgcacctctgggatctctctgcctccaaatatcaacttttttttttttttgagacagagttttgctcttgctgtccaggctggagtgcagtggcacaatctcagctcactgctacctctgccttccgagttcaagcgattctcctgcctcagcctccccagtagttgggactacaggcatgcgccaccacgcccggctaattttgtagttttagtagagatggggtttctccatgttgctcaggctggtcttgaacttgtgagctcaggtgatccaccctcctcggcctcccaaagtgctgggattacaggtatgagccattgtatccaggctttttttttttttttttttttgagaggaggtttcactctgttgcccaggctgaagtgcagcggtagaatcactgctcactgcaacctctgcctcctaggttcaagcaattctcctgcctcatcctcctgagtagctgggattacaggtgcccagaaccactctactaatttttgtgttttttagtagagatggggtttcaccgtgttggccaggctggtctcgaattcctgactgcccacctcggcctcccaaagtgctgggattaaaggcatgagccagggcacttggccacccttctccttgatggacccccgccaagcgaatttgtgcccacactagaggtctcgtttaaagtaatcatctcggccgggcgtggtggttcacgcctgtaatcctagcactttgagaggctgaggccagcagatcacttgaggtcaggagttggaaacaagcctggtcaacatggtgaaaccccgtctctactaaaaatataaaaaaattatccgggcgtggtagtggacgcctgtaatctcagctactccggaggctgaggcaggcgaatcgctggaacccgggaggcagaggttgcagtgagctgagatcgtgccattgcactccagcctggaagacagagtgacgctgcatctcaaaaagtaaataaataaaaaataaaaagaaattaattatccgttggctgggtgcggtggctcacgcctgcaatcccagcactttgggaggccaaggcgggtggatcacctgaggtcaggaattcaagaccagcctggccaacacggcaaaaccccatctctactaaaaatacaaaaattagccgggcgtggtggcaggtgcctgtaatcccagctactcgggaggctgaggcttgaatcgcttgaaccagggaggcagaggttgcagtgagccgagatggtgccactgcactccagcttgggcaacggagtgagactccgtctctaaaaatattaattaatgaattaattaatcatctgttgaaaaggacctgtctccaaatacaaccacacattgaggtagaggggttagggcttcaatatattgatttttgggagaaacagggcaacatggcaacaagccacagtcactgtgggcgggcctgagtggggagtgcaggggttcctgtcctatgtgtctgtctcccaggggagtcccgacctgaccctcacagcccctccactcagaccttcctgcgtgctccacccacctcattcctcctacacccaacagcacccagccctcctgcctcctcatgcccctcccttctgaaatccctcccagcagtgcagctctgggctaggacacagcctagggaacgtgactgagaaagagccaagaaaacactcagtgatgaagttggtgtttaagtaagattttcagtgaaaagtagaattgggtactacatggaggcttgagatgttcagagctttttgagaaagcagaacagaaagtagaagggcaaccaggaaccagaggtgccagagaaccggaagcgcgggccctccgaggagacagggagtgggcacctggatcttgggcctgtcaacgaagagtcaaactcagtaaaatatttgaagagatgtattctcagccaaatacgagtgaccacggcctgtgacacagccctcaggaggtcctgagaacatgtgcccaaggtggtgggggtgcagcttggttttatacattttagaggggcatgggccatcaatcaaatacatttaagaaatacaggagctgggcgcggtggctcacacctgtaatcccagcactttgggaggctgaggcaggtggatcacgcgttcaggaattcaagaccacccttgccaacatagtgaaaccccgtctctactaaaaatacaaaaaattacccgggtgtggtggtgtgcacctgtaatcccagctactcgggagattgaggcagaagaattgcatgaacccaggaggcagaggttgcagtgagccaagaccacaccactgcactccagcctgtgggacagagcaagactctgttccaaaaaaaaaaaaaaaaaaagaaaagaaaaggccaggcgtggtgtctcatgcctgtaatcccagcactttgggaggccaaggcgggcggatcacgaggtcaggagatggagcccagtctggccaacatagtgaaaccgcgtctctactaaaaatacacaaaaagttagccgggcgtggtggtgtgcacctgtaaactcagctagtcagggggctgaggcaggagaatcgcgtgaacccgggaggcagaggttgcagtgagccaagattgccccactgcactccagcctgggcgacagagcaagacacaatctcaaaaaaaaaaaaaaaaagaaaagaaaagaaaaagaaaaagaaaaaagaaaaaaagaaacaaaaaaagtaaagaaaagaaatacattggtttagtcctgaaaggtcagacgactcaaagtgagggaagcggggttggggggcttccaggctacaggtaaatttaaacattttctggttgaggatgggttgagtttgtctagagacctggcatccatagaaaggaaatgttcaagttaagataaaagactgtggagaccaaggttattttgaagtctcataatggctgcctttagagataatagatgacaaatgtttgctattcaggtctttaaaaggtccaattagttaatctgtttaggactgggaaggcctagaagaaaaagatccagctatgttaatagaggttctttacagatgcaaattttcccccaccggggacaactttgcagggccatttcagatatggcaaagaaacatgttttggggtaaaatattttatctttcttctttgtcacataatgttgtgtctgagtcagattggaaagtaactcacaatatatagggttaaataaaacccatttgtgccaggcgcagtggctcatgtctgtaatcccagcactttgggaggccgaggcgggtggatcatctgcagtcgggagttcgagaccagcctggccaacatggtgaaaccccatctctactaaaaatacaaaaattagccaggcatggtggcggggacctataatcccagctacttgggaggctgagacaggagaatcgcttgaacccgagaggcggaggttgcagtgagccgagaccgcaccattgcagtccagtccgggcaagaagagtgaaactcggcctccattaaaatacaataagataaaaaaataaaaaatagaacccctctgatgaggatgtatgggttgtaaggcatgactccccagaccccttagataggattttgggcaagattaaataaaacaaatcagagcttagtccaaaggcctatgaactaaaaataaagtctttagcccccaccgatcccccccaactttggcccccagtggccaggggtatctcagaaaaaccttaaaactgagttcccagccatgatgggaggggaggtcaggcacgcctcattatcaccccacccttttgcagtttagacacaactgaccagcagtaatgttaaaacagaatcataagacgggcagaaccagaacagactcttcatggcaatcagataccaaatcacaaccaggacctcaggccgtgccaggcaagggtgagatcacacaccccacacttaaacagtcaactctgttctgcctgccacaagatttttcttttgctctagcagctaaacaagcactgcctccagataaagatgaaaacaatcccacctcacccagcgcccggacacggagtaacagagcccctgctccacagccctaattcctactttccctgagcaagagactgatttctgtaactttctccagatcagaagaccacagaccatggactagttctgaatggtttacagacctggcaaattttggtgccttcatgtcctgaaaggaccttttgacatacaggcttaattgtggtacatttaaatgttgtctccaccgcaatgtgaggacggataatacagctgcttttttttttttttttttttaatagattgttgtttgtttgttttttgttttgagatggagtctcactctgtctcccaggctggagggcagtggtgcgatctcggcccagtgcaacctctgcctcccgggttcaactgattctcctgcctcagcctcccaagtagctgggatttcaggcacatggcaccacgtccggccaactttggtagttttagtagagacgaggtctcaccatgttggccaggttggtctcgaactcctgactgtcatacatgtccatatagaagaccacctaaacaggctttgtgtaagcaataatgccatttattcacttgggtgcaactgggctgagtctgaaaagagagtcagcgaagggagataggagaggggcagctttataggacttgggtaggcggtggaaagttacagtcaaaggcggtcatctgttgtcagcaggggagggggtcacaaggtgcatggtgggagaccatgagacccattgtccagaagaagaatgtcataaggtcgattgatcagttagggtagggcaggaacaagtcctaatggtggaatgtcttaaggttggttaatcagttaagggagaaactggctgtttcacttcttttgtgtttttttggctgttccagacttcttggctgctgcaggccatctggatgtatatgtgcagttcacaggggtcacaatggcttagctctggctcagcggcctgacactgacctcagatgatccacctgcctcggcctcccaaaatgctgggattacaggtgtgagccactgtgcccgcctgggatcatatgttacacgcatgtttgttcaataagcatggagtgcagccacccacatgaatattcatagctcctcctgtagcctgttcaatatgtatgtttagctaaccccttcagcataaagctcctgccccaacccctcctgcttctaaatgtctgtctctggtgttaaccagaggctgctcttcccaggctgctggatggctaccttgcaggctgtcacccttaacaagaaataaagtgtcatttgcaaatgcatcccttgtgtaatttgtaggtcaccacgccatgggaacacgctaccaggggaagggagctgtgagacgcgcagggaggctccagacaggctggcctgggacaccagccgctgcccttccataacatggggacaagagagggcaaaagttcagcccaccacggaggatctccgggcaggagatggggaagaaggagaagcaggaaggaaagagctcagtgtgggggcgcgcatggcatcccggtgggacatctgaggcccacacccacctgctgtccctccctcccacggtggcctccgagggtgacggcctggggggaggcagacgcctggccatttactctccctccctgtccccatggccgctgggtgggggccgtctctgggatgatccccgagggcaggatccgggagtccctgcggaggcatcagcctgtctgtcttgatggtggagaggaggctccagctgggcgggaccaccaggggaggggcttgtgctctgctggctcagcctggtgtggacccacctcccgggcgctggctgcaatgactttctctttccctttgcaattgccttgggtcctgccgcacagagcggcctgtctttatcagaggtccctctgccagggggagggccccagagaaaaccagaaagagggtgagagactgaggaagataaagcgtcccagggcctcctacaccagcgcctgagcaggaagcgggaggggccatgactacgaggccctgggaggtcactttagggagggctgtcctaaaaccagaagcttggagcagaaagtgaaaccctggtgctccagacaaagatcttagtcgggactagccggccaaggatgaagcctcacttcaggtaccgctgcccgctctacccactgggcccctctgctgccccttcttgcctggtggctctgctgggcgtcagccctggccttcccctgccccagccccagccctgggctccctcccctctgactcccctgcaccccctactcccagccaggctccttgccctgctgtgttgtcgccccactgctgcttctgaatgggccgcctcccccatctgtcccagcccaggtcccctgctgagactctcccctgaaagtcatggctggggtggtgctcccggccctgggagggtgctccctctgtgtgcttcccgccattcctgaactctggaactgggagaattgaaccaaaggatgagtagagcaaggtggaattttgttcacagggctttgatggattttctgtaagatttactttgcttaaataccaagtcttaggagagggtgtggggagggaatggtctctgaagcacaggataaatcatgtcttccaaggatgtctccactgtgggcagaggaggatgcagatgaccccaaacacacgctcctcctccactatcagcattcactgtttataaatgacaccagtaacatggaatatagtggccgggtgcggtggctcacacctgtcatcccagcactttgggaggctgaggtgggcggatcgcctgcggtcaggagttcaagaccagcctgaccagcatggataaaccctgtctctactaaaaatgcaaaattagctgggtgtggtggcgggcgcctgtaatcgcagctacttgggagtctgagacaggagaatccattgaacccaggaggcggagtttgcagtgagctgaggtcgccccattgcactccagcctgggcaacaagagcaaaacttcgtcttgaaagaaaaaaaaacaaaaacaaaagaaaaaacatggaatatatgggaaaaaaactcaatgatcaggaggaatgttgttattttaaaatttagtaagaagagagcccggtccccaatggctgcctcctgcagggccagtgatacagagactggacagggctggcctggaaaggggcccccactccatttgtccccagctctgtggcctgggcaggttaccccgcctctctgcgcgtctggcccctcctctgtaagacgggaatggcccctgccagcctagggcagcctcacatgagctcacccccgcgcagcacttagaagactggcctgggcctcagaattcggttctaccatgatttaacaataataatatacagaggtgaaatgtcaggaaggaactgagctgaaaggttaaaagctgttattttggggtgaagagttttattctgtctctctctctctttttttttgagacggaatttcgctcttgtcgcccaggctggagtgtagtggcgcgatcttggctcactacagtctccgccgaaattctcaggggaggggagggatgggggaggcctagagccgtccagggggctgtgtttagtggacatcagcccggagggcccccaggagtgctctctacattggctggtttctctcttgtgtcttcagaaacacagtggagcgaatgtatcgagacacattctcctacaacttttataatagacccatcctttctcgtcggaataccgtctggctgtgctacgaagtgaaaacaaagggtccctcaaggccccctttggacgcaaagatctttcgaggccaggtaccacccggactccaatcactttgcaggcaggagctaagccagctgggaaagcaaaccacgcactgataagtgaagtgcccggcggcgggctatccagtgtgtccttctctcccacactttccaagtccgtggccctgaccttcctgctggaccgtcctgggatcggatcgtggagggggtttgcctctgcacaaaaggccttgtgtttccgtttttcttttcttttcttttttcttttttttttttgagacagagtttcactcttgttgctcaggctggagtgcaatgacgcgatctcggctcacagcaacctctgcctcctgggttcaagcgatgctgtcgcctcagactcgcaagtagctgcgattacaggtgcccaccaccacgcccagctgattttttttttgtatttttagtacagatggggtttcaccatattcaccaggctggtctcgaacttctgacctcaggtgatccacctgcctcggcctcccaaagtgttgggattacaggtgtgagccacagcgccggcctaattttaatatttaattaatccaatgtggctaacatattacttcaacattaattaacataaaattcttgacaagataatgaagtttctttttcttgtcacaccgagtctttgaaatgagctgcgtgggtcacgtacagtgggtggctcgcacctctaatcccagcactttgggaggccaaggcgggcagatcacctgaagttagatattcaaaaccggcctgggcaacatggtgaaatcccatctctactaaaaatacaaaaaaaaaaaaaattagccaggcatggtggcagtcacctgtaatcccagctactcgggaggctgaggcaggagaaccgcttgatcccatgaggcagaggttgtagtgagccaagattgcatccttgcattccagcctgggcaacaagagcgaaactccatctcaaaaaaaaaaaaagaaatgagtggtgtatttttcaggtgcccaggtctctaatcagagccccatttcaagtactcagtagtcccttggccatgtcaccccccccgacatggacagtgcaggtccagtgggctccccactgactgcaggcagggaacaaggcagaccctagagggccaggccacagtaggggctgaggatgtctggtgaatggatgcctgggagaatggatgctagaattcacacacgaggccatgaacagggctgggaaaacttccaaactcagggaagcacgtgtcttggtgcaccttgtgatgcttcaacagcaggactgagatggggacatttacaatgaacagaaatgtatgggctcgagttctggactctgggaagtcccctgtcaatgcaccagcaactttccagggcctgcgagctgcacagtcacgtgggggtgaaggttgttgccagaagctcaggggatgctccagacagagtggcctgggatgtcgagtcactgctgctccgtgacatgggggcaagaggaagcagtttagtctgacatactgcccccccagctagagggcaagagacagaaagaggggctgaagtcgcccttgaataaccacagcagtggcacccacaaaggtgcagttcccacagcctcatagctgcttgtaggtgccacctcttaaggccattaccatagcaattaatactgaacatgagctttggagcagacaaacactcaaaccgaacagggggatggaggaaaggagcttcaatggcaagatctcctggactcctgtcctggcccctcctccccctgccccacccctgctctcctcctgctccccctctcagagcttgccctgaccctgctcctctcccaggtgtattccgaacttaagtaccacccagagatgagattcttccactggttcagcaagtggaggaagctgcatcgtgaccaggagtatgaggtcacctggtacatatcctggagcccctgcacaaagtgtacaagggatatggccacgttcctggccgaggacccgaaggttaccctgaccatctttgttgcccgcctctactacttctgggacccagattaccaggaggcgcttcgcagcctgtgtcagaaaagagacggtccgcgtgccaccatgaagatcatgaattatgacggtgagaagtgggaggttcaggggtgtgggagagactgcttaagtgtctgtgatgggtccttcccacacatacctgtgggtctgctctgatgcctgcaaaggccaagtgtcccaggggagcctgtggggttgggtctggcgctgactgtaactagtatctagaatatgtctgggaggggagggtcccgaggtcacagaagagaggccagctgggcttgactgcgttctctcttctttttcttagaatttcagcactgttggagcaagttcgtgtacagccaaagagagctatttgagccttggaataatctgcctaaatattatatattactgcacatcatgctgggggagattctcaggtgagggtctccctccaggctcatcgcctcgctcctctcacctcctgctcatcctcttgaggcctcccctctgttccagaccaggtcctctcctggccaggccctcctgccttccctcctgccccctgcctgccctcgtggttacactccctcacccacactcctcgtgctccctccacctccctgcctcccacctgctttcctgggcccttcctgtgagtgagaggccccttctgcctccagagcaacctccatccacccccacagcctgggagccccaacctggccccttccatctccctggcataaccgaatttgtcgtaaaactggacgtagtaagtgggcatgaatagtcacaagcccggcagtcagaagctttgagcaacatccttaaaggccaacctgagcccctgagaaggagctgcctccatggaaacagagcttcaggcttcggctgccatagaagatggccgggctgggtgcccacagggcaggcatttattttctcacacatctggaggctgcaagtccaaggtggaggggtgggcggggttgtgtcttctgcagtcgctcctcctggctggcagggggtcccttccggccctgtcctctctggcctttcctctgtgcacctgcactcgtggggtctctctgcctccaaatgtcctcctcgtttatggaccccagtcatgtgaatttgggcccacactgaaggtctcatttaagttaatcatctgatgaaaggacctgtctccaggccaggtgcagaggctcatgcctgtaatcccagcactttgggagtccaaggcgggtggatcacctgaggtcaggagttcgacaccagcctggccaacatgttaaaaccccatctctaccaaaaatacaaaaattagccgggagtggtggtgggcgcctataattctagctactcggaaggctgaggcaggagaatcgcttgaacccgggaggcggaggttgcggtgagcccagactgcgccgctgcactccagcctgggcaaaaaagcgaaacttcttctcaaacaaacaaacaagaaagaaaggacctgtttccaaatacagccaccctttgagggagcgggggttaaggcttcaatacattgattttggggagaaacagtgaaggccacggcaagaagctgcagtcattgtgggcgggcctgggtggggagtgcaggggttcctgtcctgtgtgtctgtttcccaggggagtcctgacctgactctcacagcccctccacccagatgttcctgtgtgcttcacccaccccattccttctgcacccaacactcctgagcccctccttagctcccccgacaggctcccctgctcccccactcccgggctgctcctcttctcagcctctctctgggcctctctggggtccggacatgacccctcagctgatgcctgtggcttccccagccagaatcttcccagttccaggctgggctctgcagagtcctatcaaaggtggcatcctcccctctgtccactccagggtgaagatctggtgtttctggtttggaaatgcctctgcactgggtgctaataattcacttttacctttataattgtggttttgtaaggacaggtatttttggcaacagaagaaatcctgtgagttatttaaaaaaaaacaaaaaaactccctggcaggctcttctccccgctggtcccgctcaggagtgtctctgccctgatgctgggtgtggcaagagttaaccctgtaggcaggaggggtgccccagtgggtccacctccagcaaggactgagagcgagcagagccaggactggggtctatggtgaggccagggaagaagacccagctgtaccccagggagagggcctgagcacactgagctgaccctggggagaccctgacaaggcttagacaggccccagggctgccgtgatctcccagtgagccccagaaggggtcagagggggaggtttggaggctctagcaagtgagtgggagccccttctgacaggtgctaagggatgtggggagccgggggaaggaaggagggtggggtgcaagggaggaagcgtggagagggagggggaggtgggacagaccaggagggctcttactcctctgggcttttcccccactttccagacactcgatggatccacccacattcactttcaactttaacaatgaaccttgggtcagaggacggcatgagacttacctgtgttatgaggtggagcgcatgcacaatgacacctgggtcctgctgaaccagcgcaggggctttctatgcaaccaggtgaccaacccagccacccgcatccaggcagggccctcccaacccagggacacccatgggcagaaggttctgggtggtacctgtggtgtcctgcagagtgtctgtcacctgtgcttcctgtagctgctgctgcttggccctggggttgggggagacttcggcttcagtgactctccaggattggtggcttccagccccacacgcctaaccagccacatgtctcaggggctaacaccactagtccagagtcacccccaggtccaggtctcagccgtccccactcctgctgtgctctgagagggtcagggcagaggaaaagggtctgcaccagggccaagtgggatcaaagaaaaagcgcttccggccgggcacggtggctcatgcctgtaatcccagcactttgggaggccgaggctggcgatcacaaggtcaggagatcaagaccatcctggctaacacggtgaaaccccatctctattaaaaatacaaaaaattagccaggtgtggtggcaggcgcctgtagtcccagctattcaggagactgaggcaggagaatggcatgaacctgggaggcagagcttgcagtgagccaagatcgtgccactgcactccacctgggcaacagagcgagactccgtctcaagaaaaaaaaaaaaagtgcttcctgaggaccctcccaggatcccctcacagacacagctcccaccaggaatgattcagaactgtgggatttgaggatcagggcctacctgacctcacaaggccaggattccccagtgcctgctcctgggcttcatcctgcgggaaaagagactgaggcaggagaggccgaccagggattctgtcctgaccaggatggagcccacagcaaggccagaacaggccccaagtcaggatgcagggatggccagcatttgaagaagagctgggccaggccaggccgaggggccctgagcccgagggacgttcttccctcgcccttgcccagcacagcccctggctggagaggccaaattctgcttggctctggtgctggaaacggggttcctctgggctctatgagcttaatatgggccctgctgggcccacacacactgcttggaagctactttcaaaggcaccggtccccatcactgtctaaccagtgggatgggactcccccaggaatgacccacagccccttctcagcacaaatcgtgtcatccattctaccccgagtcctctctgcactggactcctgggcttgactagttcccagtcgaaatttggacaaaacaccatcattccttgggctcaacaaggacaatcaccccatgactggggcccttcccaatgtggggttagtcctgctgggggcccctcatccccacttctccctgcaaagggagccctctggcctcagtctatgtcactcgtgggcttaatacagggtaaagcacaatgtggaagcttctagaattataggtcacagaaggggtggggcaaggggaattgacgggtagacaggtcagcctccccatgagggaagcacacgcagctcagtggcatctgtcctccctcccccagctctacagcccctccctgcaggcctggggcggagtgagggtcctgaaggcactgacctcatgtgcagaatgagaggatgctccaaatactcagtatcagagaaatctcatcgtaatggaaaattaaattatttaatagattattgtaaaaatccggtcaggtgtggtggctcatgcctgtagtctcagcactttgggaggctgaggcgggcagatcacttgaggtcaggagttcaagacaagcctggccaatatggtgaaaccccgtctctactgaaaatacaaagattagccaggcgtggtggtgcatgcctgcagtcccagttactggggaggctgagacaccagaatcgcttgaacccgggaggtggaggttgcagtgagccaagatggcgccactgcactccagcctgagtgacagaaccagactctgtctcaaagaaaagaaaggaaaagaaaagaaaagtcatcttgataactggggtttggtgcccccgtctaattttgtgctggaggctgccccgcacccaccctgatccaggctgtccctcctgactcactaaaaattccctcggccgggcgctgtggctcatgcctgtaatcccagcactttgggaggctgaggagggcagatcacctgaggttgggagtttgagaccagcctgaaccacatggagaaaccccttttctactagaaatacaaaattagcctggtgtggtggtgcatgcctgtaatcctagctacttgtacactccagcctgggcaacaagagtgaaactctgtctcaaaaaaaaaaaagattacctcatggcttgctttcttttctaggctccacataaacacggtttccttgaaggccgccatgcagagctgtgcttcctggacgtgattcccttttggaagctggacctggaccaggactacagggttacctgcttcacctcctggagcccctgcttcagctgtgcccaggaaatggctaaattcatttcaaaaaacaaacacgtgagcctgtgcatcttcactgcccgcatctatgatgatcaaggaagatgtcaggaggggctgcgcaccctggccgaggctggggccaaaatttcaataatgacatacagtggtgagaatggaagcctggagtaggatggggtcagccagggcaggagagggccccgggaagttactagaaagtggggagggtcggcatccctgtgggaaaggccttgatcctctgcctgcagaggcgatggctgcactctggacctgactttggggtcgacgggaagagagaggccaggccaggagatgtggacctggggagggcggggagggtggctggaagtggaagcagaacttggggcttccagaaaaaatgagaactgggctggcccagattccaataggaaagaagtgcctgatgaaggagctaagtccctaggggagggagagggaaaggagggactgaaaccaggatgtgggaagtctgtcttgagagtcatgggcctttggtgccaccacgatcccacagcgggagtgtgacttatctcccctgtcccttttcagaatttaagcactgctgggacacctttgtggaccaccagggatgtcccttccagccctgggatggactagatgagcacagccaagacctgagtgggaggctgcgggccattctccaggtgagggcttcttccctctgcccagtgccccatcggcctccccctcctcccctctcccctgcgccgtgccttcccctctgctcagagcctcctctgggttccctgctcccccagggcacctgtctctgtccctccctttccttctcacagcctccctttctctcccacctcccacatccctccctcctctccgatcattgtcactgtccccaggcctccaccatatgcctactttccactcgctcaccctttgctccattcaacctccctgctcttccagaatcaggaaaactgaaggatgggcctcagtctctaaggaaggcagagacctgggttgagcctcagaataaaagatcttcttccaagaaatgcaaacaggctgttcaccaccatctccagctgatcacagacaccagcaaagcaatgcactcctgaccaagtagattcttttaaaaattagagtgcattactttgaatcaaaaatttatttatatttcaagaataaagtactaagattgtgctcaatacacagaaaagtttcaaacctactaatccagcgacaatttgaatcggttttgtaggtagaggaataaaatgaaatactaaatctttctgta

SEQ ID NO: 463 - DNA, 14283 bp, Homo sapiens
tgaagcttcaaggctgctgaataatttccttctcccattttgtgcctgcctagctatccagacagagcagctaccctcagctctagctgatactacagacagtacaacaggtaaatgtctttctgcttttcatttttcctagctagcattagtctctctctgtctctctcaggtgacagtgtcacttgccaatctcagtttttgttttaatttaaaaaacaataatttatagtaaaaaattagctaatgatttttttgctttctgttcatcctttgttttgtcattttttgtattatgtagagtatataagaggcataaatgcaaattttataactacatattatctgttttttaatatttaatggaaaatatatatgatttgccactagatcaagaagtatggcagtgacaactcgtttgacatggttgcacgaaaagatcctgcaaaatcattttggagggaagcggcttagccttctctataagggtagtgtccatggattccgtaatggagttttgcttgacagatgttgtaatcaagggcctactctaacagtgatttatagtgaagatcatattattggagcatatgcagaagagagttaccaggaaggaaagtatgcttccatcatcctttttgcacttcaagatactaaaatttcagaatggaaactaggactatgtacaccagaaacactgttttgttgtgatgttacaaaatataactccccaactaatttccagatagatggaagaaatagaaaagtgattatggacttaaagacaatggaaaatcttggacttgctcaaaattgtactatctctattcaggattatgaagtttttcgatgcgaaggtaggtttaattagataatcctgtagagagttctcccttgcatgtttggtaggtttgaaccaattcatctctttaaggaaaaatgaacttttcacttgtcaataatttggatgattcagactgaaacctggatacagattgtttgctaagagacaaccatggtcaataaaatgtatatttatgataagaacccttaacgtaagatttatcctcttagcacattttaagtacagtaaatcttctgttaatgtggactataggttcttggaaaatgtgacttaagtgaaaaaacttacaacgaaaccagtttatttccctcatcattatagaagaaagacattattcagggacatgctgtatgttgttttgcttaaaattacagtttccaagaatccatggtgatgttaagtgacgacttaccatgtaccagcagtggtcaccaacctttttggcaccagggaccagtttcgtggaagacaatttttccacagactggtggtggggggatgatttcaagcgcattacatttattgtgcactttatttatattgctactatgttgtaatatacaatgaaataattacacaactcattgtaatgtagaatcagcgggaacccggagcttgttttcctgcaactaaacggtcccatcttggggtgatgggagacagtgaatcatcaagcattagattatcataaggagcatgcagcctagatccctcatgcacaattcataatatggtttgcgctcctatgagaatctaattccgccaccgatctgacaggaagcagagttcaggctgtaatatgagcaatggggagcagctgtaaatacagatgaagcttcactcgcctgcctctcacgtcctgctctgtggcctggatccgaactggccacaaagagccacggctccgtggtcccgggagttggggacccctgccatatggtattgttgctgtaggtactatgctgtacagtagatctctgggacttaattatcttgcataagtaaaactttatgccctttgacaaatgtatcctcctttcctccttccaacagtccctggcaaaccaccattctaactctgcttttatgaattcgactattttagattcctcatataagcgggattatgtagtatttgtccttttgtgtctggcttatttcacttagcataatatctaatattgctgtattagtaatttcaaagatagaggcaagcagaaacctaagaaaaggcagaaagagtacttagatattctgtgtggctccctaaatctttcctttccatattggacatatgctttaagggccagaaaaataggcaggggttttaagtgaagtttatgggccactttacatattgaaaaattacacaccagtttccacgacattttcaaggcaggcaagcatgcccccttaatccatggaatctggatttttttttttgagacagagtctctgtcacccaggctggagcgcagtggcatgatctcagctcactgcaacttccgccccgcgggatcaagtaattctcctgcctcagcctcccgagtaactgggattacaggcggacaccaccatccccggctaattttttgtatttttaatagagacagggtttcaccttgctggccaggctggtctcgaactcctgacctcgtaatccgcttgccttggcctccctaagtgctgggataacaggcgtgagccaccgtgcccggctggaatctagatttatttactaagtaatgcttagccacaggtatcctgttaaggacgttcaagagatgtgtagtattccgtgtgggaaatatcattagtctatttaccaggacataaaattaccagcgtatttattagaaaattagactcagtcagttgtcttccttttttccctgagagtgttccctggtaaagtgagtgaatgtatctgtctagctgctttagctcctaccttcctagtgattcacccttatttttgtacgtagcaatagtttgttccttttcattcatatagtattccattgtggtgcatcctgcacagtattttatccaatcatcactggtggacatttgttttccagtttggggctattacaaataatactgctataaatattattattgtacttatcttttggttggtacatataattgttttttgaagaaaatacaatgaaattgctggatcatagggtatgtatatgttcattttcagttgacactgatgaaatttcccaacatagttttatataaatttctagaactataagtagtgtacaaaggtctctgtcactccaaatctttttcagcattttgttttatttttagattatgtaactattttggtatatgagtggtgatatgacatttagcaaatttgtctttctttgataaaacaagataattatttattttacattttaaaataatcaattactatattaatttatcctttcttcacgttttaaaatttggttttatattttataatttctctttatatttgtgtggtttgtttctttattcttttttattctattttcaattttcaatgttttccttcttgccattaatgaaatgggattttatcaaaacattgacataaaggttcatattgctatttcctatatatttataattgtggtttttatttccttttgggtattaaagttatttaagacagttctttttaaactcccaggaggctgcttttccaattgtttgtacttgcactttgctagtcttattacattatagatattgagtgaagttttcataatttctactattggtaatttattgtttactttgttgccatacatatagccatgtttataaatgttccacatgatattcttcttttgtagttgagagaattggtagcatcgcttatccttatcctttctgttttaaattcaccataaaaatgtctctttccaaaaaaaaaattctgagcccgtgccttattgatctgaatgaaatccactgcttacccctgaacaatttactgtgctctggttgggtaggcatgagtctcatcttctcttctgggagcaggaataaaattaagtgagctggaagttcctggagttccaattgttaatagcaggttgtagagaaaatctagtgcctgtgttttctgtttttgtgtctctgcacattattcctctcagacttattggattatggaggggaaaatgtcttattagacattcccacatttccacattagatattcccacatctctaggccttgcttcttttatttagaaaacacccacagcctcaattcccatgtcggagtaagttacacactactgttgagtaattgaatgagaagagatctgctgatagtacagagggtctacttacctctagccctagcctcttcaaatgagatgatgttaaagagatttatcagaatttgctctacaaaattgctcccttttcaccatacgggaccattctcatggaaaggctatttttgtatttgtccctagtgaattcactgatattcattcattcattcagccaattattcgacaacttctaatctacattattctttgattatttccccagattcactggatgaaagaaagataaaaggggtcattgagtaagtcaatgtttttaagattctattactctcttcattatctttgacttattctatgataggtctcatcaatataattggcaacacatattatcacacataacttgtggatcatcaagaacaaactgtatttataatcataaaatatttgataatattaatgttaaaaaaaaggacactgagtagaggaaaggaattttaatgtcatatacttgaagaaaaataattacttgtttgtatgtctgtgttttgcttagaattcttgcagttaatatttcaactactctagagagttgctgtagaagaagtggttggtgggtggagaaaacctaccatgaacttcaagaacatgttagaaattgtctactttcatgaacttcagaagtcatatatattgtgacttatatatatgtgacacaatatatatgacttctgaagtttagtcttaaataattgatctttatgtttaaaacagctattacttatctttagatttatatggtctagtaatttaaatctgaaagattttatgtctggctttagttgtgtattatttttgccttttgttctttttgcaataggatttcaggtaggttcgtctcatgtctttcatgtaagaagtcaagttgctaatcaaaaataatatctatgaaaaaatgaattctcagaaaatttataataaggttttgcgacctaacctcagtcaattgttaaaaacggtcatgtctaaacaggctcaggaagagcttactgtctgccttgagaacttatgaaccatatggatccctggttcaacaaatacgaattctgctgctgggtccaattggagctgggaagtccagctttttcaactcagtgaggtctgttttccaagggcatgtaacgcatcaggctttggtgggcactaatacaactgggatatctgagaaggtaagcacatttgaggccacctagcctttgcttctctgttcaaatcaattatatttcaaaagccttttgcagatcaactttattacatatagacttcatctcaatttataataaaaaatgaatctttaaaattgcttttctcccctctacagtataggacatactctattagagacgggaaagatggcaaatacctgccgtttattctgtgtgactcactggggctgagtgagaaagaaggcggcctgtgcagggatgacatattctatatcttgaacggtaacattcgtgatagataccaggtaatatttgactaatgagaaattataactgatttttaaaatgcttatttttgtacaaatgtatcagcgtttatcttcttaaattatacttgctcaagatcctttgtctcttttagattttttttttcaaaaagaataaaaacatctcgagggctcttccatcatggctatcttaacagctactccactttctattgctttcagctatgtgaaacagaaatccaactacatcaacttacccacacagataatttttcttatgtaagaggaagtctgaaggcaggcagcttgggaccagtgtggcagctatctgaagttactaacttcagagatccttctgactttttgaggccctcagcatgggctgttaagatatgcctcccccaaatttatatgttgaagtccctagtcctcaatgtgatggtatttggaggtagcgactttgggaggtaattaggtcatgaagatagagacctcatgaatgggattagtgctcttatatacataagaaagatgatctctttctgtcatgtgaagataaagcctgaaggtgactctctataaaccaggaagaggaccgtgactagaaactgaatcttctggccccttgatcttgaaattcccagcctccagaactgtgagaaataaatgtttgttgtttaagcacccgatctgtataatgtgtcatagcagccccacctgactgagacgtatggctgtcatttttatgtgaaaaaacactgagcactgtcagtgatccaggcaagaggaaggggagatcaaaaaaccatctaagtatatattttttaaacttgtagtcttttaatgaacattcagatctcgaattaatcagtaagtttactttgttccaaatggcagttaatgatgccagcatcactgaatgccttttgtatctttccattatgaaatatttgggtcagtttttgtattgtctagttttttctattgatgtagtgatctattatttcatgacagcattttaattattttaattactatattatctaattgctttaattaccgtagtaatcaattatggcttgataagttaccagacaagtcacattcattttttattactcctatttgtttttcttggcaattttcatacataggccttttcaagtgaggttttttgtgctttgtttgatcatttgtgtttgatttcttgttgtttagattgaaattatatttacactttatactgaaaattgattgacatctttacatatctcgtgtgcctattaaaaaacacagcaagttttgtttttctattcatgcaagattttttcattctttagtatagagttatcttgtaaatgctgtttatttttaaatattcttttttaaatacaaactttttatcatagagaattttaaaatatacaaagtagtttaatggattcccatgtactcagcatcaaaaatttttgactcacagccaatctcgttttatctatatctacccactttctcttctctcttattattttgaagcaaacccaagaaatcataacatttcattcaatattgaatatacatataactatataaataggagcatatatatatttctccttaaacatagccataatactcttatcccacctaaaatttacaatcattccataaattatcaaatacaactcaatgttcaaatttctaattgctttataaatatacatctttaagtttgtttgaaaaacattcaaataggtctattcagtctctttgattgtatgttctgactttatatcccttgctttttccttatcatttgtttcttaagaaatctagttgttttgtagacttctacgtaatctgaactccattatttgcatccctcggggtagttttacatggtcctctgttttctgtgtgtcctgattattgagagttgaagctaaagtgtgtttcaatttaggttctacttcatagattgtgttgtattatatgaaaccatgcacaatatggggatttatcccttttctaatactggtgttaatcaatgtttaattcctagatccatttatttgttaaagtgtgaaaatagtgacattctatattattctttcaccatttcacatatgaaaggaagcttaccctcatccattctttgattacccagtggcacagtttaaaaagaacaacaggatatatgcttgaaatttttgcctttttgcaagactttgaaattataacatctccttcgcctttgccaatagggtcaagatattattttattgttattaagaactcaatatgaattgaacatacattgtgtgtttcaatccattgtaggttttctccatactgatgtaaaatgtaccatcttgtaccagtgaaagcctctacaatttggatcctgagtccttttgacatgaacctaaaagtcttttttatattcttttattcttgccacagcttttgaaacagctatttcttcaagtagtcctggtgtggggcattagaaatgctcatagctacttggttggtcattgtttcttgactttctcagtgagtagagttaagtaatatacattttaatgaaaaaaaataaattataaacttatactaaaacttcttattcaaattcagtactagaaagtttttacttactctcttttctatcactcgtatatctgctttcacccaaactgagaattctcattctcaaaaacactggaggtaacagaatatcatgtcacagctcatttcctttatcttatataacatctatagtaacctcagtataaaagctctatcagtaccatgaacaatctcatcataatcacacttaatatcgtttcatataatcacaatcaaaactggaaacaattaaaacattttagcatatttttatagtgtgtttaggttgtatcatgtatccttggaggggtgtacaaattattgtattttaaagtcaatcagaatagtttattcttgtattataaccataacagttcactaattaaattaaatttaggaattgaattgttaagttaatttggttttatatttatgtttagcatttatgtggttcaaagatcaaatctacaaaataatgtatagtcaaagaatctatcttccttctctgccccttcaaataaatttctcccctcttcccattagtaaccatataaaatttatattttacttgccttttaaaatatgtaacaaagtacatataaatttgctgctactcccttcttagagaagtggtagaaaactatgttatattgacttatcagacattgtttaactgacatggcatttttctgctacaaatgttccagcagttaataatctttgcatatatcattttgcatttttgtcagtatatcagtgggacagattcccaacagagaagtgctagatgaagagtaaagtcatctcaccttggaccccttccctccttgcgctctgcttgatggtaccagcttttttttctgaatgctcttacttccatctgtgggcagattgcctctcttatctagaacactttcagccatatccttattctctttagcagactcactcctgctattttagctctcagattacatgtcctttcctcacagaggccttacttgactaggtgaaaggactgctggcttacttgcataatgcctgtcttctctaccaagattgttagcctcatactattagagacttttctgttttgtttaccatttgattcacttgcacagtgcctggtacatagtttgtgctcataaatatttgttgaattaatatcttgctttatgtctaccttacagtttaatcccatggaatcaatcaaattaaatcatcatgactacattgattccccatcgctgaaggacagaattcattgtgtggcatttgtatttgatgccagctctattcaatacttctcctctcagatgatagtaaagatcaaaagaattcgaagggagttggtaaacgctggtgagtctcattccactttgctaagggtaataccactaagggtaattgactagactgtattttagaatgctttttggacaggataaagaacttaagtcattgcatatttcaatcttccctagcctaccaggatgcttcaatgaaattgagcattcattggctatatgactttgtgcaagtaacttaaactctctgtgcctcaattctctaatcaataaaattagtataataatagtacctcttagagacttttttgttaagaattaaaacaaattaatgcatatgtgaagggtagtacaatctgaactacatgctacccctatatcttcgcatgctttattgaccaatattgggccttgagctttaagaattagaaaatgaagaagaaacatttccgaaaggaaaagaaacaggaaggtaagatgtttgtagggagaggtaaagagtttggagaaggtaaccaggatcagggatttagggtgagccattctggcttttcttgtcatatccactttgagtgagaaagagccagtttatcactgttcttagttttgaagcagagagtgatcaacttacctgcttgctgaaatttaaaactttgcaaagaggagatgtgcagagagatgattgctagtgttgtgaaataagggaagtttacttgtgatgctttgacacattctgtctctttcttgaggattcttctcccccatcttgtttattagagccctttggtctttagtctctgtcaaaacacaacttctggacagaatatgaaatcaatcagtaatattgcagcataaattttagttacctcttccaagaggtggtttcatttgaggcctcatttgttaccattgaaatcaatgaaggtgactccccatgtcagagaaattccagatactaataagtagtccaggggagttttttggggagatgagggtgaccggggtgtgggggatctttccaaatctgaaattgttccataggttgcctattacataattgatagttaaataacttgaaaatactgatgctctctaaaatgatttaaaaaattctgtttggcataggtgtggtacatgtggctttgctcactcatgtggatagcatggatttgattacaaaaggtgaccttatagaaatagagagatgtgagcctgtgaggtccaaggtaatgaatgatgcccttcgtaaacacattttctggggtatgttactacaatcacatactagtgtgtataaaaataaaaacaagcagctactgggtttaagaagaattacaaaattacttaaatagggcccgtttcccaagatttaaaaattaaatacagttgttccttggtatttgcaggggattagttccaggactttgcattgttaccaaaatctgtggatgcttaatggcatagtatttgtatttgcatataacctatgcacatcctttggtatactttaaataatatctagattacttataatacctaacccaaattaaatgctttgtaaatagttgttctactctatttttcattattaatgacaagaaaataacctgtacatgttcagtacagatgaaatattttttcaaaatttatttttttgagatgaagtttctgttgcccaggctggagtgcagtggcatgatttcggctcactgcaacctccgcctcctgggttcaagtgattctcctgcctctgtctctcagcagctgggattacaggcacatgccaccatgcctggctaatcttttctgtatttttgtagagattaggtttcaccatgttggccaggctggtctcaaactcctgacctcaggtgatctgctcatctcggtcccccaaagttctgggattaaggcatgagtccctatacccagccattttttttcaattttttttgagccttagttgaactcacagatgcagaacccatggatacagaaggctaactgtctatctttacactgacatgggtaagttcatttattacaatttaattcaactagattcaattcaataaatgtttattgatattatctttaaggttgagccagtgtgttactctcttatcagctacacagatcatgaaaaaaattcccccgcactaaaaattttacaattttataaatagtggtgaggggatgggagtgtgggataagaaaaagttgacaagagattatgtacgattgagtgtgataaatataatgaaacaatgaaaaataaagtgctttaaaagtttagagaaggaaagtatagtgttaaaggggttcggggagatttcatcaatggaacggcacagggaaacggctttcaaggagaagaaatatttcacaaaatgaagagacaaaaagggccaacaaattcagcataagacaatatattaatggaggaaaagtcagcatgtttgggaaatgtggagttcaggttagtgaagggctggatctttgtaggcagagataaaatgggcaaggaacatttgcatgaagtaattttatttaattaggagcattatgaggaatcacagcaattttttgaaagagtaatgatatgatcaaagttaattaaagttatgatcttcagaaaaattaatctggcactgtgtacagaatagattggaatcaaaaggaacctggaggtgggaacaccagttgggagaatgcaatgatagcaagtatttgttgagcactaagtatgtgatagattttcttaatcagtccttataacaagcctatgaaatgggtactatcattactgcattttacaagtgaggaaacaaagaaaacagagtaaacatctgccaacgtttattgacagtgctgagcagtgacagataaatatttcgaacctaggcagtttgattctagaggtaaaatagtctaaacaagaattaaacgttaaactggtctaataaaatctacttatccagagaatgttttttaaaagaaacaggaaatatatggactgtaggataggtgtcataaaaattttgtttctaaatcatttagaatccactgcatgtattccaaattacaattatcagtgacattagaacttgatatgtgaagttcttcaagagtactttgtgagaccagatctccatttttttccaatgggaaattattgcaagttcctacatcttgatattgctttcataatttatactaacataaaataatatttttcactgttttgcaatgtctttttaatttctgtattgcagctagaggaagtccaaagaaaacttggatttgctctttctgacatctcggtggttagcaattattcctctgagtgggagctggaccctgtaaaggatgttctaattctttctgctctgagacgaatgctatgggctgcagatgacttcttagaggatttgccttttgagcaaataggtagatggtttggtggtgtggaagcttggaagcggtcaggtagttggctactttctgcttggatctattaaatacctggcagctctctgtctttttgtgggttgttgccctgtgattagttctgctttttaacccactccctggatgcatttttccctccttgcatttccctcttttcctggagttcatactagagaatctgcactatgtttttccctttttgtcttgagatgaaagttttaaaataatccacctctgtcatttccactctctgaacatcccaagctgtatccctggcctcttttctcagactatgtttctttacttgggacctagaactggattggattggcattgctcctgatcagatgagacctttgattatttgccccttccttaggaccttacactcctgtctttctttgacttgcctttttgtttctttccttcatcttagtccctcttcatgcagtatggtcattgctaggtagaggtatgtccttttatgtaatggccaccgcatttagtattacataaactttcttttaacaatctgtgcatagtacatgctgctctgttccatttagagatttgacagaggtttcagtttagtatactcaaatcttattttagtgcttgggaaatcaattcagaatatcacatcctctccaattctctcttactcaaattgctgggaaactctcatgttactaactttgttgctctaactctgccatcttggtttccccatcccttctcttcctcatggtacgtgtgctcctaatattagcgttggttgagattttcagtggtccaatattcctcttccctctggttgcctttcctgagataatccactaagaatattttgtgtttcttttctcagggaatctaagggaggaaattatcaactgtgcacaaggaaaaaaatagatatgtgaaaggttcacgtaaatttcctcacatcacagaagattaaaattcagaaaggagaaaacacagaccaaagagaagtatctaagaccaaagggatgtgttttattaatgtctaggatgaagaaatgcatagaacattgtagtacttgtaaataactagaaataacatgatttagtcataattgtgaaaaataataataatttttcttggatttatgttctgtatctgtgaaaaaataaatttcttataaaactcgggtctaa

SEQ ID NO: 464 - DNA, 156176 bp, Homo sapiens
acgcgtgctcatcttgtgtaaaagtaaaagttgctcatgtcattagctcggctctgagtttgcatgagaaaccagcgcagctctcgagccacgggagaaaacacgatctgctgcggagcccagtgacctgaaactgtagcagtgactcgagacctgtcctctcctcgacgtcgccctataaccctcccgctttatttaggatccgcttttccgagagcagccactcaggcaacccccggaaggtttgttaggagtttctccttgaaacgctttccgattccatcttttgaaatccagcaggcgagagtcacgacagactccaggacctcttgagcgctgtccgcagccccacggtaggagtagccctagtgcacgagacttggcggtggctgaaaagctcgcccaaacgcacgcaccacctctctgcggggttgcggattgcgggttgcggtctttgtccgctcgcccttcctccggggccgcacactcccgcatctggccggcaggtggcgcggttggctcacgatgagctgcggccggggctggagaggctcctccacctcccagcggccgcccggccgccgggacccaggctccccaggaaaactcggccctgctctggagggagtcagaggaggggcggcctgggaaggggaagggaggcctcattgctaggaatcagtgcccctgccagcgcctggggaaatgcaccgagtggcgttggggaccggtccctgggacaccggctgcgctgccttcgccggaccgctcttaggtggccgcgtccacggctcgggcatcgggaaaagaccacagcccgatggtgccagtgcccccggggccggagcagccgggcggggctctgcgggtcctcctgctcgccgtcttctcccggggcagggagggctgccccggctaggtcggagcggagagtcgcagcagccgctccgggcagcttcccagtcccggtctgccttgtctgtgcggctgcaagtccccgcacccacacttaagcctttcacttctaccccaccgctcccagacgggctaggcccggttccagggactgcccccaaccctgcccccgggaaatccacaactggttccctgcccaaggccatctcggggcgtcctgggccctgggcgaggtccacggcgtgtgcagggggacggggccagcggggacttccttactgctagaaagtcattcgttcagtctctggagacagtgacggagccctgctgcggactggacgttggggaccaagtaggtccccgctctccaggcatctggggagccagggaagaagcgagtgatagagccacaaaactccccgcaaagagtatttcagagggggaagcgccataaagacaaaacagggcaaggtggcagagggtggcggtggcaggcgcgagtctgcagctcagcccgggcgcgctggacgcagacacgtcgactctcctaaagaagcaaccgcaggtcagcttagacttcttttatttcaataaaagagcgttttcctccatcttaaaccgcccgtggtgggagaaaaggtttccaacctcttctctggctcccctcggtcaattccgagcttttccaaagtccctccgccgtccaggggctcgaccttcgaggtaacgtgggggatcccgctggctccctccggcaggcgggggcggggaccggccgtgctcgccccctagagccccgggagaccgcgcgccccgtggagcccggagggggcggaaccctggggcgggccctgctcggtgaaggcggggctcggccgccctgtctgcgccgccattggccgcgggccccggactggcgggctcacgtcaccggccgggcccgcccccttggcaatgtcttcagcccgctgctctcctaacttaagcatttattccactgggatagaagcggcaggagcagcgttggcaccggcgaaccatggctgggattttctatttcgccctattttcgtgtctcttcgggatttgcgacgctgtcacaggttccagggtataccccgcgaatgaaggtaagagcgggacggcctttctgtggtcggggacagcgaggggccatcgcgggtgaggggtcctcaggagcgcagggccaggtggtgcggggggagcccagtgtgaatggtgcgtcccgattcgggagaagggggctgaggcgaggggatcggcgaaggggcagcggggaaccgccggacagcctgccccgaggcggtgacccgtgcacgcggcgggtctgtccaagtttgtaaccaaaggccaaagtttatcagcatccgccagagaggcccgctcgaggcgccctgaggggatgcacgggagacaacgccgggatttaaaaaaaaaattacaagaaccacgtcctctcctgagccagcccggggcgaggggaaaacgcagcctggagcacagtgaaggcttggtgctcccggattctagcgaaagcctttcgagctctggtttctgcaaagtttcccgagccctgcgcttctcgggaccgggctgcggggcctgctccgcagcgcagcggtcgtggcgccgctcgtcaggcgccagtgacctgatttctagcacccggagtcagacacctttctcctcgccaagcccagcgccccgagggtgcgattgcgggcctgaggggcccgagctcttcgccccgcagacttggggaacccgccggcaagttgaacgcagtcgagttttagcttttcgccccagaattgcacacagtttagagctaacgtgcggggtcgacgggacccgtctgggtgctcagttttctgtgcatccgttcggacgtgctgggaggattgtatgtgcctgtgtgtctgtgtcgggaggtggggcggggcgggggggcggtgatcatttagtttctgagaaacccagggagaggcgaactgtgtgtgtgtgtgtgtgtatgtgtggtgtgtgtgtgcatgtctgcgtgtgtgtgcatgtctgcatgtgtggtgtgtgtgcatgtctgcgtgtgtgtgcatgtctgcgtgtgtgtgcctgtgtgtgtgcgcgcgcgtgcaactgcgtgtatgtaggtgcgcgaatgcctgcgtggaagcggacgcggaggattgtatgtctgtgcgcagatgtcctgagtgtgtgcgcgtgtgttcgagtgtatgctcgtgctctgttccagcgtatgctggtgctctggcctgcgtgcatctagtctcacatccgtctctcattcttctcctttccggcatccatctatctatccgtccgtccatccgtctatctatccatccatgcatccatccatctctccgtgcatccgtccgtccgtccatgcatccatccataatgcatccatccatatatctgtccgtccgtccgtccatccatccctccatccatccacccattcatctatccatccatccacccatccatccatccattcatctttccatctctccagacatccgtccatccatccctgtgtaatctatcgttttctctgttccgaaggagggagccaaaaaccaacttagccttggctgggcagccggtacccggagccctccagacggaggctctgagagatttatacacctgcccacagacatcgcttgggaggaaaggggccctctctcgccctctggatctcccatctccttccgacgtggcttctggtggttctggtgccatctcggccgtcgccgcccctcggtccctagggttattcattcccctgagaggaatcgtggatcccgcgttctcctggccacttcacacacttgttaggacgtcccctgagacctctctcgccccagatgtagagactgttttctttcttttttttaaaccccctctttttttgggggggggggagaaaaacttgggagcccaagacaaaaaggctctgagagccctaggctaatgttgaaggggagggagggaggtctgttcccctcccctcccccacctcccccttaaaaattaattcactttgttgctttctattcccatcacgtttccttttctctcttttaccctccctttctactccctcctttttttgtaaattgggtcttattgtttcctttgtgtccctaatccaccttacataaatccaaatggatgtagcgggcttttctctagggacagagagaagagaatggttgcggtgggggttggcggtggggagaggagaggagggaagggggcgggaactccaggcgggagcgacccagggaaggctctacattttaaaatcattaacagaccccaggaattcagactccccgggaaaagtaggggaaagagactgatttttaactccattgactttgaggtgaaatgagagggaaagtgggcagaatccaggggtctgggggtaagcttgagtgttggggtgcgcatgagcacggatggcggcttcccattcccacccctcccccagcctgaagagccagcctggctgatcaaattaataacccagtggttcctttgaggtgggcctttcgacccccaggactgcagatctcggtgggaaagagaggttttgaattcattgcgtccctttggatgttccccttacctagcgctcttctagcctgagcggggtaccgcagctcggtgggctgtcctcccttccccccaagctttgacgcactcaggtgtagcacaagcacactaaagccgttaggcagcactccatacctaaaattcaagccagtgatttcctacgggtggaagacgagtctctgattgtcccccaacacatcttgagaaagagagaatactttcggtacgtttgcattctgattctgcacgtctggcattccctctttctgaaactttgatatttaaaaaagcagcggataccatattcagggactatttacttggttgtggaagggaaaatgttagggagagccttttcctgaccctttggataggatactctctgatagaagagagaattcacttgtggctctgtcaccctgatgagttatgtggtcatctgaaacttgcaaaaacaaataattctagtagataccagacagagatgaatgcagattttgctctggagtgtaactgctctacatagatgtatttatctttttgaattgtacttcagattctctattcatcctttttagaaaaatgaatcaagtgagtcctaggatggaattttaaatgttaagcaagttgaataaataagaacctgcagatttaaagagggggagaagatcaaatgagtaatgattatttacataagtgagcccaagtttaggttttgatcagtgttggatatgcacagcctcagcacatatggaaacgctcaggcaaatggtttttgtgttattggctttttgcaattggaaattcatctatttttcttttgttttttgcagttaccttattggattccagatctgttcagggagaacttgggtggatagcaagccctctggaaggaggggtaagtcctgagttgctctctgatccaaagggtaaaaaaggagtgattagcaactttctgagagtcctaatggcttgattcttgttgattgtggtgagggggtcagatttccgctgtggcctatgaagtgaattacgctttgttggagaaatcctatactccctttggataactctgtcatggaagaactagaaaccaaaagggcagaaaggggtttcaaaattaggagactggtggaggcacagacttagatgcctatttaaaactaaaataccaacaggaaatatgatccggggaccaaattagaatttatgcctattactgtgatggccatgaagtcctgacaaggttaatttaagagcaattgtcctgcttccagatgaaaaaaaaagaataaataaagatatgagagagaagacatttctaattgtacctgcatgaactgcaggaaggctctgtaccttgctctcactcttaaatcagctgctgttcttttgcacactgagagacagtcatgtgaacttgtgtccaaaaaaccctaagcctgtgtattaatggtgctaaatatgaaaagtttatgtgtctgtaatcttgaagaatctttggggattgagtagtctggattataaggtctgaaaaaagcatcacttcatttattctcaaatttgtaatacttgtcattactgcctccatcttactaggtcaacggccacattctcctactccccctaaataaccagtcagaatgaatcagctttggaaagaaaacagtacaacatgtaactgacttctgccaaactgaaataactctcaaatccttttaaaattaaacaaatcatcctaccttcacaggcttgatagtttatggctgagtccattgattaaaaacaatgggggtgaaagattaggagtttttactaggcaaaaattgtaatgctagaacctggcgtgggctccacaccggtccattgaataaagaatgaaggattttaaattaaagattcatagagtctgctatcaaggacatatttcagaactaagactaagcaagaaaataatcatgaaaatggagaattttaggctgtcttgttgcaaacagattttgtaatccacctgaaataaaacagattgccctgtcttcctattttttctgcctgaacttgactgccattggtttgttctctcctgaaaaattccagtctgcccttaaaaccatctttttaaaggagggaggagtgattggcaggcctctggcagtgtagacaggctgtattcaccactgattgcaggcaattgccctcatcctttgaatgtgaagaaaggtacggctttatcttggtgagagtcagactcattgttaatcctataccctggaaaggtcactgattcaggcgaggctttcccaggctacatgtaccaggggtattgcttggtaggttaaaatgtattagaactgctggtaaaattaaggatggaaagtgtcagtacttgtattaataaattcagtgagccttatttttcttactggctgcttttaagtttgaagagagtatatacatctaatcaaattttgaacctgacttgtttcactaaatatatgtgtgagctatatgacagcaaggactgacacattttagggtacagtccatagtctatctagtttctggaaagcttttattgcaatttaatatgctgcagacatttttttcttcttcttcttcttcttcttcttcttcttcttcttcttcctcttcctcttccccttctccttctccttctccttctccttctccttctccttctccttctccttctccttctccttctccttctccttctccttcttcttcttcttcttcttctccttctccttctccttcttctccttctccttcttctccttcttcttcttctccctcttcttcttctccttcttcttcttctccagagctgctgaaagagcacctggtcactttttctagacacaaaacttatcttggttgacttgaggtctatttaaaactatgcagagctgactgtatacgacccagtacttttaatgggctggatataagcaggtttttttttcttttccttaaatattaggcatgtaacattttaagcattattgtaagataaataattttatttgtatataaaagaattagtcattccaaaatacacagtagccattgagaaattgtgtcaagttataaagtttaattaatttctagattttataattgacgaggactttttcaggattagagcaaaggaatgaattgggtatctgtcaatgaggaatggattgattgtctttaaaaagttctttctagctgagagtaaaagcatattgagtcttgatcattctaaaatctctgcttgcagttaggacatttaatgtctttattcactgttaacttgagatagtaatttggtctgataatgacatttatttcttgttgttatgtttaaaaagaaaaaaaaacaacttgatttgacaataccaccaaggaaaatataaattagaatcagagacaatccattgtttgtctataagaacaactaagcaagacatgagaattagggaaagtgatggctcctgataacatcgttgtagccaaaagctactttcttggtaatattcacttaaaagagtatattgagttgctgacactgactgtgaaatataaaactaagggaggatttgtcactgttccagtgaattgatcagtgtggttagacaattacgttcaggctgcaaagttcatattagacctgaattatcctgcatgaactctgtagagataccctatgtgccttcattgacaaatgtgtttttccaaattcccattgttctgagaagagaagcatgctgagtaggtgtttttgaagatgggaatctatttttggatttacatgaatttcctaaaataagtaaattactggtgattttattgcttactggataaaaagaaattttcatcaccacagggcacttaccccctcctagtttcaacttttataatggtggcagatgaaaaggatacagaattttatggcttatggtccttcacatagtaacatttccatccattaagagtttgccagtgcatagttgggaaacctattaaaagatacattatgattctatgcacttcactggactgcatggagctttacctggagctattacagaatacaattttttaaaaaaactatctcttgttccttctaattatattcatatgtttgttaaatacttaagctgatttataacagatctgtatcaatgcattactgtagatgttaatgaagaatttgaggctgcctaccagcttagtaggagtcccaaaagttttgctgcttttcggattatttttaaaagctataatgacagtgaaacttttagtcacagtggtagacgcaagttgtcctaccattagattctttgtgttaggaagtggaatgcaaagaaaatgctaccatctcctttcattttcttgggccttcagtcataaacagcacttgctattttatttttaatgtccacggaagagttagaagcaaagcatgtctgttttctagttttgttatttgtctatgttttaaaaatgagaacatgtacaaattttttaattgaatacacagtcttgaaaagttgtctactgttataaatgatagcatatttgagaaatccagccataaaatttactccctgtcttcctaggattactgaaaccagaatggtgggattttcttttcacctttaaagagtagtgagggtgccaaaaaaatcaattgccttttttttttttttttttttttttgaggtattagagagcaaagttctgacaggagcactactaattaactgataattgtcttcctttggcaagctctgctcttcctgcccttaatttgcaggtctctgctcagtggttgaaacaatacccatactagtttttcctttatgagtaaatttgaactgttgccacttgaaattgtagctgttgtaataggtgaatttgaggttgttggaccaccacaaggaactgccgagaactcacaagcagtaaatccaccattgcctctggatttcaggcaaaagattgaaacaattaaacaaacaaaaaaaaaacttcctcaataaaatattgtcttatctcccataagatcctttattagtgatgattggtgctcagtagtttgcttcattattgaaagaaaaataatcaggtgtcctatgagaataaaatgggattgacaaatcactgcatgatgaaactttgtagttgatacatctgctttggatctttgcagtgggaggaagtgagtatcatggatgaaaaaaatacaccaatccgaacctaccaagtgtgcaatgtgatggaacccagccagaataactggctacgaactgattggatcacccgagaaggggctcagagggtgtatattgagattaaattcaccttgagggactgcaatagtcttccgggcgtcatggggacttgcaaggagacgtttaacctgtactactatgaatcagacaacgacaaagagcgtttcatcagagagaaccagtttgtcaaaattgacaccattgctgctgatgagagcttcacccaagtggacattggtgacagaatcatgaagctgaacaccgagatccgggatgtagggccattaagcaaaaaggggttttacctggcttttcaggatgtgggggcctgcatcgccctggtatcagtccgtgtgttctataaaaagtgtccactcacagtccgcaatctggcccagtttcctgacaccatcacaggggctgatacgtcttccctggtggaagttcgaggctcctgtgtcaacaactcagaagagaaagatgtgccaaaaatgtactgtggggcagatggtgaatggctggtacccattggcaactgcctatgcaacgctgggcatgaggagcggagcggagaatgccaaggtaagagggtccatattgcagttttttcactggggcttagtgcgagtaattaaatcagagatgagactaaatggagtaaagccagtaattagtagcccctgtgggatgtggtgggacacaggggtctaatgagtaagtgctatagctccaggtggcaaagctaagacgtttctaatactgacaaaataaatgatgctgctgtaatcagcagaaagccaaacacatttgctaacaggcacttatatctgaactggcttgatgcgccctctgaaatgtaaatgaacaagctgaagaaacagccttgattgatccttacttaaagagggcggacacatttttgagccatagttttcctgtctatggacttggtaaaatgacaaagattgttaaatatctcccgtcttctgcataagtgcgtgaatgatctaaatgtgaaattaggattaagttgttccagttccctcccactgactaaaatcgagtgaagaaagtccattttttctttctgccttgtggaccggtggagatatgacccaacaaagtggagggacattgcttcaagtacattctgttccctgaacacccaccgatgggttctctaaatgaaattaatcttgatgaaagacctctttatttctcttaggaggtggtaattaagcaagcaagagtcttcttatttgatctgtggtcagaagcaatagcaaattgtgacccaatttggtattgatttcagttattgagtttttgaagaaatctatgtatttttatcacattaattactacttaccatattactaagtggatttttttttctcacctcaggttcagtgtatgcagttgattcttgcttttttaccccttcctgtcagaatactggggagtgtataaagtcctttgctttacagaaagtttatatctgagtaagagatgagagtaattcctatttatacagattgtttgtcatgtgtgaaataaggctcaaaaatatcttttattccaagtttttgtcttgcttgatacttgtttttataatgtagttatcaacagtctgcggctgccaatccattatggttactacaaaatagttagaatgtaattctggtctcatctatggaacaatcagattaatcttttctctgggtaattgttgagctgtagatggcattgccacatggttcatctgatttggtggttaaagggcctgaattaactgactgccaaacaatttgtctggcatttcaaccattctaatgacagggtgggattaactatggggcaatccacttgattgactgaaaatccagttagaacatgaagaaaattgcattttttggtgatttggtgtcataaagttacacgttactccattcatagtttacacttgtctgaagtggcattcctgcttagctatagttatttctaggagtaactaacagtgaatgttctttcattttgtggtaaatagaaaaaagagtggctatcttttctgttgactcagtgttaaaaattcaaaaaaaaaaaaaggaaatgtgtaaatttaaaagtttacaagttggaatttaaggatttttaaaataaagattaaggcctcgatttttggtttgctcttgacttagcaactactagataagctgtactgaattggtaacccaaagtatattctggtattaatataagaaaatatgtgagtgcattgttactggcaactaaattactatgatcatagcaggaacagtgaaatgagcagggcaatgacatgccatcacattttagagtaaattattctgccttttccgttttgtaagacaggagccgcacatcttcacatgtcaagattcttatatatatttttaaaaaaacaacattggcttccatttcctgctaaaatgttcactctcagcattagcacatcttcgtgtatctaatgtcattgattttcaattgtcacagagcctagtaactcatacattgctacattgtgaaactccttgacatttttacaaccaaaattagaaagaaaagagaaaaagatggtgggcaaagtgaatataaaagcaatcgaacatttttctggtttgctttatggaaatagtcttgggggatccagttaatcacgtgcgtcctcgaaggggaggaatttagggtttcaaatctagtccacttccgagcaagctgttcctaacatgaggccagatatttcacagcagaagcaggtggattgagtcgtttttgagaaacttcagtgttttcaggtgtgtcaaccaagtttgtttttgttttttgtttttgttattttgcttttttttctgctaataaaatgattaactctttcaagacactttttgcacaagaccttgcactttggttgtttgtttctgttattgccatgtaaaaatttctgatgtagttaggtaagaaaaaacttgaatgacaaaggattccaagcttgagtgagactttatttatttatttatttatttatttattttgagatggagtctagctccatcgcccaggctggagtgcagtggcgcgatcttggctcactgcaagctctgcctcccgggttcactccattctcctgcctcagcctcccaagtagctgggactacaggcgcccgccaccacgcctggctaattttttgtatttttagtagagacggggtttcaccgtgttagccaggatggtctccatctcctgacctcgtgatccacccgccttggcctcccaaagtgctgggattacaggcgtgagccaccgcgcccagccagagtgagacttttaaaagatgacttgagactctaaaagtcttaggaataataaaaacagttggccctatccttgatatcatgataggcatcaagagtagcacccaggcacagtggaaataatatagagacgaggaaagatgtatgaatttggtcacttagctagatgaccttgagcatgtttcttaagccctgtgagccttggtttgttcatccataaaatgggatgataatagttatatttagtttacagacttgcaatgaggacttggggttgtaagattggtaaaagtcacctcagagatcatgcaacaacttgatactagcatttctgttgtcattgtgctcttcccaaggtcatagctattgacttttaagagcgttgagttgaaatagtagaaggaaaatccatcccctgaccactccttgatatcaaggctaaagataggaagcatctctctcctttgccctaacaaataataatatacgttttcacactttgtattgaaaatattatatggagtatgtcatttttttttcctcctcgataggaaagagaaacttcctttgaacgagcaaaaagtgacttgtgggtaggacaagaaagagggtgtaaagaaagcttaagaaggaatataaaggaaaactggccaagtcttcagaactctggcagcagtttcctccccaattgtcttttcaatggttctactgtggcaggacaaatagaagaacaggtgaaaggtcacctacttcctcatccatcttccttggggtccgggaggtcagagggaagattgattaagatcttaaatgtttgacaaaggatccttgggcaaaaatgggcagggcgggcgggggcctggggtgtgctgttgtttgactctaaccctgatcatccactgagtcgtcaaaggaccttggggacagaactacacttcctcttgcagttcctacccccagcagtacatgctaatggagaggaaggatgagggcagggggatggtggctttgccctctgaagcagaggcaagttcattctgctcttgaataacattttctgaaatgatttggcttggtctcagtagaacaacaatgtgtatgagctacttacccatcttctcaaggagaatgtatcgcaggagttagcagccctttgaacttgcctagtgattggatgcagaggataatataatgattctagttagtcctgcttccaggccacatcagactgttggaaaaaggaaacaaaatccacttcagacatctccttccggacagacatacccctaatgaagaaatgttccagatgttttacaggactgttttcattactttagaaatagtaagcagaaggaagagaggaaaatattccattaaatttttttttaatttattttttattatttgttttttaacataagagatgaagtctcactctgttgcctaggctggtcttgaactcctggcctcaagtgatcctacctcagcctctcaaagtgctgggattacaggtgtgagccacctcacccagccaaaaagattcgttattagtgtattttttgcttaattaaaaagctgaaaaatgaaaggagagctccagattttctctttgggaaatactaatcagcagttttcagagcatacatataaaaaataataccaataaaaacattcttttggagtcactcttaaggccaaatgattacaactatgacaaaattaagctaggtaagaatcaagccttgctgaagtatacaattttgttgtatattgaggtcatcagtattaaaatgtactcatatcaacaaaaggtatcgtattaaaagctttttaaagaaagaacaagatagaaatgttccaatggttttaaaataaacagacttgtgctctgaaaagaggaagagagctatgtcaaaaaaaatgatttcttttttcaactatactatagaaggagcttaggagaaagaagtaatggaaaggaaatatttaaaatctacttcacagagatgctgcttccatatcctttgcactgttgaaatttttcctctacctttgaatcgtatcattaagaatcaattgcttgaatcacatggctgcttttatctccggctttgaagcatggctgtgatcattgaaaaaatgtaattctttatctataagagagcagcgtttaattattgtcctttttctgatatacttttttttttcctctttgtgtgaccaggctgcctttgtgagtgtgaatcatgcaatagtctctatttggggttcaccaaaacatcgcatagaaatcatctcagggatttttgaatatggtattcaagatttgatgacttattttagtctaactgagcttccttgtatctttcagaaatgaattaacacataattattctgttaagatctgagcctctaggaaaaagccttcttaagtggtttttcagttactgctgtgcaaagcaggggtggtcatgatataagtttgactttcacataactgaactttactagttaatggcggggggtgggggaacgggtaattggtaaatttaacattagcaaaggactgcatgcttgtcagataaatttctcatatagaattacataaagtaaaaattgtaagtctaccattccctgcccacacacacacacacccacatccacccatacatacacacacacagttttcaaaagcttactccaacattttacaagttaccatttttcacaatttggcaggcaactcaaatatagccatatacatgtatttttaaaataatagatggaatcatccttgtaattgtcatcctgtttttatgatgcttgactgtcatagatatcgctgtatattagagaatatagcttttcttaattctccttcattgaagatgaatattctgtagtataagtataccatgctttatttaatgttttcgttattggtagctatctaggttgtctcagtatttcctagtaatacttttaaactaacacattaatgtgtaatcatacatgtatatttttgttaaaacattgaatgattaaccttgctttgctatttttctgcctttatcttggacatatgaatttagtagaacttccttatgagaatgtcagtggggggagcattaggcataaccaaagtagtaacatcgattatttggtggagttatgtttcatggaatcaatatgatatgttaaaatctttgcatgtgactaatgtattaatgaggtccttgttcatgatttctactcaattgggtcctttttaaatcgtgtttatgaatcttctttacatctgaaccttcaaaattctctgcagcacatgaagttaacatacagttagcacaaaatggccaagaactgcctttggagttgagccacttaatcagatgtgcaattgtagacactaacttagcttccctaaactcaagttcacgtttgcaaattggtggcaatagtatcttattatatatgacacacatatatgcatgaatgtataaagggcctggcacagtgcctagaatcattaaaatgcttagaaagtgaaaattgttactcttatttttattgttgttagatagaaatatggtgacaatatgggctgtttgatcaatccaacaaagaaaccatttcatttaggttccagagtagagagttttttgtttggttggttttgatcttctgaggaggcaatggtgacaaatacagggaagagtgaagcgatggtaccaaatggctggtcttgtctacattgatccaatcctctgtgccccaagtcactgtggttctccatgtggtccagctatgttccccaagaccctttcatgtggtctgcaaggtcaaaactttcttaataacactaagatgttatttgccttttttttctaattctctcatgagtgaacagtggagttttccagaagctaactgatgtatgataatgttattaagttgaatacagaagcaaatacagtgatcccctttaactttggacgatatgttccaagaccctcaatagatgctgaaagctcaaatagtaccaaacccttatacattatgttttttctatacatatgtacctatgctaaagtttaagttatagattaagcacagtaagagaatgccaacaacaataataaaatagaacaattataacaatatatcttaataaaaattatgtgaatatagcctctctctatcgttttttctatccctttctcaaaaatatcttactgtactgtaccttcggtaggcaaaaccacagaaagccaaatcatggatatgaggagactactgtaaaagaatctggttgtcctctattaagccagacattcaagaatatgaaaaaaaaaagtagtgactgggcgcagtggctcacgcctgtaatcccagcactttgggaggctgaggcaggtggatcacgaggtcaggagtttaagaccaatatgttgaaaccccagctctactaaaaaaaaaaaaaaaaaaaatacaaaaattagctgggcatggtggtgtgagcctgtagtcccagctactcagtaggctgagccaggagaatcgtttgaacctgggagatggaggttgtattgaaccaagatctcaccactgcactccagcctgggcgatacagcgagactctgtctcaaaaaagaaagaaagaaagtagtaaaacaatgtcacttttctcactaagtttacttttgttttggacaacagtgtttaaaatatgctatttgtgttaacatgcaatgcgttaattgttatttttcaatgaattaaaaataatttaaaaatttatttttcagtttcaatttgtattggtaaatattagtagttataactcacacacacgaaaacattctcaataatttttgagagtataaaatgtttgagagttcggttctgaggccgaaaatgttgagaactactgcacctagtccatcacttttcagtttctttggaaggtaacacagactgcacttctgcaggtcatggagaggctttaaaaatgaaaatgaaatcaagccctaaaaactttttcataatctgggagacttaggtagtttagaagaatgacattttatttactcaaccctttagacatttctataaaattaggcagcaatttatagctcttggctttttaaaaactggttatctgtgtccaataacatggctcagtgctccctttagttttactgtgctcgtgagaaggaatgattaaagaaggcctcagctgtcccctgtaccccgagagactgtatctcacttaaggcataaaagctttctccctgtatcctgttacagctggtacctctgagctgttttggggaggagaacaggtgaggtcacttggttccatgatctggagggtaattaagaatcccatgactaaatgaacattttatgaatattcagggtctatttctttttcctgggaaacacacatgttggtactgcttacaactccctttggagacctcagccttttctgggtgaatgcaggtcgtcagctgtctgcccagccctgcagttccaggcagcagattcttcatttgcatattctgtattcgtcctcatgcaaaacagcacacccatttccccctttcacaaaggcaatgagggcttcctttggaaaccccagccaaaatctccttctgtttatgcagagcccaatgatttagacaccatgcaaattaattcggttttgatttgaatgcttccagagatcaggggtgggaggcagagaggagactatttgcacagggctctttttatgcacctctgcccccagtgtggctggttgtcactctccggcccccctgccccatgcaaaataacccaagtccctgctgctcatttcattttgacctttggaaaaggaacccagccttggtgaatcccttggcttgtctgtttagtgacagcttcagctggaatcttgctgttctttctgaggtgggaggggatggcactattcagattatgctaggaatgttcagatgtgtcccaacaaagggctttaaaaaattgtaaagtaaaagatacaattctttgaaaaagaattgtcagagctcaggaagttctgaaaataggccttaggtcactaatgggctggagtccattcatgccatcagtgagtagatatttaaagtctatgatgtacaaatcaccactgggattttcatctgtgtttcttcatctatgaacgaatacatcaatcttcatacctagaatcacaattaaaatttcatattttcacttatgtccccagataaaattctttaaaatgtgtattgactataattctgtttcttattatatttgtggattcactttttgttgaatattgtcttttgtttctgtctccctcctccccactccccccagtgtctccaaatttacttattttttaaccttacctttattccttctagaatgggaaggcaagcgtactgcatattttacccaacaaacttaactctggttgaaaccagcactatcttctgaaaggccacgatcatatatgcattctataaactagaagaagaggactttgcatgaaatgtttttgaagttcaattagacttgagttcaaactaatttcacagagcagaaaatgggcatagctagacgttgcagtctaattaagtaaaagcaaagtcagttaaaacaacatctaaatgtggaagagctttggttttgctccacatggtctgacaaagtttgatgatgctgttcaaagtccatttgggatggattattaggattaaagagcagcagaatgctctctgtacatggtgtgttccctggtgtcattagcggatgagaaaattcagctgcttatctggctcttgtttctcaggatggatttaaacagacccacacttctcaaaggtgatcttactaacctcttcttaataagttacagatctcaaattgctcaaaatccttaaaataccatttgaagtaagttgattgataattatcatttcccttccgtttacagatattttctgcaccagtacaaagctgtggtacagtttcttaattacccagataatcctgtttgcttgtatttttaaactatgaagtgctgggtaattattcaattcttaatagaaggcaaatggcaatgtaaacaataattaggatgttagacagactaatgcgcttcaaagcaaattggatttttttcatactgttcagcttgaagtcccataaagctaacaatttagaagcaaggcgaaaaaggttccatgttgttcatattttatggcgttatctcttcatggcttgtttctgtgaatagcagtttgccccaatgaagctgcctgtgcccaagccaaatgtttctgtaacaatcgcttccctgctgtttgacatttggctatgttctcccagggctccagattgggcctttgtctgcttcagatctgaggggtcagaggttaacagaatactgatttcctcctataataccatggcaggtaaatatgggccaacctcatgatcagttaagactcagctcagttaggaatgctttttctcttgggcttttgtccttaagaacttccctgatttaagacttcacgtttcccagctattgctttccacagtggattcttcattaggatcgcagctgtctcttttatgtgacttcttcctttaataaccgttcgcaactaactatccccagaaatacctgagctgaaaactacaagcaaattattgcttttgatgaatgaattttacaaactgaatatggtaatactttgcaatctttaggcccttaattatgtcttgtagtcttatccctactgtatgtttcactgatgaaataataaactgataacaaaggcagtaaacaaagatacttttataatgtggcaattccccaacccctcctttttcttgtctagcctcatgatgtgttgccagttagaggtgcaattaaatgaacaatcagttttattttccattttcatcacttatggagaggcccaagtattcatcaatatcaatgttattaatgttttacatcagtttaattatatcagccttaatttttcttccatagactaatgttactaaataggttgcatcttaattggttatgatgcattcacaggctttagacatttaaaatactcgatcaaatttctcgatcaaaattcatcaattaattttaggacatctttctacatattagctatcctgtttgtgtttggccaacctctcttgctttgcactgtgaacttgaggcttggattcatttgttttcagatttaagtgtttaaaaaagacatctccactttgaaaaacagtttccttttgaagtgcccagcctggcaatggctgaagcagccccaggcaaattaacatgttaaaagaatggatcaatacctttctggctcctttaccctcctcgcactcttccaagggagaagagttttgaagaaccctaggaggcccttgacagaggtgccaggaggcttcaagaggactgtcagtagcccaagtggggaacattgacagcttgatctagtgcccagatcgcttctccgctggccatttgaaaatggatgcaagaggaattgacagcttcaggaaagctttagccgttcatgtaattatggagaggattagaagaaaagtgttgggtgacataagagatcaatacaagggcactagttgactgaattcacctttagctgttagggcactccattttgtaatatttagcctgtgcttagagaagaatgtttgataggcttgtttatttttttaggggttgtgtagacctatgcataagaaaaagaagacataagcagcctctggtttttgagcgtggacttgtagataattaacaatgtaatgcttccagtccttagggtgcaaaggtactaattaactaatgggagagattgagatttcattactgtgttctttaaggaggtgccagcaaagaagtgcagttgaaagtaatatatgaatattcaggtttctttttcaaaccctttcttttagaattgcctctctgcttgtatcctagagtttaaaattagcactgatacactaaaccaaggtaagagtgtggttgtttttgtaagaaaaaaaaactcatgttgatggagaagtgaaaacattatctttgcatgaatgaaaagcgtctttaaaagatttggaatcaaccactgaatggtctcaaatgatctgacttttggaagttttcctccataggataaagaatggctagtgtacttaactaaaataagcccaagtacctaatttattctagccttcatacatgattctgggattctcttgtacaacatgttggagctacaactttttcaataattttaaatggttactgaatatgacaagaatcctacactataatttcagcaattgtactaaaactttttaaaaagcattgttagatctttcttctagagaaccataaaatcttttactgaagagaagtaatgttttaccgtatgaaaatcataacttttattgcaactttgaaaactagatacactaaaaagaacccctccccaaaaaggattgttgacttctacaagagatagtgattagaaaacacaacccattgagtttttccaatattttcaattatatcttctagctggttatcactgatctacaggaaagctattgatttttgtatgtttatcttacatccaatcttcttattgaactatcttgtgaatactaataagttttcagttaattctccggagttttctagagagcaaatagtttccattgcaaacaatcatatatgtatttttctcttatttaaaaaattaagcctcttatttcaaacttttatattacaacattggtcagaattttcagaccaataataaataatagggtagattgtgaacatccttatgaccaattttaatggatataacttaactataatatcagatctattttcttaatatcatattaattttaaacacttctcagaggagtgaatgttgaattttgttaaatttacatatttatcttggttatgttgcttttttggtttgttgtattttgtatttatgagatctaatatattagtagattttttctcgtgataaaccataaactctctttgcatttgtagaaaaaaaaaagccttattagatagcagtgaattttgacaaattcttttgaattcagtttgttaattgaaaacagtgattaggagccagaactttggaataccaactgaattttaatctcagctctgccactcactatgtgactatgggctagttagtaaactttagtaatttggctttctcttctataaaatgggaataatgatacctattgcatgggtatacttagtgttaaataagataatatatctaagtctcaacaaggaaatggtgtctattaagtgttcagtaagtgtcacaatttttattgtttattttgaatttctaataaatatccaggtgacattagtctacattctctctctctctctctctctctctctctctctctcccctttcctcatcaggttttggtactataattgatttataaaattaaaatagttttacattaaaaaattagcactgtagaatgttaatgtgcatgagaactatcttttctttgcaaatttgaaagattccaccattaacactggctctggactgtgcactttgaattggggcacttttctctatatttgctagactttaataaaaagtaaaataaccacaacaaagaaactatctctcagaccttgttcagttgcttttcaaatcacatatgtagattttccagcccagcgtagtggataagttctttgatttggtatctttttagcctctgtttcttttacggtgaacagcaaagatgacacattgctctcatccataattacattattgaaatttctcattacttgtgtagtttttgtttgtttgtttgtttgtttgagatggagtctcactctgctgcccaggctggtgctatcttggctcactgcaacctccccatccctggttcaagcaattcccctgcctcagcctcccgagtagctgggattacaggcacatgccaccatgactggctaattttttttagtatttttagtagagatggggtttcaccatgttgaccaggctagtctcgaactcttgacctcaggcaatctgcctgcctgggccccccaaagtgctgggattacaggcgtgagccatgtgagccactgcgcccggctttgggctttgtgtagatcttaaacatgcgaattaaaggtaatgggtttgttaaactcagttagttcataggcatggtagagctactctttaatcaggagccctggctgccaatgagaattctggttgagaaaatacttaatatcccattaggggaagctacttttcactgcagagtgaatgtggatgcagcctctctgagctgtggtgctttactctcctttttattgagagaccaacagccagagagagaggggagagtgaaagtgagagcaagaatgagagagagagaccaagaaataactgtttggagacacatctggtgctccttagatcagcaactttgacacagcaatttgtaaatactttacattggttttgaggattggaaagtttcatttttcacataaccacacaaattctgtgggccacagcaggcaggatgaagaccagaggacaaacattcactggctcagtataaagaagaactgtttagcattttgaactaggcaagagtagagtgtgatgctttttgaggcatattttttggatgtgttcacattggctgcatgaccccagggtacctaacagtgaaagattggaggtcctgtgtttcttaaaaggagcaccactggcattttggacaggatgattcttcattcagtgaaactccatgaagaatggagttttacaggactcccaagtggctgggactaccggagttatagagaatttagtagccctagtagtccctgagcggtaaatcctggtgtcgtcctcagtcattttgacaggccaaaacctgcccttgcattttgaaatgtcctgggatggatgctaatctcaattatgaacttctagactatgaggttactaagattctaagatagaatgttgagtactctgctttgggtatttcatatatccttgggtagacaatctaggtctaagatcttgtaacatagaaaagatggagaagctcttccaacaatcccagctagccatctctctttcttatttttattttccctaaatctaagagtacgtcataatatttcaaaatcaatatcatgtttcctccatgtattagtctgttcttgtattgctataaagaaagacctgagaatgggtgatttattaaaaaaaaaaagtggtttaattgtctcatggttctgcaggctgtacagaaagcatggcctcagcaactgcttggcttctggtgaggcctcaggaagcttttactcatgtcccaaggcaaaggcgaacaggcattcacatggtgagagtgggagtgagagagagaaggacaacgtcccagactctttttttttttttgagacggactctcgctctgtcgccaggctggagtgcagtggtgcgatctgtgatcttggctcactgcaaccttcacctccccagttcaagcgattcccctgcctcagcctcccaagtagctgggactacaggcatgcggcgccacgcctggctaatttgtcccagacccttttaaacaaccagatctgtgtgaactaactgagggagaactcagtcatcaccaagaggatggtgctaacccattcatgaaagatctgcccccatgatccgatcacctcccaccaggccccacctccaacactgggaatcacatttcaacatgagatttggaggggagaaacatccaaactatatcactcaataaacacaaattgaagaagataggaaatatctttgggaagaaattattaacgtttcacaaaagtatctggaatgatgaccatcagccaagtgctctaccagttttaatttatttcatccttaaacagccttgtaagtcaggtactgttattatccccatttttacacatggaaaggccagggcacgaaatgatggatgtgtttggccatgtatactgcttgacaatttgaacccagatagactggctccagcttacacacttgagaactgttagaaagaaactttcccccagtgccttgcattcttatataaggtgagaagagtatttaaaaatgcctgagtgattgacttgttaagagtgccccgtaattattctaacatttttcagatattcacctgccaatgggtggcccttgtgttattttgaacggccttacaaagagcaaaatgcagctgcaaggctggagaccttgtcaaagagtatattactgggcaaattatttttattttgactctgtatcacagcagaaacagatgatcccttttcttttcaacttaagtaattgggaagttacaagcatagacccaacttgagaaaagacagaacatcatctcatcttagcaggaggacagcttaaccaaatgagaagttttggatttctctaatgcttctgtaataaatctagagagatttagaaggaaaatcaatcttaaaatgagaatgaacttttaataatctaaatgttgggtatgtgatttttagctgattcaggtagaatatttgttaaacgtttacagaataaaacaatggcaatgaaccaacctatttggaaagcaatccatttaagtaataagaagaaaagggaaaaaagatggaagaagcaattgctgttggaggtacttgtcacttcctgtagcatccacaagtactttctcaccttcccctgttgtattgctacctgtggcttcagtggaaatgactcacctttcagctcagtagagccagtatatcctgaattatgatagccacaaaaatttgtccccccccttttatttttttagcctcttagctattcagagtcagattttctgtttcttgtaacacaaccctaattaatacaggaggcagcattattttaacaggcagactagctatctatatacaagtatttcacatatgaaacacgatgtttgcccagggtgagtagttgtttttccaaaagatttctttatagtactataaacaatggggacatcttaaatggttctttattgtcttttctcagccttatggcaagatagaacagtttgagtcactgacagaggcagagggaaagcctcttctaagccatagcttagtgaagcaaaaaaatctctctttatagccttggagaatatttaaatgggaaggaccttagaaatcctttagttagttcatgcttctcactttacagatgaggaaactgaggcttaaattaataaaatatataataaatatcagatgggaagaggtggaggggaaaaaaggaaataaaagaaaactgataaaaataaaaaagaaaaaagtatataataaatattaaagactggtgctttaattccggattttttgagtcttactttcttggtagtgttaaaggtagaataagctcagaaaacacatgggcagccgaaggcaaagttgcatctgtgtatctttgaaggaggccttgaggagtgaagtctcatatacccaaacctactcccaacttaagccttcggaattagatcaaacttgttccctcaccacaatcactggggtttcagctgccccctcccccatccccatataggcttgaatgcctggatatatcgtgtctatgccagtacattctgaggtctccatgcctttccctgaactgttgctttgcaagagttcacagtctaaggtgatgggcagacctagaaaaatgattgtaatatgttataactaagttcaggtaaagccctgggggagggagatgctgagtcctgctggggatgaggtataaaggaaggtttttggaaaattaaacaatgttgaacagcagttgactttcaactataaacctttcctaagcatctgctcagacaatggaaaggcaaaaatgcctgacatggcctttaagtgtagaatcttgtggattaagcaagtgcattccaggtcaacagaagagggacacattgtgtgcgggtggtgtgtgtatgtgaatgtgtgtactgccgggagcccaccaatggatacagtggccattggggtttaggggatgagtgacagggaaagctgtaacttctaagttttaggcttgatctattggtgcatggttattccatccttagtttcagaaaatccttgaggaggaggtaatttttaaggggtaggggtttggcatggcaggatagaaggtcagtttaatttatacttgctgaaagtagaatatataaacggctgagagtactgatccaggaaaggagggtggtcaccttttgttttgttttgttttttgttttttttaagatggagtcttgctctgtcgcccaggctggagtgcagtggtgcagtctcggctcactgcaacctccgcctcctgggttcacaccattctcctgcctcagcctcctgagtagctgggactataggtacctgccaccacgcctggctaattttttgtgtttttagtagagacggagtttcaccatgttagccaggaaggtctcgatctcccgacctcgtgatccgcccacctcgacctcgtgatccgcccacctcggtctcccaaagtgctgggattaaaggcgtgagccaccgcgcccggccatacctttttatttgctttgtaattctgaatttgactttgtagaaaagcaagttttgagaggctttatttagattgatacctttgggagacttatcagtcagttcaggctggcataacaaaaaatacaatactacagactgggaggcttaaacaacagcaatttattttctcacagttctggaggctgaaggctcatgatcaagggttcatcagggttggtttttagtgaggcctctttcgtggcttgtagcaggctgccttctcactctgtcctcacgtggtcttttttctttagggtagagtcgagagagcaatctctggggtctcttccttttcttgtaagggtactagccttatcagaataagatctcacctttatgatttcatttaacttttattcactcctcataggctctgtctccaaatatagtcacattgtggggttagggcttcaacatatacattttggaggggggatacaattcattccccccacattcatgtatttcttcttttttcataaaaggttgtgaacaagcctgtagcctgtagcgtggtggcctgtaatggcagcactttgggaggccgatacgcgtggatcacctgaggtcaggagttcgagaccagcctggccaaaatgttgaaaccccatctctactaaaaatacaaaaattagtagggcctggtggtgcatgcctgtaatcccagctacttgggaggctgaggcaggagaattgcttgaatctgggaggtggaggttgcagtgagctgagatagtgccattgcactccagcctgggtgatagagtgagcctccatctcaaaaaaaagtaaataaataaaacatgaaaaaatgaaaggttgtgaatatgtggcagatctataagacttagcctttgtatcaaggtttctgtgttcacacctgtgtgggtttcttgtgataacagtgtagcttggtacgatgatctgaatatttatgcccccttcgaatttatatgttgaaatcttaaccaccaaggtgatggtattaggaagtagggcctttggttggcgtttaggtcatgagagtggagccctcatgaatatgattaatgtccttataaaagggaccccagagagctagctagtcccctttaccatgtcaggatatagcaagaaggcactgtctaggagccagaaatcgagccctcatcagacactgactttgctttgatctcgtactttccagcctccagaaccgtgaaaaataaatttctgttatttataagttacccagtttatgatattttattatagcagcccgaacagatgaagatacatggcatcctaaagcttccacccccgtgaccaggacttttctggatgtgtgaatcttgtagaagtcactttatccttctaagccctgtattccttgtttgtgaaatggagatcatattatatctatcaatcatctatgtgttttagctgattaatatttcactagactttaacataatcagatttattattaattgtactgtggttttattgtgtgcgtagctgctaagtacagcatagaaagcctttcttagtaaggtaactaaatatggcttagagccatgttgaagcgaacttatttatcataaggttatcaggtttagtaaaaaatcgcaaattaattttgtatgtataaaaatgcggaatacaggcaagtataaagataggcaaaatcatctataagcttaccacataatgagagccacacttattttgctttttatgcttccagactttctttgatgtacacatatacaccacaaaatgagttaatgatcatggagcatgatcataaaatcttttcagatcaataaatataacttcataacattatttttaatggctacagagttttctgttgcctgaatgtaccacagtttcttcaactatcctctattgttggacatttaagatgctttcagtttgatgctttcaataatgttgcccttaatatccttggccaaagttttaaaatgtagccttaattattttcaaataattgccaagttgaaaaatatgcattttttagaaaagcttcagtacatactgaaaaaggctcagttttgagacacatgcttcctgagcttgaaacaaacataacgagaaagagcatacatataggatcattatatgttaatttccatgcaatactcattaatgaaatgaactccaaagtggaggtagttttactcattagcacttgcatgtgagaaaacttcttttaaagttttactttctcaaggttttttgccatcaaagcctttcttttcattctaaaaaatcaattaattttaacacttgttttaaacaaatgtaggattctttggctacatctgttggcagctaccctttaacataaagggttatgtattttagtctcctgatgcaaattatcgcctctaactctactgcaagttttccttcccactatttcaggaacatcattgctttcgaaacccaaagcaaaactccctttcaaaaaggcattgttaaagtgagcttgatgaggctgattgtttttatataatggcttggacactgtagtcttacaattttacagaatgcctttagggtttcaccaactggaaaggaaaatgacttcatggatgaagtatggactttaaaatatttccccatacagaaccaggagttcaaatccttgtagagttgcctaattccctttctttatgagttcaatgcattgattgctgtgtaatcaattgtttctgtgaccttgaaattcatcttgttagactcctgagctctatcaccttgaaactgggtcatctaaatgcctgtactagcagtccataaacttgtttcccagctgtaacttatacaccatggactattattaataattatccagttaagttttgcaccttcttcttaaaaaatatttttggcaagttatttttccaattgtttgcacagattgttgaacaatgcttcactctttctttctcaccttttcctagtccttttgcctctcccttctctcctgcctaccctggcctctggtctggaagacattgtcatttagaaacagagtagactttccaaggtcagtgaaaccagggatgtattttcttgaaactaaagcattcattctgctttctgtaactcttctcttcagcaataagagtataaaatcatatttttttgatttttttctatttattttatttatgaaacaaatactgtttattgtagaacatttggaaaatgcagagaaagaaatgctgctgcatgcaaagtaaacctgaaatcacatttggtaacgtctgggtgcctatcccctgtctcattgctgtacttgtaatgtacaaagtataaatgcaatgtacaaaatataaagagtattactctgtttgggtggtggtgctccccttttcctctctactgctggtccagaccaaggaaagtggtttgttggtaacgtcagaatcacctaccttgctgggtaaagcattcatttgctgttttagattgcatttctgttttgcttgggttgagtactgtcatctgtatgcctgtggagttacagcttcccacacactttattggcccacaaactacagctacttctgtccgcctccccggctcaacattccagttccccattaggactggcaccttcggctgtaactctgaaatcctctatgaatgagctcttgccattcccttcccttagggtgctgcaccctgtttctcaatcccacagaatcttgttctgaatcaccaggagcttgaatttggcttactgatctgactctaatatggtaccttcttaggggatcccctcgctgcttcggttctctgccctctgcctagatgtcctgagagcttgatgtcatcccacagcaagacttagttctcagtccaggcaaagtggcatatgcctgtaatcccagcactttgagaggctgagatgtgatgattgcttaaatccaggagttcaaggccaccctaagcaacatagcaagactttgtctctacagcaaataaaaaagtaattagtgatgcgtggtagtgcatacctgtggtcccagctactcaggaggctgaggcgggaggctcacctgaacccaggagtttgaggtggcagtgagctatgattgtgtcactgcactccagcctggaagacagagtaagactctctccccgccataccctcaaaaaaaaaaaaaaaaaaaagacagttttccacaacattttggacactgaattggccctacatcagtttcttttaatgtaatcccccgaattccagcttcttcccatctccctctgttgcctatgtcagtgaggtttcgacaagcctgtacagctctcccgtcaaagataaacagtaaggtctatgtcatggaaagatgagtccttaataaaagggagtccttagtagagggaatccttaataaaagaagcttcagctgttacccctggctggttatccagttgcagggactggaataactcctggtcccttataattctgaggttattgcaattcaacagtgattgcctttcctacttcacaggcaatgaaaagtttcttactatgttcccagtcccgtgcagagcatgacttggtacaggttttgtggtgtattcatctcttgaaaaaggttgtatcagtacagaaagaggggaaaaaatgagttgatcaaaactggcgtatttgatcatttaagttgtattggccaaattatttgttacatagtaatcctgtttccttctgtgagatgttatgacaactgaggacatgctttgattcactggctgcagtgcagactagttgggtgttcatttgttttgttttgcacgtggaaatttaagtaaccacaacagcagcaactggatattgttctttgaatagagagaattcattgaattaaataagaaaactgggctgggcgcggtggctcctgcctgtaatctcagcattttgggaggacgaggcgggcagatcacttgaggtcaggatttcgagaccagcctggccaacatggtgaaattccatctctagtaaaaatacaaaaaatagctgggcatggtggcacacacctgtaattccagctactcaggagtctgtggtgagaggattgcttgaacccaggaggcaaaggttgcagtgagtggagatcgtggtatattgcactccagcctgggcaacagagtgagactccatctcagaaaaaacaaaaagaaaaaagaaaactggcttgtaaagatgcacaagtgccaagtgccaataaatgagtgtaccaacacatctttcttcttctatctgctcccctcctccacacccttccagccttcattgtattgggggattacaagtcttcctaaatctgagtgttgatcctgtgatcactcctactctgaaaccaccattggcttttaaatattagctcttatttctaccactactactcccgtgactactccgcgttactggggccctgtgtcaaagctctaacgtcggtgagaggagtttacgctgtattttaggataggtctccaagctctttcttcaaagctccttcactattctaagaatctagctgctgtgcctttttctacacaatttaccctgccccaaaggccctcctgctggtcacaattttgcacattccacaaggttctacagaagcatcatttttttcttctctctcctaactcccaccagcattttgattgcgttccttcatgtcacttatgctgtgtaatgccatcttatcggacttgttagggcacagagtacagtattactcagtgagtaattgttctgccatttattagctatttgacttcaggcaaattaataatttttctctgtacttggttttctcatatataaaatgcaagtagtaatagttcctacaacatcagcttgtcgtcataagtaaatacgtgaaacacacatgaaccgtggctgggacgcagaaatcctgcaatcaatattagcgcttactcctactcctgctactgctgctactactcctggattgtcatggccctgtgtcaggaccttgaacttggtaaaaggagtgtaggctgggctctagaccccactttccccttcagttggatactctttttcagtgaacaacctgtacaactatatatggcagttctgtaccagaatctatgcacttcccaggctaagtctgtatttatctttgcattcactatagcacctaaaacaatacagtacatagagtcctattcagtcattgcacgccacgtgtgatcattgaaatgaacgaagaaacaaatgtaaaaaggaaaatgtaaaaatgtcaatatggttttatttgtaagcagcccattgatttttgaagcatactcaccgaatacatcatgtattttcagtgagaaagcagtatttgtcacaatactagaaatgtcataaatttaaagagtaattgagtctgaattttctgcaggtttatttactagatcaaagagtgacttcaactttcagtgcttattttatttgccagcataaacttacaggttcagtcaaatgccaagaaaataagttaataatctaaattatgcagattctggcaaattctctttcttttgggggagaaaaaaagagagagctttgagtttttatctcacttcagcaaatccaactgactataatagtaagaataaaactctagcaattaatctaatagctctaggctgctagtcattccagaaaagtgacattacacagaatatactagttactctcattgcatgtcattgatatataattcaattgattttcacattttttacactccaaaatgaaatacaacttttgtcatgtcaccagattggaattcattgacaatacattaacatgccaaaaataatattacacacaagaataatgtagaaataaattacaggtagagcagtatccctaaggagattttcatttgtgtcctataacagaagacttataaccctactcatacatctgtttcatcccactacgttttagactcttcgttcaattcaataaattactcattttgccacacactcagcactctgtcagttttgctgggcagtatacttacacaaaagagtctgtataattctaaagtataaccccccctttttttttagcaaacaaatacagagactttcatgcaaatgaatccttgaaaaagatagtctggataactgtaaggctgccacaacttttgtggaaatgttttggaactgtcttcttcaaaatgtctgggaccttctttttattgataatctcctcctcctccttcttcgtcatcgtcatctttgtctttcttcttccttctttcttcttcttcttttcgatggaatctcactctattgcctaggctagagtgcaatggcaccatcatagctcattgcagcctccaactcttaggttcaaatgatcctccggcctcagcctcctgagtagctagggctacaggtgtgcaccactgcaccttgctaaatttttaattttttgtagagatgagtggtcttattttgtggccctggctagtcctaaactcctggcttcaagcactgttcacctccttggcctcccaaagtacttgcattacagatgtgagccactgtgccaggcctggggccttctttttaaatgtgcttagttctgaacaattttgtcccttaaggtggatttaatttttggaaatcaaataattcactgaccaggctattgataaatgagatcagccatactgggtaatattgggttttactcaagaacaatgagtgattgcaaagtaacagactatttttaggagtgacttttaaattgctttgagtgtactttcaagagaagtatttggagcactgagaacataagtggaagaagaatgtggaagatctccagcatccttggatttagctgtcaattacaatgctacttccatgagagaaggctttgttttttgggccttgcttgttttttgcaggactctcagagcctaaaactgagcctgacacacagttgttattgaaaggaatgaatgaatggattaaatgcaacagttcacaaatgcattcaaagtcccacggcatagagatttctctctctctctttgttttagcctttatggcattaatttaaaataatttatgttaaggtcgctatgtatttacctgatgagaacttggctttgtgctaagcactttattttcagtatttcattgtgtcaccatgacttggtgaaatagtgactgtcattatcctcttttcatagatgaggaaactaaagcccagagaagctaagcagcttgcccaaagtcacacagctaataggtgaggagtctggattcaacctgcaaagtctggccactgaccaagccttcacccttaactacaaatctgggctgcttttcagcacatctttgttgtcctgatttggtcatattctcacattatgtttcaatcattctaaactgggtatataataaccccctttgagagacaagggaattgaccaaagtacattgtttagagggattttctgaagaatgacttcatggatgaagcatggacttattattacctccttatggcctctgtctccaaatgtaatcacattgggggttagggcttaattattgggaattaatgaggatttggggaaacatctttcaagaatgccagggtctagtgcagagcatcgtaaggccggtaatctggagggcagccttcagtgagcaggttcgcattctagtacagggattaaaaaccatttctcatttaaagcccacatttccaaaaggcttataatctttagaggaatacaatacaagagggtgggagactgtttctaatttttattctgaataattatctgatctgatcatggacaagttccttaggctgccacattagtttcctcatctagaaaatagctaactggacaaggtcatccacagggtgcccggtagctcttaagtgtcaaaatgagtgataagataaagtgctcttttgccaaagataagaaggactatctttgttgacagttatctagaaaggcttccaagaataggaacttggtaaactgtagttaaataaagctggtaaaagaggaatgaatatcccttgagccaagaacaggagttagctgccacaccctggggttgaagagactgggtaggtaggtggagctgagttttgaaagatttttgaagagcagaggaagagtttggtctctacccctggctcgttcatcagatatttcttgattgccatctatcttccagccattgagagccattgatcatgtaagattctttccctactggagttgggaaagatatttcatccaaccaaagggaatgtgcccttgatatgaagatttgtaatgtttaccaaaaaatctttgttctaccactttaggcatagaagaagaagataagaaaagcctcacagtaaagttgacttgcaggttatatttaaaggatgattgtctttatttgaacaaaaggagaaaataacaaatccgttgtttgaagaggaaaaaaaacagaaaaaaagaagtgcctttgatttggcataattgatgctttattgctttgtagataggtggtttagggcattggacaaaagacgataatgtttatttagatttgggatttgggactgttctagaaagtcaatatatggttgttacttttagtagctgtaagaatggcataagataacttagtggaaggtaagtgctttctgagcttttctgtctgatgatgaaccctagtggttgcaaaaatgagtttataccttagaatcatttgaggtactgattacaaatgtacacttttaacatcaatcctcaagactttagagtttggagtctgtgatctgaatttttcacaagctcctaggtggttctgattaatttaggttgaggaacagcattttggaagccacaggtaaacttgtgtattgcccacaccactaaggctgactctggatgacacccagttgaaagtgatttccaggttcccttgctaagtaaaagatccaagagagagaatagtgctgcttatttctttttaactggataagattgaaaaggtctgtggatccaatagcgatggagaacgtgcagaagctgcaccccgaattgccgatgaagttaatcccagacagctagaaattagccagtatagcacatatgcttagattggatgctgtgaatatatgctttctggtcaacaaaaaagttaaatcatgtagatgctcaagtgaagagcacctctgtcgactggaaagagttgagttatttaccttttttcccccagaaactgtttcttgaggtggaaaagcaactggaagtacaactacacagaactgaaaggctattgagtttgattatgggcataaaattaaattttcagctaaatgtgacagccctagtagaacaaagaagaaccaatcaaaaagttattgactattgagacttttagacagagctaacaaattgaccatgggttccagggatagtcacagcctggaagttgcttattctctttcttctaaaaggtagggaagttcacacaaccacagccactgtagccaggccagggaagaaggccaatttaggcatttaccagcatgtgcaagatgcagtttttcatctgagggggtgagaccttttctaggtgcctgtgttagaacttggagcacttgcaggtaatgagaacgcattccaatacaagaaaaacctatttagggcagtactggatatggattagccaagaagatccacagatcaaaatagaatccagggcagaaacagagcagagaaatttcccagagccacttatgggtaagtggaacaccaatgatttactaattacaggcatgtttttgcacaaattcattttttagtaaacaagatatgctttatgctacttgcaggccattcttaaatcattcttttgggaatccttataaagacatcagttaaaaatctcatctgttatccttcaagagaagtagttggcatgatttttgaaattgagtccctgcctacctagattcaacagattaaatatgaattatcagtggataattacctagggctgttcttatatgtatattttatttccttaagtgtgaagcacatggagtgtcacgcagatgtgggaaaaggtaactcacaaggatcttttgcccagaactcttctggtagggcgctgctggctcttccagtatgcacccaaggtggcaaagagtctgcctgtcaatggtatccagaagtgacagtggggatagccctggagaaggttgtttggattttcataagggagagattctctctctgatctttataatctgaatcctaccctcacaggctttttttttttttttttttttttttttgacactagtcacaaaattaacagtcaggatgcttttgaaatcagaacaatttccctggaggaggcacagcccccggtaccatcattattatatatgttttgaaactccatagactggaactcgttcagcgtgctgtaatctgtgtgtttagaagctgtattgactttaggagtcacacagatgggtgtagacccatgtttcaacatttttctttcagggacacacctttgaaattctgcttggaacatatcagcttcctcctccctccgagtcatcagccatctcagtgaatagcgcatctgcatcctttattgatacatacgggggcaggggtgagggcagttactgcctctgcctctgttttctcattcaaatattagcaaaggtccacaaacagaaatagagaaaccagattaaagaggacagattgtatttatggtaggctgtaacacattttgatcaacaacaacaaaaaagtttttggagctatggggctgcctgatggtaggatacatactgggtttattataatgcatgtacattgttcaatgtaactttcccatcatttttatgccaaggccatatgtatggctcagatgaaatgtaactggcaatttttcattgttgttgttctttatttacctttctcttttaatcatctccctgttccaactaaacaaatcacccccaaaagccagtgattaaacacaagtgagttcaaagagccaaggcaagtctgcccaagagtggccgactccccctacagaaggccaagtctgccaattgcagtcttcactcagagcctggtagtaaaactgctgagaataaggtggtttcagaggcaaacagtcacctggcccagagggcttctgcaatggagccccctcagaagggctaggctatgtgagaagtggtgggtgttggccgtgtcaaacagctccttccagtaggcatccaggaactgagtggtgtgcaccccttaggaggccaagcctaaggcaccagctacagacaaggtgcccaggtggcagaatgcagcccctggcccggccaaggctgtgtggatctataacagacaattttggcatgactgcattgactttcactctggtcttctgggttctaaaatgttggttccttaagtaggaactaaaagttaatatctgcccttgtgatgactaggaatttggttaattcatgtgcctgcttagcaaattaaaatggccagtaatcagaactagaatgttaaatctcaactgatctgagtttttctcatcttttgatagaataaattgaactatctggctgggcacagtggctcacacctgtcatcccagcagtttgggaggctaaggcagtcagattacctgagttcaggagttttagaccagtctggccattatggtgaaaccccgtctctactaaaaatacaaaaattagccacgcatggcagcacgtgcctataatcccagctactctggaggctgaggcaggagaattgcttgaaccctggaggcagagcttgcagtgagccaagatcatgccactgcactccagcctgggcgacagagtgagaccctgtctcaaaaaaaaaaaaaagaataaattgaaatatctgtgtgacaattgcctggtgtttgaaattccccttttcaaacatcccagcatatttggtttgtctcagtgagctctcctttgaaagagcactggctactcccttggtaaaagaaaggggtcagtgatggggctgcaggtccttgttcctgacacgttttccttgggaaattcagtacaaggtatttcgtctctcattcagtcatccctttgctcagcaaatatttgtctttaaagactctcacgttctctgagaaaaaaatcatggccttcgcacaaaaacaagaagattctatttagatttgaataactaatgtaaacaataaaaataaaatagacatttacatattttatctatatctagatacatagaaattaggccgaatgtatgtgtgagacagatagatgagtataactgttttcatcctatttatattggctttgttcttcaaagaaaaaaaaagctttttagatactacaccaatgaagaaaaaggtatcatctagaatcagccctgagatgaaaaagaagtgtgcttatttatataggaagtagctttgcatacttttcctttctgttattgttcaatcttgaattaaactgtcttttatttttctacttccatttgtgattactatgaaatttctgcctaagggctgccaggaattttgtaaaaattaaacaatacaaaattctttgaaagaggattttgagtcccaggcatgctgactttttaagctcaaaaagtacgcgtggcttttgcaagcagaagcaagtcctaatgctttgaagaatgtaaaatataatcagtatttcagaggcattgaggtggttaatctattaatctatactagggtaataaacctaccagtataaacatctgctaactagaatttggagctctcaccttaccttagagagaaagtttaacctaattctgcagtttcaatactaatcatgggttagatttttttcattgtagatctcacttgtccttgctttcttgagtagtcttagagcgtatttgtttgctgcaattaaagcagccgtagtctgattattttcttaacttgattgtaactgggtacacttggctgatcatgtgactctctaaattagctgttataagttaattcccaagcctttgaggtgtcaactctgtcctcagccacttagagctaatatttgaaggacctccagggtacttggagggggaggtggtggtgcttcaagaatcccatttgcccacagcacagtggaggagtacgatctgggctgtgtaggaggtgctgatttttggactgaaaaagcactgaccccctgcagaccacgatgtcctgctgtgattcttcccttgtttgaggcagggctacagatacaccccatggagccagagaacagaattccatgtgtcccccaaacccaaatcatatacccaaagccctcagccctcagatttaagaattcctagcctagtagctttttcgggtggtttctctgctcccaagaaggatgtccaggaggtccatgggcccccagtccccctacttcttgcagggtgctgccctgtggcagagccacctctaccttcatgcctgctgcagggattcacccatccttaagtcctccagcccgttgctggtttgctccattctagaatttgcttcctactgcgcgcaaatgtttcatgttagagaatggtaactgccatctctataatggttaatgccgaacatgactgcagatgaaagtaacagtgtgatcacatcctttctcttcctgttctgtggcatgagtcagtctctttgccttaatgtttatacagatccttaataacaaataacagctgatggcgacttgctgagacatgtacaataaggaaagaaattacatcgtaaaagatttgggctttgtcccaattttttttttaagagaaaaaaaaaaaagcagggagagagaaccttgttctaataaccagtttgtgcaacaatgttccttttttcaaatctaatgagatctgatccccacaagtattatgatttattacctgcccctactggactgtttgcgttgggtgtttattatttggatattcggttaacataacacttgaaataatttcgctttctgaatctgctcttctctctttttcttgggtggttttgtggtaggtcggacatcctcagatgaaaataactcacaagagagccctttttctgttatcagtgttctgtcttcatgtccaggaaaatagactcgtgggtttcctcaaatgtaggggaaaaacaaaagttgtttgctttgtgtctaaaagttccatggtgtcacacctagaaaccctcggtgttggagactggtgcttcatactccattgtcagcaactttgcagaaagtgttgtactaaagctactacagtgagcaagcttatgcccttcagcgttgtctcaaattttgtttttaagtccaggcgtaaagataacatgtgataatgacctctccatttatttggagtcacagatttgatactggaggatctcaaagcattaggtcaaaataattagctctgtctgtagaataatcaactccctctctgcctggatgcaacagatttgtaaccttgttttaaaagctaggcgtttccattggtacaagtcagcgtgtttaggtgtggagagagttggcagcctgcagggaggggtggctgtttcccagaagtcacaattcctggtggagagaggaagctgtctactcagtttccctcctgtgctttgtgaatggtgaccgccccttctcccagcctctccagccttcctcaaggtggggcaaaatcagccccctgcagcaaagtccctttccttccttcctgtggagacctggaatttttcagtgctttcactactgaacatttctgaaatctttttttttctgatgtcaagcaacagtgtcatgtatgtaaattatagaaaatttagaaagaatagactattgcagtaaaggaaaccatgcacaatcctcttactcatggaaaacatctattactatattgtatgtactcttggagtggtttttaaaatttttctttaaaactttttttggcatatacgtagttttttgttgttgttgttgttgttttgttttgttttaatgatccatgcatttgatgtatttgagacctgtaaatgccactttgatctttatctggttgtgttagagagtatgtcggacagaggataagagcatgcctttagttgtgtgggccatttatttatttgaaatctggaatgtagcctatttggtgatggcacaggagggcatggaacccagaagccaaggctaaaaaatgtatagaagtggcatcagaggatggggaaatggtgtcagggaagcagcacaggacctagaatcagaaaagccagtttctgctcctgctggctgggtaatctccctgaaactcagtttcctaatctgggaaaaaggagaactcctaccttaccagttgtattgatgattcagttaattaaatgaggtactgtttaggaaaatgctttctaaacaagcactgcaagactcagataataatattataatgaaaaagttgttcagacttggctgtggtgattcaaagggaataagattaaggtgagcagttggtggctgggatttatagtcttatgtccatgagcagagaaaacgttgaattggctgctcgaattttgttgttattgctgttgctgatgcatctaatggttaatatacacttcctgtttaaatggttaccgagcctggattattactagggaggcagcgtagcaaggctagtatttgctattttatgctggtcaccctgtcttcttgagtctgtgtattttttactcaatgagtacattctcccacaatgctaatatgtttgctctttcacctaagagacgcttatcagacttttactatggattacaggcctttgtatcaggaatcttgctgcatttacacaagagagaatgagacaggcataactctatgttttaaacaacagataaggtttgtctgctgtgtgcacagagaaggaaggggaggggaaacggcggggttgggggtggttaggtaggggtggggcctgggaaagatgtataaacacttttaacttgtgaaagaatgtctttgtctctgctcatgagcctcagaaattggcgaaatattaaaaggaggggtttgcagggcagcttgtgagctctggagtcagattgccttggactccaccctgctccgacagttccttagccatgtgacagataagttccctcatctctttgttcctcaatttcctcttctgtaaaatggtaataataatacaatgaacctcatcgggctattgtgagataaatataaaccgctgatatcttcagaactgatccaggccaatgttatgttgaatccttaagaaggatttgagaaggtggccctgaggaagcacagacacacgctcttgccccattgtctgtaactgcccagtgtcgggcagaccccggtggacctccccggttgctggggctggggcctccatactcagctgtaaatgaccaggtgacaatgagagtggactctcagtgggcctcaccacaggagcctctgtcatatggggctgaatcattgtcctgtatctggagattgtgaaggtctgtccagggcatcttttgaggaactgtatctatttcagctacctctttagttttctatttctctttttctctccccttcttcttaatattttctgatgagagactcggcaggtgaatatgtgcacgtggacattaatcagaggcacttgtcattctgaagaggcctcaagagccgaacagggttattaataagaatcctctaaaccaagagaacatggagcatgttgaatttatccaatttccacaacgttctagtttattcctatgttgttgtaaggacaaagtagtagattcagattcttttttttcctttagacagagtctcactctgttgcccaggatggagtgcagtggcgcgatctcggctcactgcaagctccgcccgggttcacgccattctcctgccttagcctcctgagtagctgggactacaggtgcctaccaccacgcccggcttaattttttttttgtatttttagtagagacgggggtagattcagattttaatactgctcattttaaacgtgtttgtgtgtcaattttttttttttttttttttttttttttttttttttttttttttgaggccgagtctggctatattgcccaggctggaatgcaatggcgcgatctcgatctcggcccactgcaacctctgcctcccgggttcgagcaattctcctgcctcagcctcccgagtagctgggattataggccctcgccactgcgcctggctaatttttgtatttctagtagagagcgggtttcaccaagttggctaggctggtctggaactcctgacctcaagagacccgcccacctcggcctcccaaagtgctgggattacaggcgtgaaccgctgcacccagccatgaatttttttttttttttttacactagattgtgttgtttcctgagcacacaggagaaaggtggagacctttgagacgtgtatatcaggctcatgaccttcgagggacacatgtatcctgcctgcaaccttcgaggcacacgtgtattgtggctgtgacctggaattacactgccttacttcaaatcctgacactgtcacttattagccaaatttactcaagcaactgcttaactgtatatgccccagtttccgtagcttaaaatggggataatgtgtttccttattcataagtgtcttatatatttagtatgattatgtatataaagtgccggaattacactgccttgcttcaaatcctgacactgtcacttattagccatatttactcaagcaactgcttaactgtatatgccccagtttccttagcttaaaatgggaataatgtgtttccttattcataagagtgtcttatatatttagtatgattatgtatataaagtgctgagccataattcttcaataaatattagttataattatttttgaaatgtgataaacctcaattggactcctgctttggctatgtaaccagttggacctttgctaaacctcaattttttttatctagaaaataaaatgggaaacacagtatctaatagagagttataaaagaattatacattatttctatcactctggagacacagtccctaaaagtacttggtagaccctttcctatcctcccagcttcttttcttggcaacgttttattttttttcagagaatctcagttcttccctgtaagggatataggctccaactttgtttcctggagaggactcaggtagtggtgtattgagtgctggtgccaagtactttgtgggcagtttcttattattattcctcacttaatatcaaccccattttgctgaggaagccacagctgagagttaagagccacatctcgcctgctctctcaagtggcagcaacatcattcaatgtgtttgtctgactgtcgagcctgtgtctaaccactgagtcgttcgtcctccatcagatcaaacctgggaaaggcgtgacagtgagcatcctcactgccggaactaatggcacggaatcaaggacatatctctctctctttccctcatcttttttaaccgaaaggaaatttacggagcatatggtaactcgttttcctccacagctctactatccagaccacgagtcagaaaattaaccttttaacttaatctacatgttgtgcattgagtctcacgcctgttttcatctgcctaaatggggagttccacgcagcgtgatgggtgtcctctctgtgctcacattgccggggacagatgatttgcagctgctctgtcctgaggccattgtgaacactgaggtccctgacaggttggtctagtctgcatcgtcaatttttatcacattcttttatgaaatagaaatttctatcatgggcatgtaatttggtgagcattgcaaatagtaaactctttcaaaaggctataaaattacatatttatagatttataaaaattgcctctttttttctctctccagcactccttccaggtaaataagacaataggatacttttgagaacttaggagttataaaaatataattgttacttggaaaacttcattttaaatctctgaattgggaaacacataccttaagtatgagcatgtccattttaattcatgagcagtagccgtgccgtagccatcacatcaagcttttgggtgctaataagcatcaattgtgtggcaactaatccagctggtgtttagtaatgtaaatggagacgtgagatgtttttatatgttgtatcttcccaggttaagtcaagccgttaaagcatatttgcaccttatgtagatgattaagcatttggtaaattctgaaaggtcactaagtacaatgtacttccttgtcttccccaatttgccttttcatttgacataggctttgttaggaaattacagccgcttttcccaggtgacattcatccccatgtaacactgattgtaagtctaactaggtgggttctaatgacttctactaagatgtaacatggaccaaccactgcctacatcctcattctcattctcatttcagcaaaaagtcctgaaaagataggcaaacactggaggaaccatagagacgtgtcatttaccactttccctcttgactgtatataggtgattatgctttctcaagtttcacttgttctttcttttaccccgaagcctagcattaaagggtgctcaggcagtacctgatgggttggatactggtgctaagaagtggagttagcatccggcaggagaggaggcagcacacggacgtggctggacatctttgctctggagttttctcttggcatctgacttctgctccgctacttcatgaactttgcattgccctctgcaagtccagcatgatttgggtgcctcagttttctccattggaatatatgtcatttttttcctctccttcagaacgtttctcaccacaaggcattttatatatatatttgttttgctttgtttgtttctttccactcccctctttttccatcaatttaacaaaaggggtttgaatttatcccagcacctaggacataccaggtgctcaaaaaatattctactgagggccgggcacggtggctcatgcctgtaatcccagcactttgggaggctgtcatttgagttcaggagtttgagaccagcctgaccaacatgatgaaaccttgtctctcttaaaaatgcaaaaaatattagccaggcatggtggcacacgtctgtaatctcagctacccagaaggctgaagcaggagaatttctggaacctcagagatggaggttgcagtgagccgggatcacaccactgcactccagcctgggtgacagagggaggctctgtctcaaaaaaagttactaaaaaatattctggccaggcacggtggctcatgcttgtaatctcaacaatttgggaggccgacatgggcagatcacctgaggttgggagttcaagaccagcctgaccaacatggagaaaccccatctctactaaaaatacaaaattagctgggcgtggtggcacatgcttgtaatcccagctactcgggaggctgaggcaggagaattgcttgaacttgggaggcggaggttgtggtgagccgagatcgtgccattgcactccagcctgggcaacaagagggaaactgcgtctcaaaaaaaaaaaattattgactaaatatattagttagccaattaaaaatagcccctacttcttagcgttgttgggggtatcaaaggaattaatgaaagtgcacatagagagccccagtaactacttgctattcttattacccaactgatcgccagtgttctcttttgtaagtgaggaaggtatattggaagtactggggttttcaaatgctgcataaggacagacagtttaaaaaaatcttttggctgggcgtggtggctcacacctgtaatcccagcactttgggaggccgacgcaggcggatcacctgaggtcaggaattcgagaccaattcgagaccagcctggcgaacatggtgaaaccccgtcaaaaattaggtggatggtggcacgcacctgtaatcccagctactcatgaggctgaggcaaaagaatcacttgaacctgggaggcagaggttgggttgcagtgagccgagattgcaccactgcactccagcctgggcaactgagggagactccgtctcaaaaaaataataataataataataataataataataataataataggattttatttttattgttgcctttgatttatggcaagttgcttttgacatatcaagaacataattgaactctcagaaggtaaaactcataaaaatgaagcataagtaaatgaagtgtgggaaaccttgtttgaaacacattttggggtgagagtgggaatttattaggtaagccagttcggtttcagagacaccagtttcacttagtgttcaaatccctgtaataatgagtggtgtcgtgtcaagaatctgttaccgtatatcatttataggttggtcattgaacaggtgtttttagctaagttttgattaattgtgcctttatgcactggaccaatcctacagcttaacttcgtctttgtcacttccctgtgcagttctcaaagaattcaaacgtgtgatattgacaatccaagactctttttccaagcctcattttccttgataccctatctgatggctggaaattctgctttctcttgggtttcttcatgcaccttccccgttcttcaacgatgaatgtagcattatctgtaacactgggcctcaaatttatctggtgcctcacatgtatgggcataactggcaatgtctatatcaagggaaaatggtgagaattaaatgagaatgcatatttgaagtgcctggcctagtcccaggcagtgctcagtaaatgctagttcccttttgctctgtatttccggcctattttgggttttttgtttatttgtttttttgtttgtttgtttttaatttattgagatggagtcttgctctgtcacccaggctggaatgcagtggcacaatcttggctcactgcaacgtctgccacctgggttcaagcgattctcatgcctcagcctcccgagtagctgggactacaggcgtgtgccatcatgcccacctaatttttttctatttttggtagagactgggctttgccatgttggccaggctggtctcaaactcttgatcttaggtgatctgcctgcctcagcctcccaaaacgctgagattataggtgtgagtcattgctcctggctttgtttgtttgttttgtttttttaattccatattctccaattacctctgacatatggtatttacaaggttcttccttaaactttttctgaatctacagttcatgaactcctgtgacacttacgcttttggcagatattttccaaatctctgcctctagtagtgctgacctccagacctgtctctccaattgcttcctgaacatctcaactcaaacatatcatgacccactagctgacctcatgcccttccttttgaaactgacatgtcttcctgtcttccctattttggctatagcatctctactgtctctggcatttggtctgggaaacttaagtccagtttcaattctactttttaaaatatcctgtaacatctaaatggaaatgagatcctcccgttgcactggtcttagatagagctttcttcctttccttactcaagggcaggtttggaatgaagttggattctagaagttaggccaagcaataattagttcattgacattcacaacagtaggtaatagagtccgagggttgagaatagggaagaattcttacaagaattatccttgggttaacactatatggtccaagccttgttgtgtatgaaataatcagaatttcataatttctgtttcttcaaaaagtagttttaaatgttgttttctaaaaagcgtcaaagggggcgcaatataacaaaacataagttatagccaatttcaaatgcatgcagatcctaccatggttaacaaaatgcaaatatattttaaagacttattgaatgtgtagtagccttttgtcattctatactttttctaaaaattcatgctaaaagtgcaactggcagaggagtttcatgaaactcttacgatgttaccttatgaaatatgaatttcaagaatgattgatgattttcatttgttcagcgtcaccagctcatagaaaacaaaatcagagattacatgaattttcaaaaataggatgtgggggaagagaaagtaaaattgaaagtctctaaacacttggctactcagtttaaaacttctgcttcctaaagatacatctattatatttaagataagataataggcactgtctgtgtttctctctctctctctctcccccctcttgctctctctctctctctctgtgtgtgtgtgtgtgtgtgtgtgtgtgtgtgtgtgtggttagaggaaataagtcttacactctgggtctaccagttgcctactggataataaagtaaataaatatatgttcaaagacacatatatgtgtttgtatacagaagtgctgtgtatacagaaaacatttgaattctgattccccagtgtagcaatgcttgatagaaaaggtactggctgattttaggctgtgaagagaagataaaatttcattatttgtaggtgatgggaagtgtttaaagaacaatccaagtgagaacaactggtactctgtctggtttgattgaagtgcaggatgtttgagggacaaattggggctggctatgagaggctttgagcttctctgttcttctggttgaatcctgtggtatatacagtggggatcattgagagattttcaatacaggaatgacatgatcagcatgaacatcatactttttaaaaattacacaaaatgggtgtttaaaagttaattttaaattttgataatggtcagtaaacgaaatgggagaggaagcaaaagagaaaagaagagacaccgagaaactacagaggaaataaagaggtctcagtccagagggagagaaagggcgaggctaggactctaggttgcattggaggtaaactgcttttgtttatttgggctgtgagtatagaatgcttctttgccttgcatttgaaaggctgatttggttattctaccactatgtacaggcctttttaatgttctttgtttctaaaccctgagtagctcccttgctaggggatagtaacttgtagggctgactttgagtggcagaggcagaaacattaatatcatccatgagcagagtctcccaggtagcatgtccttacattaggttggttgttgcaaaggtaattgcggtttttgccattgaaagtaatggcaaagatcgcaatgacttttgtaccaacctaataactggagcagaggaaaagaagttctgttggattcgtctgaagagctgaaggaaaggaactgggttttctcactgttaattgcccctttctcatctcaacctggctcctttcctcagattcttgctttggaatcaccatctgttttccactccacagagctttgggaggaatgtcagctctgttgtctccgacttaaggtccaaatgccccttttcagaaactgtccatcatttaaagttcgacgagaaaacttggacttgctttgtggccataagaccctatattttcagatttcctatagacgatgttttgttatatcctgctttaaaaaaaaagtgtttaaaactacatttatagccaccctagctgttgcactgcactgttttttggttaaaacatgcacctgctttgttagtaaaggaacctttgccaagtgaattgtatgtgggagggtgtgactaactctgcaaagggacttatctcttatcctatctgcctgagctcccaaggctgcctttgataagatttatttcttcttgcaccagccccacccctccaacctttactgctatctttcctctgaaaattattcatatctaaatattttaacttttcaaaactactctgctctctggtttcatattttgttgagtgatctaacccttcctctgggagacaagtgctcccaagcaagagagcattacaattctgcctcccctgctcctcccaccttttaagtattatcagcagacctgcttgcttacccgtgttaggattgtgctgtttcctttttggcaagcttcagccaagcccataatgttgcaaggctgtttgaagggaaatgtaagtcacaatggcaagaaacatagaaacagaaaacataggaacagaaaaagaaaagtaaatctgaaatgatcttcgtacagcttggttcacagcaaggagtggtctgagttgctttctgtgtctagacatttagatgctaaaggcaactgtgtcatcattcattcattcattcgtatacttagtctacatatttgtggtgagtagccatcgttacaggttacaggttaccaaatgttagagatgtaatagtaaacaggatgggcgtatttgcagctgctatggatctgagagtgtgttctgcaaagggtgatagacatgaaacctcaaaacacacagttcatgactggattacagttgtgcagcaggagcgggtaaagagcggggtctagggaagagagatttcctaacctagactacaggcatcaggagaggattcttgtttcttacaagctggaggtgaggaccattttgcattggaggataaggactgagctcttaaccacagaagccatggagtggggagggggaagcatgaacagtttcagatctgaataaatccactcaatttctcagttttcctgaaaaccagctacctattttctgcctcccaattagatgaaattctgttctgggaggaaacaggaaagtaaagacctcagttgtaaaacaacactgcgctgcccacaccagcagctacctaatgtcaacctgaaacctcataactcacttacttcaatggctgttgacaaactcttgtcagctgcacccttagttccggtttgaatcacgctcaggaagctggcccctcggctggcttcctcaagttagtgggtgctgtcatgcagctgctatcaaggtgtggcccacttgcaagtggtcaggacccagggcctggtggccaagcctcatcaaagctgttgtgatagcacatgcgggtggcattcttgagctgggaagtggtgtcccagtctgcttaagtagatgcagacatgactcatttggaaggatacagccaaggggaaaatcaaaatttgctttgtatgtcacttgtttggaatcttaagtccacttaaaaaaaaaaaatgccctgcaactgtgaggaagagcagagttagtcctttatgtcacttacttggaactctcgactcccggctcgccctcctccaccctggtccaggtggccatgccctctctgctggatctcaagggcctccttacaggtcccctgcttctaatcatacttcctgtcatccacgttctaccagcagccaaatgaatcttttgacaatttgtatcaaatcatattgccagactgagaataaaaactaaactcctcactgagttaagggcctgtgggctcaggatgaccactctgatctcaatcttggcatgcctcttgcaacatttcctagcatcagtaatcttctgtctgtctaatacatgcctactgtaggccttctgcaactttctcttcttcctggcatgctttcccatgtaatgttcacaattgctggccctttattaattgagatcccctatgaaccaccttcccagccccatcctcagtctctcatattaccaggtttattctcctgtacagttctatccctgccagtagaatatgtgctctgtggaaacacaggccgtgccagtcatcccttccctatgtcaggcacacgtaggagcgctcagcaatacatgtggatgaatgaaccttcacaccatagagcaaagacatttgtttccctcttttttctgatctgatttttaataagtgacaaaaagagcacaggagtgcttgggaatctctgctaagacaggtaagagaaatttcaataaacagtttggaggggtggatttatttggggaaaaaaaaggaccttgctcacagtcctagggctgagaaagtgttggagctcagttcctgagctccataaatgagtctgcaccagtcctggaaggaaagataaacgtgctggactaatgtgctcaatggcatttgaactgaattgtaagtgactttggggtttatcagagcatcctaggttatttgagaatcactgaatctaggtcgggcatggtggctcacccctgtgatcccagcactttgggccgaggcgggccgatcacctgaggtcaggagttcaagaccagcctgaccaacatggtaaaaccccatttctactaaaaatacaaatattaaccaggggtcgcggcggacgcctctaatcccagctacttgggaggcagaggcaagagaatcacttgaacctgagaggcggaggttgcagtgagccgagatcgtgcctctgcactccagcctacaggacagagcaagactgcgtctcaaaaaaaaaaaaaaaaaaaatcattgaatctatcagatcatgggaaccgtatagacttggaatttttgaggattaaaaagagatattttaaattatttagtctggtactcttagaggaaactgacccctagaaaccttaaattgttaaatgttaggaatggaatccaggtccccttttcacagagcctggcctcttctcagtcattgtatttcagccattcacttcctccacttctacatagcagggaacggattcctggttgtgtttttgacaggagaaatgtaaccttaacacagccttgaggaaaacatgaaggtgatcatccatctgccaaaatttttaatgctatgttttgtttttctttcttttcctgggggaaggatttatgacttcatctttttttttttttttcccttcaaatctgagcctctttagaaatgatcctgcctcaaggctagggggaaaaaatcctattttaaaaaataaaatgtagatcttcttatggtctgctttccagacacaaaagagatctatgtcttttattattattatttttgagacagggtcttgctccgttgcccaggctgagtgcagtggcacaatcacggctcactgaggccttgacctcctgggctcaaaggatcctcccacctcagcctccccagtagctgggactacaggtgcatgccactatgcccagctaatttttaaaaacttctcgtagagacagagtctcactatgttgcccaggctggtctcaaactgctggatgtaagcagtgttcctgtcttagcctcccaaagtgctgggattacaggcatggtaagccacccaccgtgtgtgatgtggccaggatctaattttgattgttgattaagagtactttttaagtaattttcaactgttttgtgatatatgaaaaagaagactaattaataatgagatatcaaataatgtttcttaaattgaggtagcttggctggccgtggtggctcatgcctgtaattccagctctttgggaggtcgaggtgggaagatcacctgaggttgggagttcgagaccagcctgaccaacatggagaaaccccgtctctactaaaaatacaaaattagccatgcatggtggcgcatgcctgtagtcccagctacttgggaggctgagggaggagaatcgcttgaacccaggaggcagaggttgcagtgagccaagatcgtgccattgtactccagcctggccaacaagagcaaaacttcgtctcaaacaaacaaacaaaaattgaggtagcatcttgtaaatagaatcctagaaaaggttttcaacttcccatgccttttatagtcatttttgaatgttggtctagagatctgcttgggatgagtaagatttttttgtacatctgagataaatttaggttgttagtgacatgctgttcttttgtatttgataataagcctgatctgtttctcttgctttctttaaatgggtcagttctggcttccagctcatccatgttttacaaagaacagttgttccactttttcttctctcatgaccaaacactttgggagcatgtcaacatcatggtcttgtttttattatgattaatatcaatttttcacccatcgtttgtgtttaatatttgggatgagaaacggacaaacaaatgagcagattctgacttggtatttctcctgcatgccatttgtgatttataatttatacatggaaggatttactgacctacctgatagtccctcccaacaaagataaacacacttacacgtcatcagggtaagtaagatgcacttgaaagggacaaataattcacctgcaagcacttttggcttcatgccttttcccatgaatttgaactgttgacagagaatgctcaggctgccaaaacacttcccacagaacctcccaaaatccccgaggttgggaccagctccacttgccatgctgtgagaaggactaaacactaaccttttgtgccctacaagagtgcatcacacgaaagcaagaaaatggtccacttcctttgggattcaggtctggggatgtgctgctctcctctgttcccttttgtggatgtggtcctatgaaaggctcacctgtaaggctggacaaactgccaagtcgtccttgtcaaactgggtgcagaggaccttccactgtcacactgtgtatttcggctgccgattcaaaccgatttcttgggacaatgacccatcaagctgaagagttcaaaatgcattaagtagattttcaaaccccctccccccggcttacaggagtataactgagtccgtgggaaagggtgggttgttgccagcacccttttgtacttttaagaggaagatcatcgtctgttatcccaagcttttggggctctcatctttgctaccatccctgggacttctctgtactgtaccaaaaacagacagtgcaaattctccataaatttcacttagtctagactaggtctcttcagggagctccttgagaatttttattttgtgctcctcagacataagcaatgttgaaagagtcaaacacatatgatattaaatgctggcagaaagttgtgtaaaatcattagtccactacatgcaataccaaaaatagatgtttaacctgatcgtatctgttaaatataaaacactttttaaaaatcttgtgtgctcaaaaactttcagaaaatttttaatatatacactcattttttttaaaggtgacccatcagaggagccaggattaaaaacctcagcagagaatcgtaatacgttgctaataactgtagcattggggaattcagtcttttaaaggttctgcttcttgtgtgtgtgattctcaggccccatcaacataacaaaaaagaagaggtgcactgagcacttattactgcagtcatttcagctgcataaatcatgattcctgacaactcaggctgtaaagtcgtttggatgacaatgactagcaatgctgctgccggagttaatcaaataattatttaacatgtgtttctcttggtctggccctggcttcagaacatatttcattcgttcccaggcctctgtagtgcctttacttttaaataaatggaggagctgagcaagtgtaagatatgcataaagttaatgacagaatcacttatgtctcctattggactgtgctctccctcaaaagaggattcttgtctaaattagtttgggtgatacccacagtacccacctcagtgttttgttccaggctagcagtcactattattttagcttcttctgggtgaagccagcttcctggttaaactctttttctccaggtgatactcagggggcaccttttctttcgggtggtttttctattccattacctctgcaagcagacagcctgggttaggtgcatgggtgaggtccccaggaaagtctcaaagcacctctgccagagatcactccttaaaatgtgagaggaagcagtggtctgcttccttcctgaagggaacagcctcatattcccagccttttagctcttagtatgtgctcaataaatagttgctctcattattgccattactgttattatgtaaaggcttaataaatgtttgctaaaacataaatggcccaatgaatgaataaatgcacatacctaataagggatgaaatttctacataatgacgctaatctgcatagacccgtgtattaaattcagacgggctagtgtgaggagaggaagaagaaaagaacagctgcttcctttattcagtgccctgacctgttatctgtaatcaggggatgtataatgagccactcatctttatgtaccccaaatatcaaagggtgaagaaaacaatagcaactcatcaaaaagcttgatcctctgtgaaatgtcctgggcaatcaagttaggtgttagtgtctcctgatttgcatttcatggctgcgatgtgctagcggtggtgaggattgatagtttatatggcagcacttatttaaatctttcaaaagtattttcagatattttcagtaattttaattcaaattaatggcaggggttttcttacaaaatatgattacttactttctacatttagttcatctaaaatatacgcttttcttgattttttcttacatggtggtcattttaatttttagcatccatttgtttctattcctaatataaacttcagcatattaggcaaacaagtttacttggcttttgtgacttaaaaatattattatagagtcattcaattaagttctgcttaatctacttgaatttatatctccaatagaattaatttattgaaaatcaaattaatatttctttaatctcaaaatttactaaagtcataatcatttttatttcaggcatgaggggaaaaaaaggaaaataccctaaaaatttgtagagccctaggtattagtttgtttccttcagctgttttataaggcaatattgaaaaccatattttgtttttcagatagcaaattttcagtgctctaatggaagaattagaacaaaggttagaataagaataagggatctttaaggaaataacatgttttttaaaaaaggaattattgtgattataggttgctgtactgccttctatttttaaattgtcatctcttatcaaattgaaataacatatttgtttgtttctaacaatgctctattgtgattaatcaaaaattcctattagcaacttcagccaaattaaatttaaaggagcttaattgagcaatgaatgatatgtgaattggcagcccccagaatcacagcagattcagacagactcccgcagacatgtggtggaagaagatttatagacaaaaaagggaagtgacatacagaaatcggaagtgaggtacagaaatcggaagtgaggtacagaaatcggaagtgaggtacagaaacagctggattggttacaggttggtgtttgccttatttgaacacagtttgaacagttagcagtgtatgagaggttgaagcatggctgccgggattggccaagactcagccattgttataggtgcatactcctaaattagattgtcaattttgtctacctactaagttaggttacagttctcccacaaggactcaaatatagaagtacagagtcgttctgaggccgtttttagttcactttaacagggaaaactgcaatgatcaaactaagtaaaagtttctaagagtatttttatcaaacctggcagcaacatctacactttaaaacagaatgcattatgtttttttccaaaaatacagaagcctatcacttgtcttaccagttacttccatggaaatttggtggcctcattgcttttgtatggagccctgatgagagagaaccccaggattatcaactagagattggagctagcaatctttattcccattccctttatacatatatgaagcagagctgtttttaagtagagtttatgacagtggaagttactcttcagagaagtaaattagagagtttagttgaatgtgtttagtttacttactttggaacttttactgtttaagcttactccttccaaactcaccaaagagaaatagctcctcaaataatcagatgatctgttctaaaggcaagaagggaaaataataagtcatctcccccactgcattctttttgtttgtgtttaatattttttatagagttaatttagatttagcaggctttatgtaaagtttcttctggaagatttagtgaatcttttgtgaaaaccatcttcatctgacattttagaattactcacctatttatgggattatactgcattctgttcttgaaagagcaaatccattttcagcatagtttttttctgtcactttttttcgttgtctgtttttctgaaaactacctccaaggtaagaggggaaaaatgggaggagatggaacgtagaaaataggatagaactgtgtcttgccagaggagatgatctgaattagaaactattggttgaaggaagaaacctccaaagccaatacaataatttatttaactttaggaatggtgtttaaattgtctaaataaaaataaatttttacatacttccaatcttgtctatagttactaaactgcagatgctatgagttagacttcaatcttgggttttctaccccatgttaataacagaagaaataaaaacaataatgaagaagttatcccatagtgttttagaaattatatccaatcttattttaaaacaaaacaaaaaacttgaagttttatgaaaatccattggtcatttccatcttcccctcttgcagccatgcactgtgctataggaataatgagttactcttagtgagtagcttatacacagaacacactgtcttttatcctcctgtgtattatctcatttcatcatcatttcagccctacagatgaaaaaattgaagttcagagtagttacatagtttgttcaagttcacacatctaataaggggcagagctaaaaaccaagttcaggcctttcccgttatgtctcccactgcccttgctatcaattattctgcagggcaaaaagagaccaccagacagtgaatatgaatgtcagacagaaaatcacctttgatttgtttgtagtttattttttgcttttgtcattctttacttacattcttgctgttgttgtctgtgaaacatctctgtcctaaatattttaacctttctaaatggatgtctggtatattcctttatacacttgattaaggtaaccaaaattaaatatttcaattttatttcaacatttacatatctactatctcccctacagccattttaaaataatattctaaagcaaccaaagaccaggattaggtcagagccaagcaactcagtacatcttttctgaattctcagaggtttactagagaaagtagaactttgtatgaatgaaataaacttgaatttctggtgatgcaatcatgttttggagtttagtctcctcagagtgcacaaaaaaatctcgaaataactaagtttaagtttttagtaattgttgttgttgtggttttttgaggcagagttttgctcttgttgcccaggctggagtgcaatggcacgatctcggctcactgcaacctccgcctcccgggttcaagtgattctcctacctcagcctcctgaatagctgggattacaggcaggggccaccacgcctggctaattttgtatttttagtaaagacaggttttctccatgttggtcaggctggtctcaaactcctgacctaaggtaatcagtccacctaggcctcccaaagtggtgggattacaggtgtgagccactgggcccagccttaattctttagtaatttttaacaacaatcaggttgtactattctgattttactatccagaaaacagaagagtatcaaataaacaaatacttgaaataaaataagtaagaattaactgtgttatttaatacttgtgaaacagtatcaaaaaacaacaatgatcagttcacaatattgatgtgagaggataactacttacttgagacagtattagtttggtaagtttcctttgaatttcatggtgtaatttttagcataacagagttctgtgtgagagcttcatctcttttcctttctctttggcagctacccatttctataaggatatttcactccaggctctgtcccataatttggggggcaatacagggcacattcatactggtttgagaaataatttaaattttatatttcaaacatgtcagatttcttttctttcttactctttttttttttttttcctgttttgagacagagtctcactctgttgcccaggctggagtgcagtggcatgatcttggctccctgcaacctcagtctcccgggttcaagtgattctcctgcctcagcctccagaatagctggaactacaggcatgcacaatgcctcctggctaatttttgtatttttcagcagagacagggttcaccatgttggagaggctggtctcaagcttctgacctcaggtgatcagtctgccttgacctcccaaagtgctgggattacaggcgtgagccaccacgcccggcctcaaacatgtcagatttctggcatgccctctccccactccaaaatgaattccaaaaccaattattcttctcctgataatgatttgtccctttagcatccgggtattagagaaaggatgaggtggtttgaacctatttaagatgaactgcattgttaagagtttacttagacacgggtctatttacagttaagcagtggttctcaaaacatgtccctggaccagcaatgttgtcatcgggtccagggacacattttgcctgggagtatataagaaatgcaaattctcaggactcaccagaccatcataaactaggagtgaggaccagcaattggtcttttaacaagtcctttgttaaggtcattctgatacatgctagactctgagaagaaagattagaaactactgatcttccaagattagaagcttctgagatgagaagtttggtattcttgctgaatttggattcaggtaatctccagtttaaaaacttttttttagttagctaatgtccagactagagcttaggccgcacctgagagacctgttacatctttcaaagctcttgaacactttctgttgtctctgtctttatctcagtcttgggattgagagtaaacccttttcacaggcaaaagattaaggcattatttctctacatcagtcatcaacacaaagcatttcaattgctattgtagttgtttcatgaacttagtggctcagaaattaaaaaaaaaaatcagtatcattctttcatttcatagacaaaaacagtttaagcccaggatcctcagggaagaaaaaccctaaaacaatgtaaatgtaaaattaatcataatatataattgcagaaatttgaactgattcaaagaaattgtccccacaatggtataggaatagcttccaaatcaggccataccatttaatcaaaaaaagaaaatcaattgaaaagtggttttacttataatgatactgagtaaaatcagcttttccagtaagacagttgatgaaaagtttactcatttgcagcgatgacaagaacatgcactttattatgctttgtcattcaaaacttggggaggcactgcagagtaacagacgaaccatggagtagaggctcaatcctagtatgctccagaaaggacccgtggacaagttattcatctcaaaaatgaacatgtcctacaagatcactggttggcaaagtatgacccatgggcaaaatctggcctgccaccagtttttatatgatctgacagctaagaatgttttttaatagatgacatttggaattgaattggtaataatgaacattttccttgaaaccaaattaagtgaaatgttctctctccaacaaagaattccattcccctcactaataactctatattgcaaaaaagtacttaatgatttactattatattttgaattctatcactaaaaaaataattgtaaaaatttgttttctatcttattacataaataccttcatcatatccttggtcttcctcttggcctctggctctttacagaaatgtttgcccattcctggatgagatgattttgaaggtcccttcaacaatctaatttttaactatgctcaacagatagcagtcaaaccacttgtagaatgcaggtgatttggacaatatggatttgccagcgtttggctgttcatgaatggaagagagtcagatgggtccaataacagttccaattgtccatcttcaccctgcatgtttgaaaagagaaagcagagatctatagcgtattagtttaagccatattgtctgtgttagaaaatccaccctgccttgggcaaacccttaacctttgtgccttaatattccatctgtactgtggggaattaattggttaatgttcacaccttccccaaagatggctggggcttgcacatattcacaaaaacttcaaaagctgtaatgctttttgacagatattttttctttcccatcattttttcttatattattaacataagaaatagtttaacaaatgaaaaatttattgaagaactaatttaataatggccattaagagactttgatatttctaacatagatgcctaagcatactggatatattatgtatccagtgcacaaaaggcagagttcccatggaaactttttggtcatgtgtgcctagtatcatgcccacaagatagggttggagagacctataagcctctctttgccaaatattgtatggagaccagcgtgcataaagggttcagattctccttagaatcagtgttggaatttctagaccctcaagcgactctatattaaggtgcaaatttgttacctgggaaggtaatttttaaccccccattaatgtccatttgttagtactttagcccaaattaggtttttaaaattacctagctggttgagagcagttcttcaggaagtgtatcagattcttctaagtaggttcagggtaagttttgaaaacaggtccttgggggattgtgatacatcctccttcactttcagcaccctgcgtttgcaagagtagcatgtgtgtgcacacggcagcacacacgcaatacttaatactctagcttctagagcagcattgtctgatagagatataatgcaagccacatagataattttaagtgtttcagtagccacattgaaaaataaattttagcccaggtgtgatggctcattcctgtaatcctggcactttgggaggccgaggcgggcggatcacgaggtcaggagttcaaaaccagcctgactaacatggtgaaactccatctctactaaaaatataaaaattagccgggcgtagtggcaggcgcctgtaatcccagctactcaggaggttgaggcaggggaatcgcttgaacccagaaggcggaggttgcagtgagctgaggccacaccattgcactccaacctgagcaacaagagcaaaactcttgtctcaaaaaaataaataaataaataaattttaaaggtgaaattaaatttaataatttaagtatacattcaaaacattattgctttcaacatgtaatccatatacaaattattagtgatgttttacttttgggatactaagtgtttggtatctggtgtatattttatactcacagccagtattcattgaccggccatatctcaagtgctcagtaaccacatggggtgagcagttattttaatggacagtgtagctctgagggaccttgaactggaaagtgggtcacagagagcaaagtgtggctgcctttgtggctgataaaggcagcaagaggatgggctgggggaacaaatagaagttgggaccagcccagatccttacccctccattatacccaagtcatatttttgctgaaggtcagacctaactctaggtaacttaacctttttcactaaaaacttttagaaaaacataagcactggagttaaatgcttggccttaccacttaactgtatgaccctggacaagttactgaaaaccctgtttcttcatctgcaaagtgggaacagtgataatgcctcaagctcacagaattattgtgacaattaaatgatcaatgagcatataaacaatgaatactcaatgaatacttgatatttattttcacaattgctattattagctactcttaggcactaatttagttttaaaatgaactataaagacaatcagatactatcaattattctacatttcttaaaaagcagaaaaatgacatagccatatatatatatatatatatatataaaattttcaaatagtaggtgtaatcagctcattaaattgggcattatactgtcacgtacacacatcaatgcatcaaaaatccagaagatactacgttaccaagactatcttaaaattcgactttgttatggtagtgggtgagccaatgaaagaagagttggttcttctttttcctcctcctccttctcctcctccatctttttttattcaaagccagcagaaagagataattaaagcaaagctaaaggaattgaatgcaaagtttgcatcatacgtgtgaactaatcttttctccatggcatatctagaagatcaagtaagacacccattcagatggttcattaactagtgaaacttcggtggaaatagggcaggaggaagtagtttcttgctcacaaagtcattagtattcaaaaatacagcatagcagttctcacctaaaatagaaggataaaaaatactaacagtcaatgcttgttatgccaagtacatctttcacaggggttttgtttagaataaaagagatagtgaaagttttcagatgctagtaagtagtgaataaatgcagaatgtacttacacatttatgtaccaaatgctggaaggctgtgcaccacatagagcaaagaaatgtactaaaccatcaatttactaggtcattttaaatgtaggcagcaaaatggctatgtgcgtgaaaagccactactatattttgagagagcctttctaagaatcctgaaatattaataacatggtcttaatgtagttggagacaaaagaaggtgttaagggtagcaaggctgccgagaatagcacaatgacaattttgtattttctgcctgtgttttataaaagcaaaaggaaaagagtgtctgtttaaagaacagcagccttcaattttccaaactggtataaaattggtatttcccaaatgaattcacatatatttattcctggtgacatattaataccagcttcgaggaaaaataggaaaaaatgtaaacttgcaaatgcacttttttcttaaattcacataatatataaaacaggtttttgcactgtaagaaatttaatgaaattgaaggcaacattttccattttgatttttgcaaaagatgagtttaattttttagctggaagtagtcttatcagaatagcttttcaaatatgccatttggactttgtgatgatcagtcactggacagtttcttgtccttgtcgatcttccactcccactgtgagtttttcgtttttgatgcttgttgaaattgaggggtgcatgagaatcagtcagtaatatgcagttttctgcaaacattcagatgtgaaaaaaatgaaagcattttgtgccttctttgcagtcctgagttgccacaagttgcttttgtcgactgcgactgactgagtgacaggcgggacccagtgggtttgtgttcctgttcagaggctcattgtgtttgatgtgagaaagctgggcttgacccccagtccttcttcctgctaaagtcagggtttctgattttaatcaaaaccctagggccatcttaagcatgaccaaaaaagcaccttgcaagttgaaccttatctaattatgcaatgtgtataaacttgagacacataaatctcagtcattggagcaacttgtttttctaagatgctccggtccagtgaaagacgaaagcaaataagggagagattgatctcccagcacttttattgtcagtgctccacacgtcataaagttttggcttgttaaaggaaattccataaacaacttcagttagtaagagtgaagtaactgtgtgccttcctgagcccctgctaaattccctttccgcttgccattacaagagtatgattaagaaaatgccaacaggatatgcgagtgggtggaacagacttcagctggaagccatacagatgcttgatggatgagtagtgacagtgagatgatggccctatctccagagagaatcaagcagtttcatggatctctttctagtactcatttcagtaagatctgctgcgttgctgcatggttgttccgttttggctgccaggctgatggaaaatggctgataggtccttctccccactgctgtttctgatagtatagacaagtcctaaggacatgatgaatgaaaagaaacgagagtgaatcatgctggaaagattgtgggttactggcacattttctttgaacctctggtgttatgaaataactttactcttaatggccttgtctctgtgggtttaatgctgatggtgttggtcaatttttatctggggttgagacagatttgagaggcgatcatgaaaggccatgggggaaggaaaaagagtggggagcaagtagtcattattttttattatgagttttcccagaattagtgagtttttccacactactaaaagtggtccttagtgtcagtatgatgacagtgtcagtgtgatgtttatgaagatgaagtcatggaaaggatgtcaggtgtataaaaaactatatggcccgtgttctctacaccaggctctcgggaggtgtgtgcattgcaggggaagggtgctggaaaaatggaaagagggaaaaacaggagggttttatgaacttgaaaatagacacaaaatattcgctgatcaaaaaacaaatcttagcatactatattccaaaatctccagttgatagtttttgttatttcaccctgaaactgtgacccgtgccttacaagctcgtcttttttacttgcttgcctttgttgatctttcgatttggttctttctgtagttgtaattgggaaataatcaccacccggtttttttgtcagcacttggatacacttcccactggttggctaaaggctacactctgaaattccatagcatgtgactaagcatacaggctttgagggcagaacacttggggtcaaagctgggtgctgacacttagcagatgtatggtcttgtgccctcaattaactgctcaaagctgaaattcctcacttctaaggtagagataatgcctgtcgaaaaggggtgctgtaagaattaagcagcataatgtgtataaagggtatctggcacatagaaaggcgttcggtaaactttgctgtgcttttccttgattctgccaggtttaagaaaatttcttcctttggacttcttgacacctgaccaggaatgttaatggcccttaaagagcgactatactcaatgaatgcttttggttgcatgacctgcatttcaagccacatgatcgctaatgattagcaagaacgtctcccttcttctgaaacaaggaggtggctttgcatttttgctttggtctatttgcagtggtttctatttgtttgtttttttcttcttccctgcagcttgcaaaattggatattacaaggctctctccacggatgccacctgtgccaagtgcccaccccacagctactctgtctgggaaggagccacctcgtgcacctgtgaccgaggctttttcagagctgacaacgatgctgcctctatgccctgcacccgtaagttgtatgcttgtctctcattcctgtgatgccaacagctttcattaccacctagcaaggcactgccaggtcttctcctgggataatcattcagggggcacttgagatcaaacattcatcctttctcaatcatagcaggggaaatgcttgtaaaaagaaagggtctttcccactgcttctggttgccttcagtgtgcacagctgcctacagactacttggtggagaagagattgagtgttcagaggttgtctgacagtgtaattagagctgagattggaatttattagtggctttgccattgcactgaggactcagggaagcttgacaactggcaggagaaacaggtagacggcagggtttgggaatgtggtttcagtctgtaaaggacagctcagtgtgcactgagatcattgcttaggttgtcattacacctcttccttctctactcatagttttgtgttcataagacttaggccccaatcctaataaatgcttgtttaatgattgcatttaataaatgctgggttaatgaatggatgaggctgggaagcttggtatgaagagcaggagtgaagaaatattttctcacactttatatggacagtgttcctaggtgttaccattcctttcatgtacacttgggccttcacagaccctacaatggctgtgaccttgatcggaatggggagcactgggcccatgaatttccattaggtgaatctgtgcttggagggctagcctcatggctcaggtcagacaccttccacagattttgagtttgtttcccagcctgttgtgtagctgggtggctgttgagtctcttcagtctgtttcctcacctggagaatggagttaataacagtgcctcctaatggttgttggtattaaacagcctcatgttgtttatgtgctatgtacatcgcataggatgatgccatttcatatattttagctttggccgggagcggtggctcacgcctgtaatcccagcactttgggaggctgaggtggacggatcacctgaggtcaggagttcgagactagcctggtcaacatggtgaaaccccgtctctactaaaaatacaaaaattagctggcatggtgggtggtgcctataatcccagctgcttgggaggctgaggctggagaatcacttgaacccaggaggcagaggttgcagagaggcgagatcgcaccattacattccagcctgggtgacaatagcaaaactctgtctcaaaaaaaaaaaaaaaaaatatatatatatatatatatatatatatatatatatatatattagttttagttatcattatgactattattattttgtttcctaactactataaatggtattttggccaatctggagctaacaaccctgcaaataaaaggtttttgggtatttgagcactttgggccactgggcaatcaagtcctgtctttaaaatgagtggagtgagtctccaggtctctctgactttatattcaaattgctgtaacctccagagtttctttcataatgagagataataatgatgatgatgacaattttataattatgcccaggtaatgtattaggtacttgaaaaaaatcttaatacgtggtttataagaaatctgttaggtaggtataatctttattttatagaaaaggtaactgcaagctcagagatgttaaggaacatgctcaagatcacaccctaccttggacagagttgtacaacctgaagactcacctagtttctattttatattattattatatttatattattatatttatattttatattatttctattttatattattctattatagagaatctgggagattctcttgctggctctcccaagtcaagcataaacattcagagttagggagaatcctagggtcagtctcagatgtaactgttaaaaaggttagatgcagtagctcaggcctataatcccagcactttgggaggccgaggcaggcggattattgaggtcaggagttcaagaccagcctgggcaacatagcaaaactccgtctccactaaaaatacaaaaattagacaggcgtggtggtgtgagcctgtaatcccagctgctcaggaggctgaagcaagagaattgcttgaaccggaaggcagaggttgcagtgagccgagattgcaccactggactccaccctagatgacagaggaaactctgtcgtctcaaaaaaaaaaaaaaaaagaaaaaaaaaatagccaggactggtgcctttcacctgtggtcccagctacttgggaggctgaggcaggaggatcacttgagcctgggaggtcaaggctgcagtgagctgcattcacatcactgcactccagcctgggtgacaaaaaaagaccctgtcttagaaaaaaaaaaacgaaaacagaaaaactgtaaataggcaaggattgtttttgctttctttctttcctgttcctccatagactaagaactttctctgcgtggccacttttgtttgaactcttcagtcccaacctttttcttttccaatgtaaatattttcatgctatgttccatttgtgtgattagtttaataataaactccccatctttatccacacctgctaccaacaattttcttgtaggaatctggggcacaatagtaaactcaaggggaagtgtttgaggctgacattttgaggatggccctcaatttgcatcatgtactcccccacttactttccatgcagataaagccttctctaggttgagatttgattgtattatgagtgtcatgaaatgtatctctgatggcaggaggtcctggctctttctcccaggtatttttcagtctcatgatgctgacctgtttagcatttaaggggaccatgtgcccatcactttattaccaagtcttgctacttgggagtttaggaaacctccaaagatggccatatgtctgtgttgctggaacatttgatgtatgtgtaataaggctgtggtagttgagcccttggaattgtatttttaactgttagctttatcttaaggatgcaaaggggaagaagagaaaatttgattttagcatatggatggaccaaaaagtctaaaaattaaagtaacatttgcatgtttcagaagtcattttccacaaggtgaagggaaggaaggctggtggctttttgtgtcattgttaaaaggtccatgaaaatacctgctcttggaactccttctcctacactttactacttcaaggtcttgtgcattactttacttacttattttttcattttttttttgagatggagtctcactctgtcacccaggctggagtgcagtggtgtgatctcggctcactgcaacctccacctcccgggtttgtgattctcctgcctcagcctcccgagtagctgggactacaggcgcccaccaccacacctgtttttgtttttgtttttagtagagacagagtttcaccctatcggccagactggtcttgaactcgtcacctcatgtgatccatggacctcagcttctcaaagtgctgggattacaggcgtgagccattgcactcagccttgtgcattactttaatggttatcacatcccacttactttatatgcagcacttcagttaagaggaaacaaagtgctgatggcgacgccatcaacttgctgatcggatcgccttggctgtaaccactgaccaacactgtgatattcagagagagtttaccctcaccaggccccaatttcctcatctgtaagttggaattctcaccatctacctctggggctgttttaagaatgaaataaaaaaaatttgcaaagttctggcacctggtagggatctaatcaatgtttgttctcttcctcttttatttccagctggtcacttccttccccaaactgcctccacagcaggttgacagctatctcactgcctctctatcagtgattttttacccttgcgtgcataattaaattacttgatggctgccctgtaccccaggatttctggtgggggggtaggactcaggcatcagtattttcaaaaatcagtctgttaatttattgtacagttaaggttcagacccctccaatggaactaaattttttttttttgagaccgagttttgctcttgtcaccctggccggagtgcaatgacacaatcttggctcactgcaacctctgcctcctgggttcaagtgattctcctgcctcagcctcccaagtagctgggattacaggcacacgccaccacatctagctaattttttgtatttttagtagagatagggtttcaccatgttggccaggctggtcttgaattccggacctcaggtgatccacccacctcggcctcccaaagtgctgggattacaggcatgagccaccacacccggccaacagaactaaacttgtaagtatttttttaaacttaaacattaactgcataagcctctgaagacttcctctgagatagggataatcagggaagtgactatactttgctgataatagatatagtcgtaagtcaggcagcagaactggattctaattcttagcctatggctcttcctttcgacatctcccttcctagtgaatataatggacctgtattgtctagtactgtagacacttgacacgtggctatttaaccttaaagtcattaaattgaaatttaggttcttatttaaacttggcacattttgagtgctcaatagccatatatggctagtggagactataccggacggcagacccagagaacgtttctatcaccacagaaagttctattggacaatactgtagtagacgttccaacagagaagacagtaggagtttctcaaagaacctcttgttcagatgatccacagagtaactctccccactcgcacgctgcccccagctttatcggattctcttgacaagatgtggggatgggaagcagcataaacatcaggggtcctttcaaactgattccagcctctaatcagttcttcccagttggttaagccaggtgacaaacccaattcccttgtgctgacagccatgataatcaggcaccttctttgttcattatgctgtctttaaccccagcattcttatgcagcctcgcatttagtgatcgctcactgtgacggcacactaatgaagaaataaaacacactatctgagcctcattcttctagccaaagagagactgtgctccactggcttgtaaaatcaggtttttgttcacttggagaacaattagaccaggtgaataaaagtagcattggctaatttagaaggaaactgcctaggaagtttgcaccattgacgctgctggagagcttaagagaatttaatcgtaaacaaactttacctttgggaatacttttgctggagcctctggttaggttaacataaatggctgcctgtgagatgtgctgagatgtttctatggaagcaccatcggaacattttctggaaaatagcccataactatttagaacagggagtttagaacagagctttttaaacatccacatgcacaaaaatcacatggaaatcacctgcggattaggaggagcgaggttaggcctgagagtctgtttctgacaagttcccaggtgaggctgaagctactgatctgtaaaaccgtctttaggcagcaaggatttagattcccagccccacggctgtcaggagacaggagattctgttttgatgcctgtaactttcagacctgttcttcagctcagtggtgactctagaaaggtatttcatggattctgatcattctcccttcatggaaatggaatacttcatctgtctcctgtatgaagaaaatccagcctgggtagaatcatacaaccaaatgcactcactgtggaattatttttctttttaattttgctgttgtttgtttgtttcttccagaatcctcaccaagttattgccagagagtagaaatgtaaatgttcaccttagacacctgtatcagtcaagagaggcaagaagtttttttttttttttttttttttggcaacattgccaggacaagcaccattatttctgcacattcagggctgccattaaagctgatgtcaggattttgattttatgaatcttttcttaacagggattttgatgtgatttttattaatgaaattaaagtcctttaactctacgaatgactagctctttcccttctccagatctgtttctccttgtttccctgccccttctggaatgcagtctggttatcagcaggactgggcgtggtcaacctcacacccctgcaggaagacttctgatggtcttagtcatgtacttgcttgttcaatgattgtagtgagcaagatcttcttttcccccactgggaagctaaatcaatgttatatttaaagtaactttctttttttgttttcccttttttgagatagagtctcactgtgttgcccaggctggagtacagtggcgctatctcagctcactgtaactgccacctcccgagttaaaacaattctcctgcctcagcctcccaagtagctgggatttacagacatgcaccaccatgcccagctaatatttttgtatttttagtagagcctgggtttcgctatgttgaccaggctggtctcgaactcctgacctcaagcgatccgcccgcctaggcctcccagagtgctgggattacaggcgtgagtcactgcacccggcattaaggtaactttcttttccaaccccttattgtatttcaaaatgtgctagaaaagtaccttgtaaaggtagtaaattggctttgcatatctagaaaaatgtagctcatctgtcattttgccaccttgacttctgagcactgttaccagagtagtttttcgtatttttcaattggaaatctgtccctgtgcttttgggtgctctttatttaacttgtttgatgaaacttcttagagcctggtgattgggaacactctgtaaatgagagattattattttagattgccaacttgaagggcctttacgaatctgtctccaagtaaacagcctcgaatgtgccaaacaaacaaagagtgattgattgatacttagacgtggccgaaaatattccaaaattgcagctttcaagacattttatactaggagagctcagagctaatgagggcagatttcctaagatctatgaccagaggtcctgatttgaaaaaactttctccaggtttacgttatcaagaaattgaaacagccaagttccaaacaacaaacatcacttactttgtctctacatttgccttttctaattgaatttagtgcgctgctgtatttcctcccagaaagtgtattgttttaaaattaccatttcagttctattactcaaagccctcgctgctaatgctttctgacagttatcaacataatgagccataatgaaatgatgagcaatcttcggtggaaacccaatgtcgattcgaccggtgctgtgtgactgtgttgtgaaaatttgaatgcaaattaaaataacatcgtccttacttgtttccaaggtcaggagaagggagggactcttttccttttttatttttttattttttatttttttaagggctttaattttgggaatctcacatccattttcaaacaagctcttgaaggtgcccctgttattctgttcaattctctaccccaaagatttacatgcttagcagtctggctaagggatttggggagggatgtctagagcgaggctttgatgtataaaccataggataaaatgcagccttcagtttcaagtaaactatatatttttttatctacccgaaagcatatttctttttgctttagagctgcaagtaactaatcatataatgatgggggaggcatacattctgtgaaataggtcagtgagggtgcagttagctctagtgaaagactagttagaaaagtgagaacaaaggccaaagattcccaaagtgtcgtaaatgaaagtgtttcagaagattcattggttgatctctagccattttatcattcatgcaatcaatcattttcgtgaacatatttttatgaaaaatctcaaatccaagttttccaggggaatttctcattccatgtcatttatcaaatttgcaatgtaatagtatagtttcatactgcattccatttgtcataggacaaaaactcagattgagacaccaactcctccactgccagattacatagttggtttttagttcagaacatatggtcctgctgcctgttagttggtaagccagctaatgtgtctgtcccatggactgtacaaactgatcaaagcaaccaaagacatttggacgattcagatgcagccgtcaacgtatgctgctgcttcagttagagcttagtagttcaacatctgatgttagctagtgagtataccacatttttgtttcttcctttcggattgcctttcagcattttagctactaaaaggaaaaagtacctctagacaaccaagtggatggtttttgtttgaagaaaattaaagataaagggagaaagatcaccaggtgagcttcaacgaaggcactagatagaccccagactgatcatttgccatttggttgtttgcaaaattttaagagcctcatgatatttcataaagatcaggtatcatctcactgaattctttttaaaaaaatgctgttttagcttcctcttttttttccccacatactccccattttatagtcataaacagcccattatggattccactggaaaatgcaaagattcgagggacactaatatatgcccaagtggaaggcttgaataatctgccaatgccatttagccaggttattacaatttttctaccaccctgaataattaagagtggcttgtcattgaccgagtcctgtcatttctggatgccatttttgacactatgcatggaagtcatacagtggttattcacagcatgcttctatgaaacaaggttaattacacatttttctgagatcccctggggtgagaacggggtatcttctttttttctttttttaagacagagtctcactctgtctcccagtggtgcaatctcagctcactgcaacttccacctcccagctcaagcagttctcccacctcagcctcccagggtgctaggattacagaaacgagccaccacactcagcccagggtatcttctttgctatcaacatttagatttatgagagattctgctatagagatataattgcccctcgccctattcctatgatcttccacctagaaaaagaacctttaatagaaactcctagccactctcttgcacagaaggtaggaacaaggcagaaaagataatccccatgaaaatgataaaagaggatcatctgggaagtagtactagctagccatcatcatcatgaagggcagggaagtgaggtgaaattgaactctggggtgaactgagaaagttggaaactttctatccaattctcaaaaagaatttgtaattatgggttattattttctttatattatttgtatctctatgaaagggaagcagggttgtttagccttggagtcagggtttctgatcacagctttgcgcatgttggctgtcttaattttggcaatttgcttaacttatcttagtttttggcgatcagattgttgtgaacaataaatacttttctgtcagatttgattgcagctgttaaataagatacaaaaaagtgctttgcaaggaaagtaaattaatgcacaggctagataattttaaaaatgaaatactcaattctacttttcttggtctttggcgtggtagctttcttgtgtataactgagaatttataaggcacttcagccataaacaagtcatcctaataaaaagaaaccaaacccctaattaacccagtaaaaaaaagacaaagatcactggagaggagaatgggaaaggagatagaaccagaaaaataggttatgggaaagtctcacaacaagaaatgaacctctataggaagccaagaatttttcatgacagcagcaagtgattgatgcatccaaaaggttctggtttaatcatggacagccctgcttggctgtctttgttgtaaaaacacataaaccaccatgataagaggttatgcactgttcatatatgtcaggagggatgtctttaaaacagccatctttatgtaaactaacccacagcagataggactgggagaaagcaattagtggtggcaacatatacaaatgtcaggggaagcatgggctttatttcagagtcaaaacgtaatgcatcccaactgttgactcttccttataacctgtctttcagctggagagagattaacaacaaaggcttatctgaagggttgaagggttttacagctaagacgctgaagtgctattgacagtccaaaagttgtacatgattaatgaagccttaggaaatggaactacagacccaaggtgctgcttcctccaagatatgtgttggactggttgccttagcattttagtgaggtgacagcagtgcttaaatacatcgatcatgggagagttacctttctgcccatgctcttgggggatgctccatttcccatccagaatgaatttcatagcccaggcattgaattttaaaatggcgattaaaaatcagttaagtattagatgtctgtgatagctctggaaactactctatcacatgagaccagagactttggtttttctatcaactgtcttcttgccttggttgcagacttgattttctttctttcttttctttttttttttttacattttagcatgtgattgccattttttctctctttattattattattattattttgcttagcttttgtgacatacaaaagtgctatggcagtgggtttttttttttttttttgagacagggtctcaattcatcactcaggctagagtacagtggcatgatcccagcttattgcaacctccacctgccaggttcaagcaatcctcccacctcagcttcccaagtagctgggactacaggaacatgccactacacctggctaatttttataatttttgcagggacagggtttcaccatgtttcccaggctgatcttgaactcttaggcttgtcaagccttccacctaccatggcctcccaaagttctgggattacagtcatgagccactgtgctcagccatagtgctatggtagtgatgcttctgattagtgagctggactgggctaaagcatcatcattcattcatttgttcatttagcagatatttattgagtttctaccagatgtcaggcattactctgaaggctgtagatattctcataaacctgaaaaagagaagattccttttctcctggagcttatgttctaatgggaatataaacaaacaaatgaataagataattgaaggttctcctaagaaggaaatttttaaaaatgtgatgcaattgggtgcattgggacagggaaagggaggatttcagtttgtatggagtagtcaggaatgagaactattccagggataagaagtcagtcagtcaaagggccgggagtgagaattccaagcagaactaccagctccaaggtattttgagttgcatgtgcaaaattttgctaacaatgtgagttttaaagttgacttacttttttccacagttttgcattctgttggcactttaattccagtcgttacgagaaatagaacttttaggtttatatggcacgttacaccgtatatccacatatatttaagccctttggcagaacccatttctgccaaacccatttcaaaacgcaattatcatagcaggttttcatcttttactgaagtttcagttgcttcctgtaagaataaagaaatgcattttctctgactttgggtgtgaggtagagtacatagggtacctggactttccatggaatggtttataccaaacttatagacacactggagacatttctgactttaggtttagtgttggctgacggcttttaaatgacattattaaggctcacacagatttcatgtggatatgtaaatactggcttgtcctaaaggggctactttaaatcttgacataagccagcaactgtgttctctaaactactcaagaattaaattttagtctaatccatgggaggaaagaattaagatatgtggaattactggaattttcttttatgcttggaatattgccgttcttaaatgtcacattgacagtatgtggttcatttccagaagcttgtttttttccccagagaagagcacatggttggtaaaggaagatcaagattccttttataatacaacatgatatgatgtgatattttataatatgatatgatagccctttgtatctactatcatgtggctatagtttctttggggcttaatgctgtcaaactcctgtcaactgaatgtgaggtgacatcccactagaaaataataattacccattgtagcacctttctctggtacttgctgtgtgatgcagaaagtatttcacaccagtgaagtgaatggatgttcattaaatgtatctataatggcaagaaattcagtgcccgtttctttcagagcaatgagaaactcaagaaataagccatatgtctcattttattccctccttagtcaataaaggtaggtctaacttggactttagcagccagagttgtcacctgggctatatacataggttaatcaggggttcctggactgagctttttagataggctttttagttcctggaattacatgcagaattctgagggtgccagagagcatcttcctaaaaagaagatgccttgctttcatcatattttcaatagcacgaaatggtctgaaggtcaattttaacggccacctatttttgcaaataagttttcttggagcacagccatgatcatttgttaaggtattgtctatggcttctttggagatagaattacagagttgagtagttgctgcagggagcagatggcccataaagcctaaaatatttattttctggccagatcataaaatttctttacagagaaattatgccggcccctgtgcaaaagatttataaactaaagattattgcatttgacttctatttctgggattaccattaatatctgggccactaagttatattacaaatgtaaagggcatactaaatatgaaaactttaaaatagttgaacatgctattttcatttttgggtgcaggcacagagagaatcctgggcttatatgtgaatttcatgggaaatttacaaatacaaccaaaaacgtgaaggaagggtgtttatgttcccttaaatacacctcagcatttgattaatttatatgaggttggtacaaaagtagttgccattaaaagtaatgacaaaaaccaccattacttttgtaccaatctaatattttagaatgtcttgatttgggtgaaaaaattaaaattaaaggcaaaagctgttgttccataaagactaatatggaaaatacctgtctacctttagaaatgttaaaattaagcttcttcagagataaagttttccccagagataaagctttcatgtctgagtaaatcacctcctgaaatcaaggtggaggaagaaaagtgtaataaccaatcccaatttgataaaaccttatttgatagaacccacatttcaaattcccagccgtcgctggttacacagctgtaaaaacaggacaaggcaggtgcttgctctgacatccactgcacatataatccctatttagtttccttgagtctctgcctttttccctaggttccctatccattcctgcaactatctaggcaactatcaggaagttatcaaaatgaataagaatatttttcctctctcctctaaagcaggtgataaacactagatacaccataaatgttttttgaataaatgaatgattcacaatctctcccagcagaagtaaccactaatattttatatatagccctttctactttttccaaagtaattctaaaccatgaaaaaaagaggcaattgaaacaaactagttacactgagttactacttcacaggtataaagctaatgaatctgtatgtgaaaagttgactagtacagctttggctcggagaaggctgcatagttcacacacttcataacactgggtataagatgcattaaaggacttcattagtttttaattcattcattcattgacttatcaaacattttttgaaatttctgaacgaggaaccatggtagaaaacaggaagtgataaagacatcaattattattattattattattattattattattattattattttgagacagagtctcactctgttacccaggctggagtgcaatggcgcgatctcagctcactgcaacctccgcctcccaggttcaagagattctcctgcctcagcctcccaagtagctgggactacagacgtgtgccagcacacctggctaatttttttttatgtatttttagtagagacgggggtttcaccatattggccaggctggtcttaaactcctgacctcaggtgatccactttggcctcccaaagtgctgggattataggcgtgagccactgtgcccggccaagacatcaattcttgaggagcacatatactggtgatagaaacagacatggaatggtgtctaagtagcaagacaccattatatgttacaaacaaagcaggaaaggaaataaggaactgaaatgtcaaacaatgacataagcataaggactggtgttatgccagtcctgtattgaggctagtagtgggtagttttgaaaacaaaatcttgccattcacaatgaccctcaagctacccgatgggtgtatgtactcagtaggtcgattcagatgtggagactagaaaattagaacaagtacaacagttagcccttttttgttataaacctcatatttgtaattggagacttactcgcaggtggacatatttctgatgacaaaggcaatcactctgtcagaaatttaattgcttctaaatagccagacacaatacttacataaatgaaagagaaaataatcggagttaggttttttacttctggatgccttgtatttattaaaagagagctcagattactcagaataccagttttctcttctttttagccatctctgtaggtaattgtttaccaagatgctgcagttcggtattaactacaggcccagattggcttttggctatattcaagcccatatttgtttctcaatgtcttgagaatagaatacttttattctcctcctcctaaagaggagatgggccctccctttaaatgagaaacacacttatatatttgtaatcttttaattggcagggaaacaaaaaaaaagaaaccacaatcccacaagcacagcataccacattatgattttaatttgtaaagcgtgtgtcctctcccaggtttttttccagaccaacatcatagtcatattggatggattttctatactttgttttcccctctatcatatgacttcgttatactccaatttcgaggcagcgacagtgtccccacaaagctgtcactctctatgatagcaaagcataaaacatacgcagtacgatttaccagcactgaacttgaatttgcctaattctcagtcttgagcatccaacccagagccttccttcagaatcgctgcccacaggaagaaggctgccctagcttagcacgtgttttcgtgccagccctccattttgaaatcctgcagcatctttgtcatttttttttccacgtggaagtgctatatctctgagtcctgaaaccatttagttttctgctccatttcttctctgtttagacactgccgtgccccgtcctacatactaattactgactttttgcttctgtggtgcttgattcattgtgtcacattttcccatgtgaaagtggaccaggaaccttggcaaggaggttaatggatttcagagtcactcttatttaaccctggaagtcacagcaaaagaagaaccaatgactgacccatttgataaaccaagccctggtcagcttcagctgcagactagtaatggatttcactatggtggcaagcattacagaattaaaacagggctgaagatagctcactgccacctccatgtttgccttctcaaactggctgaaatttttccttttgttatcattatacctttagtgaggaacacatggtggaataaaaataactccaaatggcagatagtacttttggatttcagtcaaattctgtcactaattagattgcatgaactttcagtattattagatttactttccagatctcagcttcctcgtctttaaaataagggtatttgtccaaatgattttaacatcctatgtagctcttagagtcggtgattttatgtacttcatttattcaaaaagcattcatttgtcattatattccagttaccatgctaaaaactgtaaatgcagttttgaaatctaaacaagaaagaaatttgtattttctctctgaggacttatgtgaagtaatcttccctttaatacaaattttacaatacttttgtgaaatgttttaaaggtttgcatttttctaagtttcacaggatggggagctgatcttaatgcttaaagaggttgttggtaattagtcctgaggggagtttgggaagtcctgcttaccttgttaaaataaagtcttcaataagtgggataaagagaaaaggagagtgaattacccttattaaatgttaccactaaaaaataattggccattaatcactgcaagctatgtaataaatattgaatatgatttcttatttataggttacctcttccaattctatctcgacagccattttgaacagtatgtttcattgtggtagactaggtaaagctcatccaagttcatgcaagcctcctgttaactttcttttcctgagaaacttgtactaatttcctgcaaagtagccatctcaattacattagaagtagtatagataacagtgatctagaaacctcaaatttttcttaaaactcattttgctcatctcttggaagactgaaatgggaaagaaatagctttccaactgtcaaactgagtagctatgtctcgtttgagtgtggcagctaccttttaagcctttggaactggttcagaccaagaaaattccctctcccttctcccagcctgattcttccacttgaaagcagtttgtgtcacaatttttttgccctattaagaccaatcatggccgggcatggtggctcacacctgtaatcccagcactttgggaggccaaggtaggccgatcacttgaaatcaggagttcaagactggcctggccaacatggccaaactccgccaaagatagcaggtgtggtggcacacacctgtattttcagctacttgggaggctgaggcatgataatcgcttgaacctgggaggtgaaagttgcagtgagctgagatcacaccactgcactccagcctgggtgacagagcgagactccatcacacacacacacacacacacacacacacacacacaaatctacatcaagaaacaagagtttcatcatgatctatagtcttattttttattattaatattattttttaaccaaccagtatgttgtcggtaatcagttgttctgtttcataacaaccactgccatcacccatatttcagaaactctttgatgttgctgggaatgcacgagttaaagggcaggaggaggggtctgggagccttgaacaaaacccctgccatctcgccacagctgtatcttcaacatctctgcaaccgcgttaaaccagttcgtactaattacccataaacagcttaaccctccgctgccatgttgaactgcagaggcacatttctacagttctgttaattttatttgctattgatgacatgctgtacttaggaattataatttaccttcagaagtggtatataactattaatttatcagagtctcacaacggccctgggaactagaatcactttcatttttttagatgataagatggaacagataaattatgatatttttctgccacttcatagggaaagcctgggcttggagcccatttgctggagagttgcttcacatctcaaagtgacaaccgatgccttgtttgtttgcgtgggaaagagaatgacactcacgtaacagccttctattatattgttcttttaaaagatcttttatgctggcttgatttgctttttgctttctttgccaagtgggtttgccttgctttggagagctgcagaaaataatacaaactctgagagattccaaaagggtatttcggttcttggtgtgatgatgtggttttctttctccaggtccaccatctgctcccctgaacttgatttcaaatgtcaacgagacatctgtgaacttggaatggagtagccctcagaatacaggtggccgccaggacatttcctataatgtggtatgcaagaaatgtggagctggtgaccccagcaagtgccgaccctgtggaagtggggtccactacaccccacagcagaatggcttgaagaccaccaaagtctccatcactgacctcctagctcataccaattacacctttgaaatctgggctgtgaatggagtgtccaaatataaccctaacccagaccaatcagtttctgtcactgtgaccaccaaccaagcaggtaggaattgaatctactttattgtatgatctgaatgtatacagagaaaaggcttaaaataatgaattataataaattgctataattgaaatagaatcaatcaagcctgggagctgcgttataatgtaaaagatacttaggggctgggcacggtggcttacacgtgtaatcccagcactttgggaggccagggcaggtggatcacttgagcctgagagtttgatcaagaccagactgggcaacacgatgacaccccatctctacaaaaaaaatacaaaaattagctaggcatggtggtacaaacctgtagtcccagctactcaggaggctcaggtgggaggattgcttgagcccagcagtcagaggttgcagtgagctgagtcactccatgctggatgggattcatctcagtcatttgaattatgatgtccatggctggacatcagagcacttatagattatgtacaattataaaattgatttttaccaatgcagagtgctcttttggtatttgttatattttctaacaaaagcattagcagcaatagttttgatcttatgctttaatgtaaaatattataaatgatctaggtggacctatactagaacctccatgtacatctttgtgtctatagttaacgaagtttactttaagacacttaatagttttgcagctacttttttctttttttctttttgagacagagtttcactctgtcgcccaagctggaatgcagtggcgtgatctcggctcactgcaacctccatctctggagttcaaccaattcttctgcctcagcctcccgagtagctgggactacaggcgggtgccaccatacctggctaatttttatttgtatttttagtagaaatggggtttcaccatattgaccaggctggtctcgaactcctgacctcgtgatccgcccaccttggcctcccaaagggctgggattacaggcgtgattgcagctacttttatagttgatttcttgattgacgtgggggctgggagggtggggcggagggtggggcggccagtctcctccaattcctacatcactttctgctaatacagatgactagaaaacatttcctgttcatgaagtgtttctactgagttaatcgcagaactgtcatgaaatcttgaatatcaaatattttgaaaatctaggtttctaggctttcgcttctgacttactcatctgtactccttccctgaaaaagttaccacccctccaggagttttacattgccggcttttttatttctggagagttagagaggagaagggaaacagagttagagtggcttattctttgtgaggctcttgggatagaaaacatagccagaaaaggattataaattgccaacaatcctatcgcctctaactgcacttttcttttaaatgaatgtttcagtaagtgcactcaatagtttagtaaaatatctgtactaattgatcctataagtgaaaactattccagtgtcccaatccaaagccattatttttccattttgccctgaactctttggaataaataaaaagttaagacttggggaaggttttgagcaggggctagaatggcaagtcttaccggaatgtatcttcagctctgcaaatgtgaacagtcttttaaaatatctaatgtgaacgggtcatccagctaggcctttgtcttttaattctgaatttttaggttgtgaacactgttcgcagtcattagttttatttttctacaaagactagtatgatttaggagtttttgatagaaacatgagtactctgtgattgccaacagtttattagttctcttttggaagaatgcaatggaaatattacatacagatcctgggaacacgcatcggtgctgctggtctctctgaattaggagctgatgcaatgcagaacgatttctgcaccatctggagaatctggttgatgatccaatcagtattcttacatgcagcccccttctacctttttggctattcattcgcaagcactacatcattttcttaaccgaattataagtagggatggacttttggagcctcatctgtaaaaggtgaagtcattctccttggcagagaaaagcctgtgggagatgcgctgaggacaggcttggctcccacagattttgggggagacttctatgaccccctgtacacgtagggatttgagccaagaagttatgtcaacacctactggggcaaaaggtccagagagcacaaagaagacacactaaaatcctccaaaagaagaaaatgcaaaaacatttccgggggtggggtggggtggggtgggatgaagttttattttaaatgtaggtataattcttctagatttaggagaaaagcagacagagaattactctgacacaataaggttttctttgccatggcatgtagtcctgccaaggaggtttgctgaacaggacaaaattccagctccttattttaattttcatgaagggtaatgctgggaagctgttcaaaattaaaaataaatctttcaataaggagacctcctatgtggccagccagaaagctttcacttagtagagaattgtatatgtgcagagcactgcttcattatcctatcataatttgaagttctctaattcaagtcatcaggatagtttatctttgattaacaaaccctttcttcatagtagtgcaaattaataatgtaggccaaaattcgggtgaatgtagcaaccgtaaactctatcgaagctcccctaagcatatttacatacacacaattatgttctaattgcaattgctcctatcatttcattaaattaaattccttgaggaccactataggcaatggtgtctcactctataaggaatacatagaattaatgaacgttagcatttagcacctggaggctacaaaagttagtggttctccatctttgctctgttttcacagggttctttctctcatcagtaatatgttagaaatgataaatcaaatcaatcacgcaaaacctgctagaattcttgggtcctatgttcaccacctttgagactttaagagttgaggagcagctccatgaaggtgaggtgactcacccatgctaatgtcagagccagtactaaaaagcagggagaatcctactcctgaaagtagaaagttgctttcctttaaaattaggagataatgaatggcattcatgtattcagcttggcattctccccatttatgagaccagattatgtgagtatctgggcatggacatggagattgaactgggctttgatcatttaattgtagaatgtggtgtgaatgggcctgtgttctcacaaggttatttaaacaatcctaacccaaatcttactcctggggtcttagggggttaataaacacccttttgctccccttctgggttgaaaaccagttgacacagaagacaaaggaaatctgaatgtctgtcagctttttgctgataagctgatggaaggatgtgagctttatatctgtggccaaaagggcttgcttcagtgacacttgcagcccagctggctacctgcagcctctccgcctgccctgctaaggttgttggaaggacactctgtgcaggcagacaggtaggcagataggcagataggcagatagacaggtctgagagtgggtggagctgaggacagagtacttttcccaaattctctaatgagatgagtcactcccagcctcacccccatgccagaaacaatgaagggaagaggtgggaaaagagtaagggtgggggtgttacttttccagctgaagtcgtacccagtaaaattggagaagaggaagctcttggagctcccccaatagttacttttctacattacaggccaaaaggaggaaaatgagattccagtttccttcatctttcatcctgtagcgactgttttgtcttttgtttagaagcaggtagtcctgatgtttatgaaaaatggataagcaaactgctgggtgatttgttttctggatggctttcctttggtttactttcacttaagtggaccatctcaggcaaatgaatacaggatgtgtcactaggagggagaaatactgtataaatgaaacaaggttttctggccaagcaacagacctgtgaatattttttttttgttaaaaaggctgtgatggcagccagcagtagcttaatatctctgaacggttttttgccgttcatctcccatcgcctttgcttggttttctagctgtgaggctggaccatattctggcgttttaaatcattatggtcccaacccccatgaatggtgttccctcctcaccccaaattgcacccagggccggtgttgtccattttttatttttactttgcatgtgatgctattctagatacttcataatggaaagatctggtcatctctctctagcacagctatggtgtcctagtgacaaacaaacatctgtagcatgcttagtttggaggagttaaaatatttgatgcattacgtaattatttaaaccagctaatctctaagatcttttccgtttcaaaattctatgattctaagtatgtaaccctgagctgtgggctatgaacctgaagaagtaaggcttattcttctaacatgtttagaaatggtctctcaatgcaattctaagagtgggaaaacattctccaaatgcttcagcagaattatcacctgaattctgcctgccctccttctctctaattccttgccttgccaagggatttacgttgcggggggaaaacagtaagatagtgaacagttgttctaaattgggggtgatttctgctcctacccctaatgggcaatgtttagaggcaatttttggtgcagttgcatctagtgggtagaagccaggcaggctgataaacatcttataattcacaacacagcatccccaatcctccgcaatgaagaattttctggtccaaaatgtccatagggctaaggctgaaaaactctgttctagcaatagtttttaagaacagacttcatagcagtgcccaccatttcagggttccatagccatgtggcctttgcttgagctggcctgtggctgaacacatagggaagattccacatttctctggctccattgccccatgctgaaagcatgatgctcccgttactgttctcagagaacaggcagttgtaaagggcctttcaaggcccctcatgaatcctgttgtagctgttttgccatcagatgaacgggcgctgcttgttaggctgaccttgttctctagggttggacaattaagcattaactgcaaaataataataataataataataataataaaataaagtggcattacacctcattataatgccactgtgccacatgtagtcattgtacagttccatctgtttgttgattaacatttatttacagtaaaatcaaatcagttaactctctttgtcaagtaatgataaatttaataaaaccaaaataatgaataaagaaaagaaataactaagtgtaagaggcacactgtcttttattattcaactggtaagttcccattctttctctctctgccatcttttaattagacatattatgttatttgagtgggataatggagaacagtgggaattctcatccccactgggtataattgctacctgtcttctagatagtaagaggaaagcttcaagaaaatggtgggagaaaggggaaaatcttacagcaatcaatttaggtaatatgctgtaggcatggcagagccagactttgtggagtttaaagcttaaacaactattgtgtgattaagggtgaaaacataaaaccctacaaaattacaaatgtcagactagtaacagagcttcagaaagggtccatacaaacttctttagcttcggtaaataaaaatctgcctctgactatgttgagataaatgcaattgtcagacaacaagactattgcataatcatccctaaaaacagaaaggacaagggagaaagatgagatgttgggaagtccagtttggcctgaaatgaaggtgttgaaagacaggttgtgacagtgagtggttctggcccacagttaggtatgaggggcacctctggagtggacctgagttgtggtctgagatcaaagggacaagcagaaagcacattcctgctgattctgagaattgttttggaatactaaacctaaatgagatgatgtgatctcggttcatgcaaccactgcctcccaggttccagcgattctcatgcctcagcttcctgagtagctgggattacaggcgggcgccaccacatccagctaagttttctattttttagtagagatggggttttccatgttgcccaggctggtctcaaatacctggcctcaagtgcatccatctgcttcagcctcccaaagttctgggattacaggtgtgagccacctcacctggccaaatgatgatatttttaagacacaaatgtttgcttcctttagtgccctaaagcaggggtcagcaagctatggcccaagggccaaatcgaatcctccagattgggacaacccacgaatattggcttttatatttctaatgggttcaacataataaaaaacagaataatattttgtgacatttggaaattatataaaattcaagtattggcattcataaataaagttttactggaacaaattcccactcatgtgtttatatattgtgtaagagtgttttcacgtgacaatggcatagttgagtagctgcaacagagggcaaatgtccggcaaagcgaacatgggcactatctcactgctgacacaaaatgtttgctgatctgctctggagtactaaatcaagaaaggagaccagtaagaacaaggttgagaagctattgaaatactggtatcatttgtggaatattgttttggcaaaggatgtgatgggtaacatttaggtaaatctcacatttgaaacaatcttcaagacaccttattttgtaaaggttttgactcagaaaaaaaattaactaaaataattaggatttcagtcataactttgctttcttgaaccacaaattttttcccattggcactcagatttaaatggattatgtgagacatgcttcactgatattctggttctctttaaagtatgcattcttcacactattgcctaggtcctatagttgctgacagcaattttctttttaaataattctatgttagcctggtgcagcggctcacgcctgtaatcccagtactttgggaggctagggcgagtggatcacttgagcccaagagttcaagaccagcctacccaacatggcaaaaacccatctctactaaaaataccaaaattagacgggtgttgtggtgcacgcctgtaatcccagctactcaggagactgaggcacacgagaattgcttgaacccaggaggtggaggctgcagtgagccaagatcttgccactgcattctagcctggatgacagagtgagactcgatctcaaaataataataattctatgctctgctcctgtgccttatcttctctccgagatgatgtcatgcttgcctttgatctccagtaaatcgtgttatttttccttacccctaagaaatttaaaggaaaaacaaatgatggtactagtgaaatcgagaaaatgaagaactccttctagagattcattttaaaatccttcaaacagacaacaaagcaattccactgagagattttgctgaaacgttgtttgcgcatcctcagttgttagtagggaatcggtagctggttggagagtcctttctgtgcctggtaattataggcccaagcaagcacacaatgagcttcagaggagccaggctgtggttttctcattaatagctctggtctagccatgggatcctggtttacttcataaggcctatgaaatgcacatttaaaaacaacatgcggtacttttttttttttttttaagaaacagtctcttgattctaaccttatactgagaagaatttcatttccagaatactgttgctaccactataattaataagcatactcactaattatgatcgtaattaaaaataaaataaaccagcagatatacaatggcgcagcctcttgtgtgtggcaccagtgtctgtgaatttgtattcggggtgggtgccacaagtcctggtgaggagaaaaaaaaataaaagcctgccaaaagagcctactaaattatccaacttttcaaggttgactgaatagcacagacaaatagtatgtctatagaacgtagtggtaattattgcatataagcaaaagttagattgcatttttttaaaaaagatgtgaatattccactctaagaaaatgaagtctttatttatacacccaggactgagaacactatttttcctgagtcctttccttttgctcctacagaaagatatatgcatgttcatttgtaagaagagaaattcattcaccagtaatcacttgacagcctaattctggtttgtttctcatctctcagtgttgtgcttgttccatcgaacactaaccaccaacttttacaccctctggagaagccatcaagagatttaaaaaataagtgcctggctgagatgagaaatgggcagggcagggctagcaagggtttccaatgggcttctaaattatctagttgtcactccaactggctcaattaattactgtctccccagaggagccagatgggtctccagaaaccagtctgcaattgaacatcaatgaaaagatccagagaaactttatcaaagcttccattaaccccctgctgatgtctttaaatagttttttttttttttttttttttcctttaaacaccttgaaaacccaaaagccatgcacaggacttatcttgcattaagagatcttaaatctacagggactaattgaaatgcctgtccatgtcactcaaatacatagagaattcttctgagtctcaacatccctgtggcatttttgtgatgtgggtatacaataagagggtatcctgtatattttcttcaggtaaagactggtgaggatgttttttagggtttacatgttaatctgtcaagataagcaaacctttggtctatctgtcagtattaaaaatatctctcttatttaatgaaccttcttctggtgtccacctttccacccgccacccccacaacctgtactcatgctttctcattctttgcttctgccaaaattagaaatgaaagaggttccccaggctcccctgaaacggcaatgataaaaacgagagatggtgccagtcagtgtggtcgcttgcctagtgaaccccttggcttcctcattgggaaatgtcactaatgattggttccataggtgagggctggcacccagagcactgtgggaatctggctgaatggtcatcaaaatgtccgcctatatagacacagagttgaagaaatcactcttagattccatttcttctttctctattctgacaaattggtaggcctgatctaaacgaactgtactgtggttctcctctgaccatcttttgggttttgttttgttatgaaaaagtacagggaccactccctgaaatctatctaaaatactttatgtgtaaaattatagagacacgaaatattttttctattactattctattcttgctgttactcttgggaggggcaaggggagaaaagataaagaactatggtccatccctttttgattcatatcttccagtacacaattttttcaggcagtttgtttatcactttcaaaaaaatccttttaataaaggctgtgggacagataagttttttaaaaattcttgtctaggaaccttttgtctgtgacatgtgcatacaaacaagacttaaatatgtagcttcaacttctcagtgggtgctaaatagtgacctgccaccaatagactcacagtgtgttccaagcttgggtaagatccatccattagcacaaacactgaaaagggggtagcttacaacggctccctggagaatttgtgtttttctagataacatactgcaagctggaaatctgcctcttgaatcaaccctaatttttttttttttttttttgtaaaataagtgcgtattttgagcataaacctgaagttaaataggagcacagtttcgttcatgtttctttttcaaagctaggaccacacatataaacaagccagggatttttaatatgtaaccagcagaaagcttgatcaagtgttctctatactctcaagtgtaattaaagacttctttttatctaaagataaagaaataagataaccaaagacttttattttatctgaaaattattgatgaggctcatgttgaaacccaatgaatctaatcccaatcctatagggttcccaggagggtgtggttttaggaaacttcttaggagacttggaaatccttggagctaacatcatctcatttctctccatttacagtaggagtagggttattattaaggtttgtgataaaggttcttattgttttgttttatattagaagcaaggagaacaactagcagagccttaccccctctgaaagtatccttttgtagccatgaacagtggacagaaaatttaagaagcatacactgtgtttacagccttcattgtacactccaatacagaacagtcaactaattcaggtgcggctccaaggggctggtaatatatttaagaaacccttatattatgtaaagatgtattgtttggggagaaatatcaatgagagccctttctatctcactgtaaactcttcaaggattcaccttaactgtacgtgtttgttggagggtagcattttctctttccctccacttctttttcctctacctatttcagaaaacacaaaaataatttccattaacttccaataacttcctccatagtgtgcaggagctttcctccagtgtctttcttagatatcatgctgtggaactatttctaggtaagatgcaattctaataaactcctccagtatttaggaatggactaaatactgacttctttgggtggagccagttatgctgaatttcacacttcagcaaattgagttcatgagagaggcccctgtgacatgctgtgaaccccctggttttctttctttcttcctttttttaaaaaaataaaaacaaaaacaaaaaacaagtcctaaaacagtaatagctttcgtaatacattctttattatttcttatgactacaaaagtcatctcaattctcaattctcaaacacagatccagttgaagatatctactgaccttaataacattttaaaatttaatagctcagttgtttctgccccattcttataatgcctatagaaatttaaactatctagcacatagaacttagtttctagctgatactctaaaaataaaaaataaaataaaaatacaattctagggttacagatttccaagcttaaaacctcttctcctaaatgattatcctgttcctaacctgtaccatagcttttgagaaaattgtcaaaaagacagattttcaaatatgaggtctgcaagaacataattgcatggccacattttcagagagcgtagcatgtggtgaccatttgtgtaagatgcattctcaaaatgttctgactgtaatttaacccaaaggtctctatcccacttctttccactcaccaggtgcttccttacacttgtctacatagcaagcaagaaacagggcaggaaagatttcttctttataaaaaaggttccctaaagtgatactttagggaaaagcaggttccctaaagtgatactttagggaaaagcagaggttccctaaagtgatactttagggaaaagcagaggttccctaaagtgatactaaaacccaccttctcagcattctatgggtcatgaatattgtcctcagaatattttgatcccctgtgtttggaacttccctagacttccatccagtagaaccaaactggcaataagaaacatgaggagtctcagaacttcaccccaatggccttcttcctgtttctctctctctctctctctctcccccccgccctttctctctctgtctctctcccctatttgtaacattctagtttatactgtccgtgatcatcacttctcagtccttagacattgtgctttaagccaagcaacacttggacttggaaaaattccaaatagcacagaacacattgatttacaactgaatttttaccaccatgtttcctctgactctctggccttgtcaggaatcattggtagcctatgatttcatgctataatttatactttgtcaatatgtgtcattttttcctctgttctgcctgtgtgttttaagtgcaacaagagaaagaaatagaagttgctaaaaaataatttcatagatctaaaggacagtggctggtaacaatgctaaagagcatctatcttcaatttatggtcaccatgacatgttttggagcagctcacgtgatctttttaaatgacgattaaaaaactaggtatcccattccaacagtatatctgatggagaattggatggcttggaagatgactaatgggattctggacctttctgtctttaggtcacctccttgaatggggactatatcataagtggtccaaggcccggccatttggcagccgtagaatgactatgttaatggaattggtctcagtccaggtcttagtcgacaggtgctcatatcataagtgacgtttattgactcccaactctttcaacttggaagacagtggaccatcactgagatagtgatgaagacggagtaatttataatatattcaggctccattgaaagccaaggaattcagccccttgagctggcaccttgcaaatattgtacttgtctcatgggttctgttagtttgagaaataaaaaatagaaatctaatttaaaaggatttctaataactcagaatagctaatgttggtttcctctgaggtcatatgagcctctcgtgttggtgcttttctcttcattgtgtattatagtgattagatattggctatgaaaattattacttttcatttgtttgtgtgtttggaggttgattacctagtcacttgtttataacaaaagctgtaaatgatactctttgacagagttaaataaggctatcttcatgcccttgtgaaatggaaattgatgaaaatgtaacactgagtaccttttatcaacataaatttcaaaacatggaattcagaaggattcatccaacacatactcttttctattatctggattaatatacctcacttcattcattcactctaatcaggttcatgacctgaagatgatttggcccctgttggaagagatcgttagtattactagtatattaatgttttgcccattgatgttttctgggttcatccactgactttttctttaacttcacagatgatttggatttccctatagcaagtggcaaagccacaacacttctgaattagttatcacacttaaaaagtcaagatgacaacaaccatagtggatctatttattgaagcagacaggctcttttagcggaatgatcaatgtcttacctctttctgaaaggcttttcagaggtaggaaatcatcaagcatctgatataaagtaatgaacaaggcttttgattggtcaagtttctggagcaggcttttaagtatttctgcctgtaaatgtagaaatctgagtgtgaaaagtaaaggcaacagcaaagatttactgggtgcatctatcaccctggcttttagagtctttgtgattaatacctgtttaattggggactgatctagatgctttggacgtcagaaagctaaatgttacagcattgtctcatgggttcctaacacagcaggacgattagcagctgtctgagtaacaaagagaacctgaagcctacaagcttagctttttattttccagatttggaatgcttgaagctccctggtggagttaacagcaaaaggaatagaagccttgatgcatagcagctaatcctttcctttctcttttctgtattctgctcagtaaaaatgaaccttttccttacattgttctccatattccaaattaattttggagagcattttttttgttggttatttgtttaaaaaataattttggggggccttttttttttcctctgatcttccctaggaagtgattggagggcattgtaggtcatggagacccccatttggtgaaggttcaccatcctgtctaaccaagttacacataaaataatttcaactaagagtggaaacactagataactgtcaacactacttttaggcccagtgagaagattcatctcactagaagcattcagagaaaaaaatgtatatttattttttgttgttgttgctagtttcaccccattttcttaccttaaaacaatcatcttgctcaggcaaattcttctaaactgccttccagtggaaagacttgttttcctgtttgcctcaaactggcattcttacttataacaggaaacacacacattgaatcctgccatgtttctgttggcaagtgttgagctatccttgtcagaacctgccaacaaatttcttagtaagcaagtagaaagtaaaacaagcagctcccagacgaaacacaggacacacttgaactgcagcaaagacacttgggtgcccctgaggttagttccctgctaattctggtggacatgggccttggtttccagttgagctgttacccacttataattttataaccgatcctatgactgtacctgtaataatgctaattcaagatactagctaacttgtaaaacagacattaaagtaatgcattttatttactacaaagagtaaggattgctgtatgtttcagtataatgattaaaaagttgcaaaagctctaatttgcaaaaccttacatctttcatgacatctttagggcttaacccaggaggtatactaaatattgtgtttggatctttctagtaataagtatgatacttcctttttaatactcctaacatttgtgtttgttttataacctttttattgtgaaatatacacgtatggaaaagtgggcaagattcgaatgtatagtcattgaattatagcaaagtaaacacctatgtgaccgtcacccaggccaaggaacagaacaatagaacattgccagtcttccagaggcttgtcttgtatccttaccccttctctaattccaaagactaattattttatttggtaattgaatttgttttgttttattcttgtcttagctctttagattagttcaaatgtgagttcattctgcaccaaaagttttaaggtttgtctgtgagcagggatcatatcgaacttacccctgggtttctgacagccgacaatgtacacagatacccctgtacctaacagagcagactttagaaagatttacgttgttgctgctgccgctactgctgtgggaaaacagtcacttaaaccttcaagtctcctatttcttaccatggaaaggaggggcagagatcagccgctttctgtagatcagtggttgagaatgagggctctaggaccagatttttgaattatgaccacatataagctataacttggagcaagttattcaaactctctgtaccttatcttcttgatctataaaaatgaggataataatagtacctgtctcatagagtttttgtgaggtttacatgaattaagtcctgcaagagatttagaacaatgctcagcacatcataattactcaataaatgctagtttcgtgtgtatgttgttacagacatgtggcatagagggaggatcacatacttttgagccaggtggacttgagttttaaatctcattttatggctttggtcaaattatttaatttctttgtacctgagtttccaagtctgaaatgtaagggtgatcattataactacttcagagagttatagggatgaaatgatgtcaggtgtgcgtgtatgtgcaagtgccttgcccaggagtttactggcatctgatttgctcctttccccattctttgttttgtggcaattcacagggcctcagttttcatctgcttaagcagttaataattcagtgaaaactaaattaactcttttctacaaagaaaactcaaccaaaccattttgagaaccccaatgtgttttcccatttagcattagcataagatcagctgaatcttttggctcagtgttttgcgattctgccgatttcattcactgttagaagactagtggccgtgattgtggccgtgattttgtccgtgggaagccacgcggcctctgtcactggctttgctgacctcagggcagcgcattccagtttctcacaaatgggtggatatctgctcatcgtgcatgaccagctggagtttccgggagggaacccaaaggcctttcaggaagctgcaaaaccacagaccaatcttctgtgggccacagtacttctacagtttatctgagttagttgtgatatgcaaatacctcttttttgccagaaggctccacttcacttgaatgagtacctgttttaaccccaaatgccagttcaatgggttattgcaatagaaatttattttcttgctgaaatcgcatccagttggtggtgatgggggttgttgggtgtggggcttccaagatgggcctgggtcattaacctccctctggcttgtgggttcaagaaaatggagagtcacagggagctatttatgggccagatctagaagaggggaaatcacttcaacccacattccattacccaaaactcagtcacatgaactaccgtagatacaaaggaatctaggaaggtagtctttggctgggcagctctatctagaagggaagggatctcacagttttggatgccttagccaaagaggccaacccaacaccttcaacttccctatgcaaacaattaacgtgaaggctaagaatagcatcacattctatcatttaaaatttaaccaatagctctctgtaaaggatttgttgaaaataatccgttgcccatctctctggcataaagaaaatgacgtgccctcccatctatctgggaaataaaaaaggcttataaaattttcgtcttctattaaaccaaaagtaaaaaccaaatcacagactttgcaaagtcttactctggaatcatttagttcaagtatttatagtgttccaaaatcagactcttaaaatcattggcagcatgagtcaattgtatccttcagtaaatattgctgaaggataatgtggctgtgcactgctttattttatagtatgtgtttaaaatagactctggtctgaccttggaaatcactttatggaaaaaaaaaatgcatctctcatacattctaaatttaagcttaataaatatgaatacttacatatctaaatataaatgaacttcatttaattcacagtcttctgaagattttggctgagaatttggttctatgtttttgtgtcaaataaggagaaaaatcaatgtcaatttcagaataatcaagttgtttttctgtaccttttgccggtttgttttaaaaagtttcactttttgactatgagaaactgtgcttgtgtggatgcatgatgtagcaactaaaagctgttgggggtggagctgactttttactttgatgatgagtccagcgagggtggttggggattttaatgattttacctaaaagatggcagaggagttgacctggctggtcgaatgtaccgcaaacaaaatcatgtgtatgtgaaagcactttataaactcttgtactataaaatactgtaatgatgatagtaagaaaaaggacgtataaatattgctaagtgatgtttgatgccataggtattgcctagcttgagaggaggaatccttctctccatctggaatgtagaagaaaacaattaatattagcaccagagctcttagcatctcagagacgcgaaacccttaatcacaaggatatcattagtgctctgaagcatttaattctgatgcttgacagcattttaaaatgcacaaacctttgataagaagcaaatcagagctggggtattgaattgagaaagaaatgggaacaaaaaccaccttaagctccaagtaattaaatttaaatatgctatttgcattaagcagagatatgtataaatggtgggtttatatttttctatcaatgaaagaccccttgagtaaatatcatctgtttaaatccagatcctggggaggggaaaggtaaccctgctgtggttaagaagccatctctcctgcaaacactggccattgtgtaccactgacatccatggcttcaggtgtcttgactttcataaagggctgttttcactcctccttgcccacaggctggagacctttcattgcatctgtttatttcctagctcacctcctccaccctctaatttgaaccagtaatgaaatgcagtcagcctacttcagctgttttctttttcctccaaagttccccccaaactgtttttaattcactgcttgtgatactggactcaagaaaacaattttctagctcaggaaccatgtgaagctttcctctctttcttttctccgtatctcctcttctcttctccatcccatttgggtgtcacaaggaccaaactgctgcagtaaaatgacttgtaggtgtttaatggcaagtcattgaggaagtgaataaaagaaaattgcagcattcacgtcagtggggagcaaggagaactgctgagctttgaaccaaagaaagttaaatttaccattttcttaaagggagccacctctgtttgacatcaaagcatctcctgtaatttctccttgtgaaatgcaccactgttagagagtcatgatagagccccctaatctgtgctgtttctgtttatcaaaaacacacacagagagaaaacccacatgtaccttctcagtgcattgtggtctgctctcaaaccaaatgtaaccacaggtacatagcaaatggggattctatttcgaaagcattctcagtttctcagggatttgtagaactgggaatacaacattctttgggagtgaaatttatcttggacctctattggaaagctcagatcattcaactggaaagctttggtgaattttttcctttcctcctcttttggtttttgcttcatcgttttttaaaaatggtattttgctacaatttcacttgtgtccatttggtatgtggaaaaacagagtctgttcctaataatgctgctcgcccacactatgactgcaaagggctctccaccctattacccccatgtttcaagtttatgtccattggtggctgttgcatatgtagtaactaatggcttctgctggcagtgactggctttgccctagtccatctttggaggcttaggatcctttctggatttatcattatgacttgggagtctcaccatcactccaccttggcagttaagaagtcaggagaactatttgcatatgccctacagatacagaggagaaatgcagagcaaattgtcaacaccttcatcagcctaaagagcagaagctcaaaatgctgtctgtaacaggtgcagtgatgcctagttttaatgttaacttacatttgaatgacattttacagcctgtgtttgaaaaatgttcagaagcatcacacagaccttagaaacagagactccatttataattagagttgtcatttgcttcaccccaattgtcaatatctcagttaacctaaatagtaaaaccaaccccacaaaaggtcctttgaaacaggtgcagatggaaagttgttttaaggatggcttacttctggtactttatgtttagaaaatgtttgatatctacagtaaagattttttagataaattttaatatgtaaaaacttttattcatttgacataattattgagcaccactgaatgcatgtgtcaccatgatttgtaggttaaaaagaagaagaaatgagagacaagttttgggttaaaaactgctgaaatctccttaggggtaataaaaaatgatggtctcggggataggcaccttagaccaggaaaattgacatctatgagtcattggagattttgctgtaaaggtttgaaaattaaggactccattgaattaaatcacacatcttttttaaagagctaccctttaggagtgcttgccttatgatttttacatagtcatctttctttaaccatgctactgtcaactagcatgaccagctctcattgctatgtgtcatgtctgaattctagccattaaagaatgcctgcatttgtctggaggcacaaaactgtccttaaaacaagtatctcctctatgaaagaagtccgtgggtagataggaatgcttttcaatctatgatgcatctctttcttgtagtaagaatgtaaaaaaaaaaaaaaaagaatgtgttcatcagccccccagcttcttcctggctttgcttctgacactcagcaggtgtattgagtgtctacagatagaatgtgtgagaaagtgccctctacttactcctccccatcacccatgagagaacttgaattagaagaggggcagtaggaatcgtctcctcttaaattctagaaaaatgggccctctgacttgacattagaaagtgttttttctttaagactactataaaaatttcccaatagttcttttagttaagaagaggctaaagtatttggtggtacttagtctgataccaacaattattttctatctggccatgcttacccattccccctctcggccttgttccataggtgctcattaagtatgtgtctagtggccgagttgatgttgaggaagaaccttgtctctatgagatttcagaatgtaaatcaaagaactgagcagccactgagaatctttttttccacttggtctttttatgctgaccaaattttctactatgattagaaactctcttttgaacttaggcattgattggtcagagctcttattgaaccatatatttaagggtgggatgtacaatctttttaaaaaaattctattatctcctcttctaattctgtaagcaaaaggcagagccctggaatattgcaaatcaggattcaagacatttgggttaggcattgtttaccaaagtgtggaaacataccaatggtggcatcagagatgattttagggaacacaccgatgagatattatgtaatattgaattgccctgtgtacagtatagttcattttcaattctttctcagtaattctgagtactccaaggtcagaatctcaagcgggtgcccatatatcctttgtttctctagcactggctaatctccatttttaacaatccttggagaagtaagagtgtccagcaaacattgataacattgttttatttacatgcaatgttcatttaatttcaagtaattatagggtttcattgataccagtaaatgggaaatttctttcaaatacaactgttgaagttaaagatactgcatttattaaagaaaatattacttaaatcatcttacaagctgcagagggatgtggcagcaaatgtgtggcatggaagtctgatgcttgggaaacactgcggtagggggaaaattgcaaaatgtcattggcaaatgcctcatctagggaaatgacccataggcaggcacacacagtagggtgatgccttctagatgtaaagttgaaggctgttttggaaatggggtagaaagggtgagggaaaagcccatatgtggcttatgatgtggagaacatccaggttgcctcctttccaaagtggcagtatggcaaagcccagattttctcaaactccttcttactagagaaggtaagctctccacatacaatgcagttgtatgttttaggtacatttcccaacctcacttggtcatggattgcttgtgtcattgtgccctgataacatgctcttctgaagaacatctgatcaataaagaatttagactttgcagccatacaacacaatactttttgtgaattagatctatgtattctacttttccttggttgaattgatctctccagtaggtatgaaagacaaatgtcaactcagcagttttctgactgtcctcagcctagcattctattttcatttaatccttcgttcttgcttgcatttctctttcagtctctccttattctccatttttatgacagctgtgtcaaggtacactctgttggtttattttcacatttatgcatatcagcttcccaagtagggctgcattagaaatactctatgagttaacgtgattatattgctaactccctgcttgagattttttgagcaccttagttgagttcatattccctttaaatggtcacaggaacacagctactcaaacttctaaaatagaaatcaagctcatttcccatatgcagcagtttaatgataacccaaccagagagaagctgtcttagttcatcagtgcactccaagggcaggcaggcaattctttctcaaggaatctgtcgattatcaggatctgaccaagaccatttccgagagaaagttcattttataattttatgatttttctccctcctgctttctttctaatgacctcacttttctgtttcatttctcaatcctgaacatcagaatttaaagagctcctttttatggagtgtatgctaagtggtctgttaggcaatatatttattacctggagtgaaatgactttccacagccaggcagttttcttagcctccttgctacctctatattttacaaagtcactttttgcattttgttggacaatggctttgtgtcaaccaggaaagaaagagtaaatgtgagtgtgtgtgtatgtgtgtgtgtgcctgtgtgtgtgttgggagaagggggccttaatgaatgtaatgagcacatttccgtttttcattttcctcagatgttcagtggcttccatatgtctgccgcatgcagctttgttcactggggttggtattactaaccttgggattgcctttgatggaggacatgtgtatctactgtatctttcccttgtgtttttgcctgagatccaatctggaatagctttgggactgagagagaggaaaaaaaaatagaggggtgtgtgtgtgtgtgtgtgtgcgcctgttaccatccctaacagagatgctgggctgtcaaataaccccctccaggagacagtctctaccgtactggatttagctggaagactcccttgtgtgactatggtgtgtctgcttggcttccctgccatcagtatactcgtcagacatggtcaagcaggtttgaagcttttcccataccattttcagtgacaatgtatttcactttttatctttgttccttggagttaggggttggcattcatacgcatgtattgcaaaagggcaggaggatgacccagcactaatttatccttcctcagtggccagtttttgacatttgtttccccagtttgggaataaaagaatatatacattggagttaggaagctccctaatctctggttctccagggcagctttgttagataagattaaggatttcatgaatgctttctcttctccctggagattgtgcatgggtaccagccattgtcagtgtcagcagagcctgataacagctggctggagatgcgaccactgcagcggagaagtgagcatcgggcagcctgggtgtataaatctaaagtgtgccctccttccacccccataacacacccactagagggctgcctttgtgtccttcgcagtggaaagagcaggcaaaggcaacatgtcagctcttgtaaaatagctgcaaaatgccacgcatgttcagagagaccagcactgcttgatttgtattcactatttacatggttgtgttcagactgaactcttactgtgattaagcagtacttttatttatattggaaagtatgtaaattgtttcccttttggcattccctacagtacttattgaagacttgtacattctcttgcttgcatgaaattaaagtccagtaagatggcactcataatactgggaggtaggattagatgtagctttactgagcttaaaatgaggtcttccaaaggctgttatggcttacaaaaggttaaaaaccagacagccttctctgtacctacagccttttatgagaaatgtctctacgtgctgtggaaatggtactacaggcctgtgagcccactaggcttttacttcagagattctctttttaagacaaacacatgcaaaaatatactggagagaaggatgaaaatgatatgcttctatactgaagagtaaaatggtcaagggggagacaagacaatctttcacacttttcttaaataagatgaaattatttctggctaccaccaaaaccatttattttcctaaagaaaatatcttttgtcttttgtttttttctaacagcaccatcatccattgctttggtccaggctaaagaagtcacaagatacagtgtggcactggcttggctggaaccagatcggcccaatggggtaatcctggaatatgaagtcaagtattatgagaaggtattacttgagtgaacaacactcctttcctttcttccttccttccttccttctttgttttcttctttcctttctccttccctccctccctccctctcttcttttcttccttctttcctcgactccttcccatcctcctttgctccctcccttctgtttaagggttagccagttgtaagtcatggaataccagtgaatcctcaaatcaaatgcattttgcttcccaattaagtatgattatgaaatttatcatttacttagttatcctgaaaagtagaaaataacaataatgataatacattgtattgtaatataactatatctttactttctagtaatggaaatcaagatagctaagaagttctaatctatgaaccttctatcagggagagtgactcataacagttgaaataatgatctgtttaagtagatcactgctattcagaataaagatgtgggttttgatgacttttaatagaaagtcagggaaggaaaatcacattcttcagcctcttaaagttatagaaaggcattatttttacaaataacttgtctctcttacaggacagaattttgaagagagctatttgcattcaaggttgtctagaaaatgaacagttgtcttctttttctttttaaagataatcacttattggcttccttattaaaagtagaaaagggacaggattttcccattgaaaccatgttacaacacattttacattttctagacagaaaatagaaaaagataagggaccttctcacagttatttcttttaaattgctgggtgtggaactagaaaagccaccaaccatcatttaatgttcctttcaaaaaaaaagagtaggaggaaagatctggatatggtcagcgtcaataacaatcatacctgaatttgcatttctttcaacaagtaagaagtaacaatagtacttataacatccaagagaatacaggctccagagagtttattcatctccatttactttcagtttctgagttgactggcttgactcctttaatattgcacctagtaagtaagcaggagatttattttgccaccttccccaattttatcttgccatgatgtaggatcagaatgagcgaagctatcgtatagttcggacagctgccaggaacacagatatcaaaggcctgaaccctctcacttcctatgttttccacgtgcgagccaggacagcagctggctatggagacttcagtgagcccttggaggttacaaccaacacaggtaacaaggaccacccagactcagtcacttctgaggctatttttataatacagctgaatcccattacagtgaaatctaaggagttgtctgtaatttttggttcagcagacattttgctgcaatgaatatgtcttgaaataagttagccaatgtctgtaacttagaaaacttcatgtgatttagagaaaagcattttcgaaatactgatttgtcttttcctatgaatgaaaaatgttgcctatttttctcttgttttgagccttctagaaagcatgaaaaatgggattactaaactgacaaattgagggttacatagctaccctacattaatatagggaattttctccctgagaagattaaagaaggcgccaaaaatattttttacctacttatttttaagaatcatttaaatcaagttacataagcttttttttttttttaaagaccctttggacaaacatatcaaatctttaagcattgcgagttggattgactggttgactaaatttaaagtgcttaagaggggtctacccatgaacaagcattagtgtcagatacctccatcccggtaatcaatgaacccaaattgggcatgtttgataaaaagatgatagatttttgacttcaagaaagaaattttgttcacaaattattaaataagaataaaaggaaaagcagaagagaaagtagagttgaatctgaaggggattgacatcctttgaaattatccagcaagggtacaaggaggaagtggcttttgaactaggcaaaaataggcaggtttttgatagctctcggggaaggaggtacattcaaaactgctgccctttctgaaatgttcaagtgtctttctctctccaagtggcttcagaacactgaaaactgtgacccattcagaagttctacctcctaagactttcccaaaggtgacccttatgcaattgtcattcccagtgccttcccggatcattggagatggggctaactccacagtccttctggtctctgtctcgggcagtgtggtgctggtggtaattctcattgcagcttttgtcatcagccggaggtaagcactgaagccactcactgtgcagcccccgaccttcccagtgtttatgatggtttttttctcttccacacaaagctaaggcttttgattgcgtcataaacttggcatctgcatcccaagtttcctccttgttgctttgatcttcccacacccctaccaaagctgctagctgtaccctggtggcaggctgagaggtccggaaggacccagctaattgtaggaaacaaagctgaagagcaagccagtgggagatttctagatgctttaagctgccaggtgttacgtttatccctctcttaagcctggactcactgccaaaggcaagaaaaagccctataaaacttgggccccaattttgagctctgccatttgccagctactactacataaacctttttgagtctttatttctattctgtaaaatagagataattattatctgcctcaaagggttattgacaggagaattttgatacacaaaatagataatacagcacacaggaggtgcttcagcatgattttggttaacagtaatggtcactaaagcaaagaaatgggtacttcacactcagtcttcccccaggaaaagccatcagcatttccagacaatcaagggatttctagagattatcccttgagcaaatctcgggcatggcattgtcttggaaatgaacctgaaacatctgagcccttatcctctaagtacttacaatctgacttgatacttaaaaaataacctaaaaaggagagagaaataacaacagattggcagcatcttcttttgaaccagtttttcttactgtttttgtctccatttactcactcccatcgtctgcccagaggctccagaggagtagtcattgatatgtgccccacatctgggccttctttgtctttgatgtgtaagaatctgcctcttccctgatcggcatccccatataccatcaactgtttcacaagatggggctgttggtgaaaaaaagggctaagcctggggatgtcaaaaggatcctcttaaatgtaaagcttttcattctctagaagagggaagtagtcctaggaaagaagtaattcttgcccaagtttgtcgcattgccatagtggtaggctgagctgcttctggccccaccagtagctgtgcttggccctcaggccagtgtctgttgcattgtccctctctgcctactgatgatctcaccaatgtcatagcaatgcctttggctatttccactggcctgggcaagccactatgcttttactttcctctgatatacattataattagagtggtgaccatataatctagtttgcctggatggtcccagttggtacatgtatttatttaatttattaatttttttctgagacggagtcttgctctgtcgcccaggctggaagtacagtggcatgatctcgggtcactacaacgtctgcctcctgggttcaagcaattctcctgtctcaccctcctgagtagctgggattacaggcacacgccaccacacctggcagctaatttttgtatttttagtagagacacggtttcaccatgttggccaggctggtctcaaactcctgacctcaagtgatccgcctgcctcggcctcccaaagtgctgggattacaggcatgagccaccatgtccggccatgtatttcttaatatcatgctcccatcctcactctctaaagtgtcctggtatacagggaccaattatgttcactctaacataacacagtatagaaaaacacgttctgtacaggcatctgttttacaccgtgttcattgcttttcatgcacaatctatgaataggtatgtttgattagagtgatgagtcaaatcttgagatgttaaatccacaataaattctcatttctgtttctttaatacacacacatacaaaaacatatagacattggcatgccctctatattctaaacagcagaatatctcaacctttggaaacttaaggttgacctgcatagattttgaattcccactgttctttccttccctggtatttgattttgaaagccaatcaagatggccctctttcttgtacattgccatttagttttgtatatgtacgcatgctgtgcatataaccaccgggaactgtaatatccatctgatggtgggaagcaaggagcatgtgggggagtgtataggaattatatgtgcttttttgattttataattacatatttctatgtctgaaatgttcacagtatacagaaataatcttggttgttagaaaataaagatgtttaaaggtttaaaaacagatacaattcatgaaatacctccacctctaaaaatatttgataaaaattcagcaccctaggatgctcagagcacttctctgcagaaagtaggccttgccttgtgtcttgaccatctctttgacttgactggaaacattctctagttgtagtccagctttgctttagatttactttgcttttttgttttttggtataagtggccctaaatacagcagtcaaactggagtaatgagaaataagttacctcattgtaagtttcctttggatgttctgcttaaaacattggctttgatgaaaagaaaggaaaaacacatgaaaatgtaatgcggggagacaagtttattaaaagccgtgactacggaaaatagcatccttaagcttgatgacttaatttcctctctgcttttattgatcactttattatataaggcaggattgatagcaggatgcatcggatttccaattatgagtccccaccttagagaattgagcctgtcgagttacctagcgatgattcctgtcccttctcccccattaaaaaaaaaatgtcacttcccaaggctgataaacagtgcttggtgattggtcctcaatggatcactttttagaaaatgaaatgtcaaccccttgccctcatattgattcttctttagtgtcggccgtaaagctgtcatgggaaaggccgcccggagccaggtagctgacaggcttgcagcggctcatgcacactcagccaattcttctcctcacgcaggttgtctgctctgttatcttggactataaatgtttaaatgggacaagaacaggtgaacagagaggagacaggtagtggggatgaaagcctggctggcccaggcttttcgtgagaggacaaatgaaaggtggtacatggtactggcgaaataatcttgccagacttcagccagtagtatgagaaagcaacagattaaacaccctagcctatgaaatctgagtcatgtcctttgacgatggggctgctttgtgcttcttagaatcactaaatgtttatgctggaatggatgctacagatagatcccttatgggggtccccttgaactgactcccactctgctgatggcatgcaagattcctaaggaagtcaatggacagaaactcacgtagtgagaaagtttcagtccttctgatgacctcagagagaaaattgtcttggtgctaatttgtcatttaagaaagaggaagcagcctcaggctcacagttggtatcttgctagattttttttatagcaattgtttcatttatttcattgtacacatgcagcttatagggagaagcctgagcctaaggcaagccagaataatctacacttttttcagcgagatctacttttttcttttggccaaatggaacatgtaagcatttagggatcgcggtgaaagaatcaaactactaaatttataaaatacctaaaatgagatgttatactaggcacattgatttagctatattgtatatttttaccacccacatttatgttaagcaacttaattttatattttctgtaggcatctttgatctgtgtctttctcatcactcaagatataatttcagaattctttcagctttccagagcacataattgtacttgttatctaggttagtttaaggcagaacacttcttgtacctatatgatgctgtccctataaattttatttcaaaccacaaacaaatctctatttgtacattctctccagcaaatcaacatttccacatgtatatatttatatatttgtgatctccacaacataaccacttttctatattgtttttttaaaatgatctttaaaaggactgttcacagtgacatcctaaaatacaattataaggtcataacctccaagactaatgactgaatctatgctaattttctctgacaccctcttcccttttatagtaatgatttcatcaggttatctccaaaagcatcacaaactagtattaattcagattattttagggcagtgttttttccaaaacagtattaccgtattgattgattgattgagacagagtctcactctgttgcccaggctggcatgcaataactcagtctcagctcactgagacctccgcctcatgggttcaagtgattctcatgcctcagcctcacaagtagctgggattacaggcatgtactaccacacccagctaatttttgtatgtgtagtagagacagggtttcaccatgttggccaggctggtctcaaacccctgacctcaagtgaactgcccacctcggcctcccagagtgctgggattacaggcgtgagctaccacacccggccccaaaacagtattttattattcaaatgtgaaaaacaattttaagaaaagtctagaatacaagaatagcccctatttcttaaaggataacttggtagtgagggaaagtattactgataaccaggcacatgctgtttttatacgaaccttctaatgattgctagtgacagtgggtttccatttatgttagggttataaagtaccccttttacctggataaggaaaaagaagtgaattgattttaagaaaaaaatgaagtggttatggcaaaatttatatatatatattaggtactggaggcctaaagagattaaacaaataaacgaaggtcacatggtgagttagttgctgatcaggacaggaattcagctctcctgacttccaatactgggatagatatattattttaatatcttcttaactgacaaagttgacctacataaaaaagctgacattggcagttctatggaaccaaagcttcaagactctgctagtgatgttggtaagatttgtaatctgtgaattaatatgcaaatctgttgcacaatataaagtcagagtttgcaagttaattttctcctcctattgaaggttaagatattccactttggagctaagagttcacacaatgctgaaacagttatggttcagcctgtgctaccacacctggttaatttttgtatttttaatagagatggggtttcaccatgttggccaggctggtcgcgaacccctgacctcaggtggtccgcctgggccctaatttccttccctggaatattacaatcatgtgaaaatgaaaacacttaaatgttagcctaattcagctctgatgaagtcatgtaaattcacacaagtgggggcagatgatacctcgggaacatttctaaacaacttgcgtgcaaccatttcaacatgctactcatgaacaccatttagacatcattcggtgcaagaataatgacagcttaaagaaggagaaaaagaatggctgctgtgaatcttcatgggtgatgccgttcagtgctggaaagggacctcctggagccatgctagttacgttgctttatttttaatatgcactttagctgaataaattacttaccttttactaattagttttggaacagtgaaccacatcaatcaaatctgtccacttgaccagaaaagttagtaatttagtaaaagcatggtttatgctgggcccctgccttgctccccgtctctattttgtttgttatattgaatagtcaaggtgccaggaacagcacgttggttgagagggctcacgctgttctgcaacaatgtctgctaatacccttattaccatgtcccttggactgcaggagggcttagttcacactctttcaaagtttcacctgcaatgtgggctcttttctccaactcctgcggctgaaagggtccatgtttccttctggagcattcactaacaaaacactccactccttcccagttttaatcagcttgtccacatctctgtaattagaaaaccttcaacaaagttttccttctgtcattcaagtgatcagcctgagatgtcagttttgagttaggacttcttcaggcagtgtggcttcctgcaggctggctgccccagtggtgaacttcaatgggctttctttcctgggatgataatgggccacactgtcctacactgagccaaggcaaaagggccatcaggtgttaaaggtagaacaggacacaggcatttttgttttccaggtatttctaaaaagcaaacagactactattagcctttcaacagtaatccttgtggttttttttcagccatttcctgcagtcttaagggtcctctcctccaaataacactccacgtaaaaaaatctcatttaaaaacacaccttcaccactaatttaattcctccttctatgtttagaagtctgaggaagggatgggcgtgtcaaccttataattaatgacccctgtcattttgtatttcctctggctttgcacatatttaatgaatgtgcttgatgtaaaacagataaacgctttcccgggcagcttcaggccatgggtttctatggtatattccaggtttttgtttcattgacaattttaagttggtaccaaagctttctcactctatgcatttgtttttccttcttcaaaggaaagaaattcaaatcagtgttcgagatcttaagtggtttaaaagagatacttgtaattttagataatgcttttaggagctctgataagacacaatgtttcaggctggcaggaccctatcactcccttgggaccaatcgatggcattttcctgacataaaatgttattttagtagtccctgacctaacactcttatattcctttaaaagaagggaaaggacgggggtggagggagaggaagaagattggaggagacttcatcttttatagaaagttgtttggcttcagggtatttaaacctgtttagttacttcaatgaagcaatggattttaagagcaattgaattcactttaagtgaatgtactgatataaaacgtaatactacttataattaactctcaccaggtatccttatgtaactaatctccagtaagagaggctctatgaagtcgtgggctggatcagggctttcacaaagtcctgtacttgctaggagagcacgtggtgatcctcttgctccccaccccccaccccaccccagctccatgtcctcatctacagggaatctgagcatgtgtgtctgcctggttgctttcaaagggttgtcatgaagatgcaattaaataatagattctggctgggtgcggtggttcatgcctataatcccagcactttgggaggcctatgtgggcggattacttgaggtcaagagtttgagaccagcttggccaacatggtgaaaccctggctctactaaaaatacaaaattagccgagcatgggtggcgggtgcctataatcccagctactcaggaggctgaggcaggaggatcgcttgagccctagaggtggaggttgcagtgagctgagatcatagcactgcactccggcctgagcaacagagtgacactctgtctcaaaaaataataaattaaataaataaataaataaataaaaatagaccctttgaaaagttaaatgcaaaggaaaatgcaagcttatgatttgggactgaaatactgtacttcacagttagctgtagtcattggggtctctgttttgctaagttggttcctgctttgcaaacagttagggaaggagataatatatgagatgagagcactttgaaaagttaaatgcagtgtaaaagtgcaaggttttattatttgccagggaattatccccacggagaaacatctgtaggctctgagggtctgattgctgagctggttcttgcgctgctgacaattaggagaggaatgtgggagggaaggttggagcatgtgaccgggatccgctgcctctctggttgcactgcctggctcctttaggttctctgttattctctctttttcgtaatcatctgcctttctacctgttcaaagtttaagagttcagggtataggattttgacaggaccacactgccaagacacctggctttgcgggaatttttacttatctcagaccgtgtttctttttctgtaagagtcttgccttaccttgtctttgaagctctaagaaaacatagaatgtaaattccagtgtaaattgtacctttctgacagaaacataaatgtatacattttatttactaatttggtctcaacttcccaagctttagacagctgtgatatcaacggagttgactttctgattcctttaagtgatatatattctcctgactcactatgtatatatattcaagatttttgatttgcaaggcttgagttgattttccagtttgtataagagagatatatacatttctgattgaatatttatgtgtactgaagatttctaatccacaaagctttataacaaagccaaatttaggctattaaaagttgtaggagcagaatgccaggtttaagacaatgcaccattttactgaaagtgaattaggcaaagcaaaacaaagctcatttttacccttgctcatttttttacaaattagggaacataattcagtacaaagcaaatacttacttttaaacattttgttaataagttgggaatttgtatgcagcaactgaaaccagtgaccgcaaaagtattgtttcaagagtatcatgtaatatgataatgaagttttgtggtagtagttatctggttatagcaataatatttactattacctatcacatactgaacattactgccatttgatttacacagaattactcatggaaatttaatttagaatgtatatatacatatacacacatgtacatatatatacacatgtatatttatataaatggaaaaatagccaataaacttatcttcaataagataaattttctctgagagattttaaattataattatattataaaatatttgctttaacctattgtaagacacctcagtttaaaattgtggttcagaggtgtctgtgactgcttgagcttaaaaccatgactcactacccaggtgacaagtatttcatctcttgtaagtctcagttttctcatctctgaaatgtacatagcatacctgcctgacttacagtagcaaagaatttgtcttatggcatgtgttaaagcttaggtgtttgaggaaaataattctcttttttaaaaaaattttaatagacggagtaaatacagtaaagccaaacaagaagcggatgaagagaaacatttgaatcaaggtacaaaaaattggattaaaaaattctatttttagagcatgtcacacgttttctagtttaaacatgttcaaataatatttacgtggctattaatgttatataatataatatatttattccttatcccaataatgtacttcctaggtatcaaactgaaatgggtgatttggatggtgagattaaagatgtgggatgaggtagagaagtttctttagatttttactttttcttattttatcctctaccctaagaaagttatcagtctagctggctcattgttgtagctgggtggcaaaattaaatgggtattttttttaatctaagctggaaatttgaggaggaggaaaagaataagaaatgtaacagtaattgctacttcccagggaatggctatatgtgatatagaattagtgactgtcaataaatttttagtggattctaattttgatgttccaaagaggtcaaagaagacattaaaagtggctctagagtgacttaagcaaggtagaagacttttttttttttttttttttctgacggagtcttgctctgtcggccaggctggagtgcactggcatgatcttggctcactgcaagctccgcctccctggttcacaccattctcccacctcagcctcctgagtagctgggattacaggcacccgccacgacccccggctaatttttttgtacttttagtagagatgggatttcaccgtgttagccaggatggtctccatctcctgacctcgtgatccgcccgcctcggcctcccaaagcgctgggattacaggtgtgagccaccgcacccagccagtagaagacttttaaatggacagtggttggtgactatccaggagagctgtccactagaactttctgagataacattgttctatatctgcactgtccaaaatgtaagccaatagccacacaagctattgaatacttgaaatgtagctaatatgactgagaaagtgatttttaaatttaacttatttatatttagatagcctcatgtaacaagtcactcacatattagtgcagaaagatagaagaaagattggccgggcacagtggcttatgcctgtaatcctagcactttgggaggccaaggagggcagatcacttgagatctggagttcgagaccagcctagccaacatggcaaaactccgtctctacaaaaaataactaaattagccaggcatgataatgcacgcctgtaatcccagatactcaggaggctgaggcacgagaattgcttgaacccaggaggcggaggttgcagtgaaccaagatcctaccactgtactccagcctgagcgacacagccagactctgtctccagaaaaaaaaaaaaaaaaaaaaaaaaaaaagatagaaaaaaagagagggactgggaataacaagactcatcttgaagattttcttggctatagcatataaagtgatgagggatatgaagtgtctaacaactttccatttattcacctcgtttcctcctaaaatcatgttttttaaatttttacatggaatatatgtttttttaaaaagctgatctattaaaaagaagtagcaagaaattgccaatttaaggagcttattcctaaccaatggtgctgggatgaggacaagacctacaggcttggaaagtcgaagggactgggccaactggtgtccttcataccctctgtgccccagtgccccaacagctccaggagggagaggtgcaagtgccaggacaaagctttttacaatgacttctgcctcttggcccagatatctgtcactgggctgccggcaaacacatctaaatttagtttatgggtagtatgagatatggctgaatcatacttcctgatgtctaggctacaatgcttatctccagctgaaactttctggcaaacttgaatatcttagcttatgacaccttctttccaaaccagaaaagaagtgaggtccactacagagtctgtattctcaaatcaactagctgatattaaccttattgtctactttaacttaggtttaatctaattttgttaattgttggtcacatatttaattcatccagatattgggcaaaatgtgacaccatgtggaaagagctgtttgaaattaaaatgcttctatttccttccctaagggaggataactgaaagtagtgggtaggacttcatgcaaaggcaagggagctatgagcaactgcttgggacaatagtatttagctaacacaattcaaatttcctccatgggatgggttgttttaaaaatcttgtccttgaagtgtgaagacattccaggaagtcagtaaagctgcagcctcttaagtagctaacaatattttgtttacccactaatgaaaaccagagcaagaatttaaccattttcatatgtcaagaccgtacagctaacttgacttttcctatgtttggtaattttagacccagactatttatgtttattagtggttccttagaagtattcagccaacttatcatgtttatcactcaggtgtaagaacatatgtggacccctttacgtacgaagatcccaaccaagcagtgcgagagtttgccaaagaaattgacgcatcctgcattaagattgaaaaagttataggagttggtaagtgtctgagtgtccgtctgctaatgagtctgttttcttggtggatgttaaatatgtgtgtggattacataaatgcttttgtgagtatattatatgtgtgtatatacatgaaatttccttttttgagtataaaatatcatgtgttataaagaactctagtacaaattttgattttattcttagagagaaacttaatgcaatctgaaatcagattgattgcattcaaaagatttactctgtttcttactaactaagattttgtgtaggttttttgcattaagccttagttttctctaataaaatggggctaatagtagcatctacttcagggttgcatggaggattttgtgaaataatctatgcaaagcactagcaaacagcctggcgtgtaacaagcactcaaggaatgttagctgttattctttcatcttgaatgtgtttctggtccatcgtagattctttttctctctcaaaggtgaatttggtgaggtatgcagtgggcgtctcaaagtgcctggcaagagagagatctgtgtggctatcaagactctgaaagctggttatacagacaaacagaggagagacttcctgagtgaggccagcatcatgggacagtttgaccatccgaacatcattcacttggaaggcgtggtcactaaatgtacgtgggtcaccccctttacaaagccaagctagaagttactgggaaattaaacacacattttctttccagggaaatgacagatggcgcagacccactgattgctaataggaggaaatcagtgcaggacaagtcattaatcttgtagtcagctctaaatgggtctttggttttggctggataccctatctccaaggcagcttgtgtgagattttagagaaattaatattgcagatttgtggtatgccatgccatccttcagatatttgctaggccaaactgattgtcatagggtgggctcaagcagatggtaagcaaaataaaatttaagtacttttcctataaagcacaacaaaacctggccacaccttgtgctggaatctttggttccagatgcagagagtgaagcttgggaatcttgaatatattgcgggatttgcttgtctgctctgcctgatttatggctgttgcagttcagcacctatttacagtaacacctggttgaactttccttttttagtccattagcattcgctgagcctatgaaccacgcttcagttaaaatgcgacacagctcaacagatgcattttgtgaagcaaatcctgagtaaatctgtaaggctggctaagaccaacttataaagtgccacatagacagcacagctgaggcagtccctgtttaaggtggctgtgttccaagagccctcatacacactacagttactacaagtcaaggatctcataagcctggggctgtgtcccctggaaagccaaggcttttcttctttgattcaaggtgtctgtggaaagcatcttcagtcagcgtgtgcagagtaatggcaatatagccaccccagtgtgggggagcagtcggaggagggtaggttaaagagaaaaactgatgctgggtgtaatcactcatacctgtagtcttagctacttaggaggctgaggcaggaggatcacttgagcccaggagtttgaggctgcagttgagatgggtaagtttcctggacccctcgtgggacttgtaatggggtgtgacttgttttgcttggccaccgagctcaaacttcttgtaggagggggagcacacagtttagcacctgcaggagcctgggcgagtggttgccagtgacctctggagccccaggtgtatgttacaaataatgctcttttagcagttgtcatccacggatggctaagtgttaaccagctcagtggagagtcggggtgacagcctttttcaccctcccgtcttggtacctgggttcctgtctggtgtccaggaagaatcaggtcacatggacttgaaggatggtgaatgtgtaggttttattgggtgatggaggtggctctcagcgggatggggagctggaaaggggaaggaataggaagataatcttcccctggagtttgactattcctaaggtaatgcccacggtttccagtgttgaaggtggggcctttgcagggaaccaccctcttctacccagtatttccctgccgcctgtccatatcattcctagtgagctacgatagtaccactgcaccccagtccaggtgacagaggcacctggactctatttttttaatagaaacctgtctctacttaaaaaaaaaaaaaaaaagaaaagaaaagaaaaaatgagacattaggcctggggcaggtggctagtaggacacaaagtacaaaatctttaggaagaagaaatgaggtggttactaaaatgggagagaaagtacacactatacagttcaggggtcctcaaacataagaatcttctggaaagcttgttaggacagtttcttgggcctcctgctcagaggtttgattcagcaggtggtgtgcggcccgtaagtttggagtgcaagagagctcaccacaggtgaagccaatgctgctggtatgggaatcacgctttgagaaccattggcctggggacaaacgaccgcataccacctctgctgcttctaaagcttgtgaccttggactacttgttcaatctttctctttcagttttctcatctgtaaaatggaggtaaaaagagcatttgccttataaggttattttggggatgaaatagaatacttagagtggttaccacaatagcaaattttttcagaaaaaacctcgtacgtgttcagtggtgctattatgtcttaagaagtaggtacatctttccccatcttcagaatctttcaaaaaaaaaaaaaaaggaaccttggtgagaaggatatataattttccgcataaggtgaaggctataattagcatagaatagctctatttgctttttgagattagttttacagacaggatatttttctgttgcctgtggccttcagggccgcccagagcccttcactactttaattaaaagataacattccctttaaatacttttgcaggtccgttttctaaaaaggaggctctgttcagcttagggtgtttttcctgtcgcagacagtgattttcctagcacctctgcagaagagagaagaaacaggggatctttgtattaaagtcccaccgcgcctctaaaacacgtagctattacagctgtaactgttataaacgactggatgcatttgcataatgcagttgtcactgaattaaaatgatttaaaatttctattggagaagctattcccttcccccacccctttcctccccactgcatccctgcctactgcagggaaggagactcctctatccaagagcccagcccaggcctattttataagcccctttgcttatggagacattcatctttgtttcccttgtagagctcataaaggatctgacaaatggatacttttaataaacagaaaatggaatgcagaaaatttgtgaagatggtgccaagagtccgactagggaggtgtgagggtgaaagggtagagtggaagcgtgtgaattcattaccagcagttacttgagtaactttttaaattggcaggaggaccataaattctccgcatgaccctcacttttggatcctctcctgtcgtctccacagctccagagggatctggtgaaatgcaaggaggtgttaatgcacagccatgagaggctgccctttctcgttagttgacaaagtatcttttgattgaggcaggttgattaaaactcatttaggcacatttgttctgtcagaagactatggtcacaagctgggctcggtggctagtgcctggaatcccagctactcaagaggctgaggcaggaggatcccttgagcccaggagttcaaggctgcagtgagttatgatcatgtcactgtactctagcttgggccacagagccagaccctgtctcttaaaaaaaaaaaagaaaagaaaagaaattcacccaggcttgagtgcagtggcacgatcttggctcactgtaacctccgcctcctgggctcaagtgattctcctgtctcagcctcccgagtagctgggactacaggtgtgcaccactgcatccggcaatttttttttttttttttgagtagaaaaccctggtcacatatgtagagggtaaatgaatctgagaactaagcatttcctatttgtattgatagagaatgtgcagacacacccctgccagcgtagagaaaagacttaaaagtggttttatgcacctttggtctgcaccaagattcccactttttctaccagccttctttcctcacttgaaaataaaatgtccatggtaccattttctaatgcaaaagtgtttgcctctgagtaatttcttagacacaacaccaaaaactcaagcaatcaagaaatatcacaaattgatatattggacttcatggaattaaaaacccactcttcaacacttttgcccctaaggtgaaaaatttccccatgccctatatgccagaaattataagctgatggaatcactgggtggaaaatgtatttctttagaataattatgggtgcttttcagcggtgaaatagttcagcccatttttctagactgaagtctaaataatcagccaatgcagcaataaaaagtgtgattttttttatttttatttttttagaatgactctcactctgtcacccaggcttcagtgcagtggcatgatctcggctcactgcaacctctgcctcctgggctcaagtgattctcttgtctcagcctcccgagaagctgggactgcaagtgcgtactgcacccggcaaatttttgtatttttagtagacacgaggtttcaccatgttggctaggctggtctcaaaccccttgcctcaagtgacccacctgcctcggcctcccaaagtgctggaattgcaggtgtgagccaccgtgccctgccagtgtgaatatttttggtatatcaaactgacattttattttcttccaaaggaatattttagggacctgttttatcctgctcttagaaaaaacaaaacaaagcaaaaaaaaacacctcatgattcccaccctccacttgccaacaataaataccctttagaaagaaggaatttcagaccttgagcctattgcctgtgatcaagaaggtaaagaatggttcttatgtcctaaagtcctcagaaagcggacttttgtgaaaatcttatttacacctcattctgctcagagcttaaaatcatttttatttctttgcagaaaaaaaaaataggtagggggaatgggggaaataaggatgttctagtattgaatttaaattcctgtctcagatgaaataattttctgaacctttcctgtgactgttctggggtttttgtttgtttgttttttgaggtaggcagtttaaggaatcagaccaaagcaagtttattcatagctagggaaagtgaagagaaagacagaggccctgagctgagcaagacagtggagagaagtcgcatgcttgtttttttgtttgttttttgagacggagtctctgtatcgtcgccccccaggctggagtgtaatgacgcaatctcggctcactacaaccttggcctcccgagttcaagcaattctcctgcctcagcctcctgagtagctgggattacaggcgcctgccaccatgcttggcaaattttttttttttttttgtatttttagtagaaacggggtttcaccatgttggccaggcttgtctcgaactcctgacctgaggcaatccgactgtcttggcctcccaaagtgctgagattacaggcatgagccaccgaacccgcctgcgtgcttggttttaaggcttgtctgggtaaggaaggattcaacatagctactgctccctgaaacatggatttctctaaataaagaagtttattgcctattgacctccttagcttcttacaagtggctcttctgaggacaaaataaattaattatcctaaagattatttctgcattgaaacaggcctccccatttatcattttccccttttgcttgagagagcaattatccattcatatgctccctggataccagaggccactttagttaaagaccttgtcaacaagccacccaaaggtttaactatccagatggaatttaaacctactcgtccttttaatatttcattcctagctccccacagctgaggcataagcttggcttgttttaattaaattagatcacacaagacaggtatcttggcagtaaaattgtgcgcagcccatttttatctcattaagtgcagcgctcatcaaaggtttgtgtttttctttctgaaaactctaggtaaaccagtaatgatcataacagagtacatggagaatggctccttggatgcattcctcagggtatgtgactactttatattaaacccaagaatgttggtatttagaaaactcctaacagagtccttgtgtttgttgtgttcggtggtattcgtggatttcttttaatgggcaaagaaagaagaggagaaatggagaatgatgtgatttttaaggctattaaataatccatgttcaacgagggtagtttttgatttattcctgtaatgtggagctgttggagccgtagattcattacagttggataatttccatctatcacaggaagcaaacccagctcctagggtacagtctactagtgaattagcgactttggtcagaaaggcctggaaataatgttgagtttcattgcataccggatacagatacccaaaaagattcaagtaataaatgcttggtgagaattaacttggcctaatgctaatgagattgttcctcactccttttctatgcagaaaaatgatggcagatttacagtcattcagctggtgggcatgcttcgtggcattgggtctgggatgaagtatttatctgatatgagctatgtgcatcgtgatctggccgcacggaacatcctggtgaacagcaacttggtctgcaaagtgtctgattttggcatgtcccgagtgcttgaggatgatccggaagcagcttacaccaccagggtaagaaagatcggtgacatctgggctttcactctggtgaaactgttcctctcttctcactttgagattgaagccctttgtaatttttttattttttaagttttctcatcccttgaagcctcctcatattcctgcatccatttttaaaccatgtttccaataaaagagggattttgaagctgactgtagatgtatgaccatattaacagccacaaactagaagcaaaatgaattatctttccctctatgtttttttttgggagggcagggggaagaaagtgctaatgaacaataagacggtgtcttaaataaaaatgagctgagaagcaagcattaaggatcagtttacacaacaaatgatcaattactgagaaaatcaggaggtagcttcacttatttatttttttgcacttgtatttgcctgcctgtcttcctgcctctttcttcctttttttttttttgttgttgttttaggttttgtatttgccttttttctattctttaaaaaaaatccttattctaaatgagacaaagcaatgtttctagttggttggctaccaaatctcagaatgtatatacaggatttataaaacatttataccatgcaaggttttccagtatctaatggccttcattttaccactggtagataagcggggattaggacacagtgaagagttttaagtacacagttaatggctgtgctatcttagctcgactatctgaatataaaatactaatggaataaacacagaatcataaaacagttattggccattaacactgacactgttaaaatcaacacgaagctgacagttaccagccattttccccttttaacactcttcattttgcatctgcaatcccaagcaatgggggttttttgttgttggttggttggctgagctttttttggaggggggcaggggggtatagtattctatttctttggctccagttttgattcttatgcttgtcctcttttgaattccaagtccattcgtttagaaaagaatagatctttgtgaatgttgaagatcttttattttttcccagtagttggagaaagaaaagttaaaggaggcttctagaatgatacatttacatagataaaaccttagccaaatatttaagcaggggggaatgcagtacaagtgtccttctgtgcgtaacaaggatgaatgcaatacactgggttttcagagtttactgcaatgtatcaaagcaatttccagtacaatttattgtcctgtttcgtagccctacctaagaaagcaaagaaaccttttaaatgatagccctggggatacctcaggggtctgaattagacttgaattaatttccccaggtggaaccctaggacattgaaaacctgactgaaaataccttatacctaagcataaacaaacaagacatttgaggcagaaaaaaaagtgtgttttgcaacttttcctgggtaatattcacttgctttaccattttacaagtcttttttttttaatttaataacaactaatatcctgcccttactccattaaagtcattaatagctctagtatctggtattatttggctttctctaaaggcctatttatcatatcatcccctagctattggacatatttctcatgctgtataaggggaggtagacttgtgtgatggatagaaatgttcatatttaaattccttcattcatgatttttgaagcagtgtaagcattgccttcctttgtgctcctgggtgagagaatccaacaaaaaatcaaacaaatgtcagctacatatcactgataccccgtagataacacgtattttgtaaaacctgagatttctttttttctagaatattgccttaagcagagctcagataataggtaggctttaaaaacataattagattacttagtcacttccctgtgagtaaagaaaacataagagaactgtgttaacctggaagacttgcgttaaaatgaacaagtgtcttattgttttgagagctatctcaagaatgctgttgtcctgcttggctagcaggaactacattcagaatctaaaatggcacatcagtgatgtacttaaggaataacttatggctcaaatgttcacagggtggcaagattcctatccggtggactgcgccagaagcaattgcctatcgtaaattcacatcagcaagtgatgtatggagctatggaatcgttatgtgggaagtgatgtcgtacggggagaggccctattgggatatgtccaatcaagatgtaagtctctatgttctgaaatatattttttcacattgagattcaggaagttctgcattactgtatgatggagtgggcacggggtttgaaatgatacattaaactcaaatttcttaatacagatatatctagcaagctagttcaacattacaaccaatgactattgatttcaaggacaagaattaaatggcctacatggtacagtatgggagatagatacatacgcacatagattcatggataaaaaatatgggatagtatttttacttggtgaactttcaaaaccagagtaaaacaaaattaaactttgacttttaagaaaatgcaaagattatgaaaaaataaatttcacatatgataaaacggacatgaaaggcttattgaaagaaaactagtgaatattttaaagctggcatcgttgtaattagagctcaccccttgaggactctaaaataaagcttcactcaatgacccttggtaaattatgcacatccctttaaatgtaccatctggactacttcgtaagggagtatccacaatgactgcaatttcagaaaaggattcaataatgacactaataagattccagagtaatagaatttaattacaaacatctccagtgagaaagaaagaaaaaaaaataaaagaaagcattgatcaaggggtcttcctagaacacgttttagctaattctggaaaagtttacattagttctggtaagattgggaatcatattaaaattaaatggccacctatacttttcgaactttcctaattttttatgtatgtggtagtccattatcagagagtgtttacaaatgcaaggtattcagtttatcagttataattatattttggaaacttcttttcaaaaattctctctgtggtggaatgttacctatccatctgccttgtcttcctccaacaacaggcagttgcacagccttgacagttagagccacgtgcacttaagaaatgggatgcaggttgccttatcaattaaagaatgttcaatgcaggccgggccctgtggctcacgcctgtaatcccagcactttgggaggccgaggcgggtggatcacaaggtcaggagttcgagaccagcctgagcaacatggtgaaaccccgtctctactaaaaatacaaaaaattagccgggcatagtggtgggtgcctggaatcccagctactcaggaggctgaggcaggagaatcgctagaacctaagaggcagagattgcagtgagcagagatcacgccactgcactccagcctgggcgaaagagtaagactccgtctcaaaaaaaaaaaaaaaaaaaaaaaatacaaagatttgctgggcgtggtggtgtgcgcctgtagtcccagctactcgggacgctgaggtaggctaatcgcttgaacctgggaggcggaggttgcagtgagccaagatgacaccactgtaattcagcctgggccacagaatgagactctgtctcaaaaaaaaaaaaaaatgttcggtgcaatagagaaatgcactccatgtctggtggggcaaaaagaattctctatgctgaccaaccagattaaggggaatggtagtgttcacactgtattatctgtggattataacagaagattcatagcagatgggaagaaagcagctagcctaagtgatagtaattacaggttggaagaagactatggaggggaatagcatgtaatctattgtttatgtgattatgctgtgcagacagcttctagtagcttcttgtagccacatttggattcaggttagagactctcacagggacaaagacaaaaaacctaaatgagcaaatagtaaatgtagttactgtaattattcgatacttaagctttctttttcttccgttgaaatcatggccaaatgttcgtaagagcagagtatctaaagatgtcagtttttctaccctaaatatgttcagatctgtaattttggcagtttatatatatgtattttatatatatatacacacatatatataaaaaaacaatatatatatataaagaattctgttgttttgaactttcagttctctggctttatccacgaaaaggcatctgaagccatttcttgctcacaaataatattgatctattatttgtctctgtgttggattctatgtagaacaggaatcaataggaaatgtatctggggaattactttgatgcatagaattaatttggcatatggtaaatggagtgaaagtaactgttgaaaatatgtcaaacttagcaagttttttgtttagtttaatcctctgccccccaaaatatttagtagtaaactgagaaaatatgctttgctaacctatgagccatcttccaagctggcagtggatagggagcttatgaaagagcattaatcagtctgaggggttataacaatttatgttccgctggcatcagcccagtgttgctttcattctcctcaattcagtgcaaaatgttctcatcaagtctagagtcaacacgatgcacctgggaagataaaagaaacccaggtgatcaaactgacgtagtgtaattgctagaaacaaatagaataaggttcaataagacagcatagagaagtctgctttacaaagaaaagtaggtgatactgatacatgatattggcaaaatacataggagaaaaaggatcagagggcttaataaatcacaagatgatttgttaaactgaaacggtgctcttattaaaaagatcacagtcatactaatccatggaccctggacccaacagactcttttctttcgaaggccaatttctgagcagtcaatagacccaccacagggtgagtccagtgaagtcattgggatggctcaaccactgcttatttctctggcagctatcatgttgatagaaagaaaaataaatggagtgatttaaagcaaataaaacttttagactcccaaacaaataaaagcacctccagaatctcagaggatatccataaacaaaggtaatgagtagccaaaaaactgtgaagtagttctcctctataaatttggcatgtcctaccatattattttcttggaatttataccccaaagcagggggaggatgttagagaaaaggctataagaaaataatttaatgcctgtgaagacagattagaaaaattagaattagcaaagagactgttgaatgagttatttatgacttactaggcaaggagaccactctgggcactctggatggtcttggccaataagacaattatcatgtaccattataacttccttctttagatgtgcgagggtctcctttaaaatgtaaatgccccaaaagaaggaatttttttaattgttttttacttttttaaaaaaaatctacttactaacacctttaacagggtcgactgacagccaactgagaccaagaaagaaattcagagttggtgtctaggggtagagtaatccaaaagaaaaaatggctgggcgtctggacttggactctggtgttgacacactggctgtctatgtaagaggacagggccttaaaaggaggcaaagaaaattccattttggagacagctattaattgcttcccaagggaggtctttggcactaagtcagagtctcttttgcgaagagtgtttaggtgtgctaatagcagaatggagcggggcaggggactggaggcagggggcagggggcagggccacatgatctctgagggccgtcaccaaaactgacaccacattgtggatttgactgggctctagccacttgagaacattgatgcatcttccctttagagtacacctcagtgcaacagctggcttccctctcctgttgccagtgatactcaggtctagctttggctcatgtgaaggagttggagctgttcccaggctccagcttgctggcagcttcatgcacaagaaacatgccagtcggaagggtgaaccttgaacagcagcttgcctggcagcttaacataccatcctgttgtcttccataggtgattaaagccattgaggaaggctatcggttaccccctccaatggactgccccattgcgctccaccagctgatgctagactgctggcagaaggagaggagcgacaggcctaaatttgggcagattgtcaacatgttggacaaactcatccgcaaccccaacagcttgaagaggacagggacggagagctccaggtcagccatgcttacttaatagtgatgtatgaaagaacacattagaggaggcaggcaagtggtgactcacttaaattcctgccttttcatcagaggccacttcatggctctctgcaacctgggtggcttctttctcaattagtagagtatttcaggtagttctattcagcattttgaataactaatacctgtcaggcatcaaatagttataaggaaaaaactttaaaaaataataatagtaggaaagaaataactgaagtgcctattttaggatgccaggcctgaaatttaggaagaggggtgaaatgtacttttagaagacgttcagatcagtaggtgctatattttgaaatggggcaggaacactggaatagtaagaaataaagattagaaaacaggtctttaagcacggcaattttaagttgatttataaagtgttaattgtaagaaagagattcattaggtttcagttcttctggtttcccttttctgagtctttcagagtaggaggaaacagggccaagataggaaatgattgagttataaagcatgcagatgaatgtttgggaaggattttaaagaccaaaatgattggaccacctgaaagaggtagttattttcttggaatgagcaaaatgaagaagtatatcagtctgtagagaacataaagatactataagtcctacaagttcagtgagaactttctacatggagaatggactttactggtataagactcaggatacctacatatcagtagtctcatctgaaagggtgtggaccatctttatcagttaaattattttagaatacaggcataatagaccaggtgactcaggcctgcgagaggtgagacactcactcatctccaagtctgagcttctcacaggcttctgtttcatcatgatcctgtgttaaaaataggaggacattttctcccgtaatatttaagcccttccagtctttgcaggccctgtggtgttctcctctcatctttctcctgaaaacttggactaaagattctagaaaagaaggaaaacacattacatgaaaaaaaagagaactgtggaatagatagtagagataccctatattctccaccaggttttcaaatccctgtcattagccactacacaaaatgctcaatggtctatccagctcttttcaaataacactgaaaagggctgaattaacatttcacctctgccacttggtcactatgtgaactaaaaaaaattaaaagtctcctactattgtgaggctatttcttgttcttctgttctccaggagggtgaaatagatgactataaggcctcctttccagatctagctgacttctcttccaccttttagatcttcagcaccagagcccatgtattttgtctgagggtccattcaaggccagttttttggtgtttggtacttcttctgttagcataagtcattcaaccactactatcacatagcatctgctttgccccaaggtacagaacaagttgaggtattagatacactattatcagttctaaattctttttgctgatggtacttaaatagctttgaagcttattatggcttacctataatgagatgtagtataacatggtatgtgattcagcacaaaattaggctaacatcatggtgtgctaccaagagcacagaggcttccagaacaagcttaagaaccacccttaaagttaattgacatcgagtgaagatattttcattgtaaggtcattttgaccttgtcggtgctcagagcctacatcttcctcattaatgcttttggcttaaagtcagaagtaaatgcaaactattggcttttgtctaataacaaatattattgctatatatccacactcaattaaatgtccaaaattctatgtggtaacatttgttgttgactcaaaattgaaagaataattatatcttgattatttttgctgtaaacatttacagaattgtacttagaaaatcaaacttatattgaaataatggacacaaaagacaggttacaatggcaaggtattatttggacacaaaactgactgataaaacaaatctttgttaaaatatttatataaaaaagaaataatacaagtcaagtcaatttagataaaaatgaaaattttaaaaatcgaattggattaattctgctatgtagaaaagtaaagcattatatcgacttaattttgtttttacaaggaaagagttttttggttgaaaatttagtagtaatgatataattgtgatttaaatgtttgtacttaaacatagtatcacgttgaaaatcaggtcaaaatgttaagatcaaacacattctgtgagttttaggaaaaacagaagttcaaaaactatgacttaacaagtagcagtatttttctacaggttattataagtaaaggtagtataaaataaccccatgaaggcctgctctatggttattcagcaattgggtgatgaagataactaactataattctcttaatagtttttattagtaaatgattttttatatgtcaatatcattaggaaaggcagaattccagcctgtaattgcttgtgacagtgacctaatagaaaacacctggcctaagaaatgagtaaactaataaataagttaataagaagtgctttgaatttgttgaaatcattattcaggaaccccagcaagggaatacgagaagcacattccacaatccaaacagtgatcaaagtggccgttcttctgccagccttggcactcgtgctggtcaggcatggattgattaaagaggggattaactccctgctgtcccaagtttgtttgaatgccccaagcctgcctgtagactaggctggaagcatgctggacttgaattcttgctgttttctctgcttccatccagtctggcaggtggcaagctcgcagttttccttactcatccttcactagggtttccatagttgctgaacgaaagtctgtaatattcagtactggcagagactggactctttctgcaaagattgaacaggtttcggccatgagggctctcccagtcttcaccccaggctagggtgttaaaagacctgctatgagcatgaatgccctcagagggccacataaaacaagcgcaggaaatagaattaagaaaaaataggatgattgatacatgctttagcagctttgtgaagttaagagcaaaatattgcatagttacatttaacaacaattgttccatttaaaaccttcccttagcttttcagttctccttgcctatttgaggcaatcagatttctgagtcttcttgtctcactggtagctccgttctgcttatattttcttgttctctttctagacctaacactgccttgttggatccaagctcccctgaattctctgctgtggtatcagtgggcgattggctccaggccattaaaatggaccggtataaggataacttcacagctgctggttataccacactagaggctgtggtgcacgtgaaccaggagtaagtactcaacgatgtaacacgaaagggtaaatctagatttaatagtattttctttttttgctttgagctgcgtaatcatcctactcatttaaaaaaaatctggaatgcctctcattttgattgagtataattttacacagcctctataaagtatctacattcttgcattaaattgcttaatgaaacattttaatacacctgccttgttgtgctgtattaattgtggctgattcaaacgtgtgtctgcatgaagcccaagaaaagagattgtcagtccctgtgacttcttctgtcccttttttgtcgccctatgtacagggacctggcaagaattggtatcacagccatcacgcaccagaataagattttgagcagtgtccaggcaatgcgaacccaaatgcagcagatgcacggcagaatggttcccgtctgagccagtactgaataaactcaaaactcttgaaattagtttacctcatccatgcactttaattgaagaactgcactttttttacttcgtcttcgccctctgaaattaaagaaatgaaaaaaaaaaacaatatctgcagcgttgcttggtgcacagattgctgaaactgtggggcttacagaaatgactgccggtcatttgaatgagacctggaacaaatcgtttctcagaagtacttttctgttcatcaccagtctgtaaaatacatgtacctatagaaatagaacactgcctctgagttttgatgctgtatttgctgccagacactgagcttctgagacatccctgattctctctccatttggaattacaaccattgtattttgtttgtggcataaattacagtcatctgtctttcactggaatgaagaccatgcctaggaacattttttaaggactcagctgtggcttttagggcttggttcataccatgggggaaaaaaaagtcctaggagaaagcgacgtggctcattagtgttgcctcttcagtgctcaagccgcctggtggattcctatgacacagggggcctggaaagaaagggaaagtggatttaaaatatatatatacgtaacccaagccccataacccctaactggacaaatgaggtctgtttctttgggcctgaggctgtgccatataaagtcttattttgggactttacaaacttgtcctaactatcttgtggatagtgggctgtgacaatctggaatagagaacgttcacacttcgctcctttaaagaagcgaccccagatctgcaaggtaagtccaacaaccaagaatgattttttctccagtgaaaactccttttgtgctttaaacttgatctcattcgaaatactgaaaacagaaaaatactctctcatgtctctcaggttgtgttgatgtttttcaggatttcagtccttttttgacagcgaaagaggagaccaaacacagtgtggtttccctgctattcttccggggagaagtgacatatgacccagatgaggtcaggctctgagggatggtcctagatgctcactggctgttggctgtgtgctttccatcacgaagggctcctcctgtcctttggtgccattcattcatggtacacatatttattatcttctgggcaccaggcagcaagcacaggaggctttctctctaaccttgttaggtcatgggtcccgtcctttggagagtttacctcaatggagaagtactggcgagacttttccattagcctcattttctgtcctgctccaggaaactccatccccaaacagggccaaagaggattcaccaagatgccagtggtgagacttggaactcgcctcggctttctcatgatcagaaagttgaactactgaaaaatgcactgctcatccataaacctattagctttcaatgcttctatttttatataccagcattgagtttgttcattcctagaaacaaaggacataactttggactggacacattttaacttttcattctttttttttttttgagttatttcatttttatcacttttaaacaagagttgctgattttaacgacctttctttccccttggttgtatcctgaaagctatttcttatagagcaaggaatgttaaatttgatgctgtcaaatcatgacagtttagtgaaaaccttttttgcaacataagttgtaaaagcttttctgttcagaaggaatgtgaaatttgtttttaaaactactccaacaatttttgttttatcaccacttttgcagaagtctaggagttctggatattcacgttaaaagctgacaaatgtaggacttttttgtttcttttgcttgcttggtaaaaaaaaaaaattattattattattattattactatttgagacaaagtctcactctgttgcccaggctggagtgcagtggtgcaatcttggctcactgcaaccttggcctcctgggctcaagcaattctgcctcagcctcccaagtagctgggattacaggcacccaccacccaggcctggctaatttttgtatttttagtggagacggggtttcaccatgttgaccaggctggtctcgaactcttgatctcagacagtccacctgcctcagcctcccaaagtgttgggattacaggcgtcggtcactgcgcccaggtggcattgtattttaactaacaacagaatgttaccttgtgtacattgaataattaaaagttttttttttttttcttaaagtctacaacttaagacaaggtattttctaaacactgaacatattaaaagcagaccatttcaacagagaacatgtccattctgaaatagcctaacaacattatatactatgctggtgttgttttgttcctgctcagcaggtatttctgtaaatgaagtaatcagggaaggatcaaaggagaggtgaagtatgaaatcttattttattcaaaggtcaccgtctgaatcttcaaaatttcaacatatgcatatattagagtcaaggctgatgcaaaggccaaaaaaggactttccaagtgcctaaaataatatccagcaacagtaaaagtgttaactctctccactacctccatgaagttttagaagagaaatgtgagaacaataggaatgatgcattgtttcccagggcgcagagccagactctggcatccggacagctatggattctaaagccaactgaaatgttgacactgggaaattcactccacttttctttataactcagttcctccacctggaaattagagagataatgataccttaataataacacctttcctaatgcatggtgttgttgcaagtgtgtatgaaatattcttaagtaaaacacggtgagctccacagaagaaaggtacgcttcttcctccaacattgtccaagtattattcatctgtctttcacttgtaaccccaattgttttattacaacatgccagagtggggtgaaatgaagttcagtggtaggggggtcacacagtgaagcttcttcacttaaatggatttatgagagtttggaggtaaatacatatttatacaatggtggtagacctttcaagttatgctggcaggataaacatgcattatttagccttgacatttataaaattattgttttgtaatggggaagacagtgatacaaaagtaaaattctattgcaatgaaaagaactggatggtaaagacattttgatgtcatcacgactgactcaaaggaacaagcctttgtttatttagtcacaatgaattctccttaactcatgaccctacatagaccacatgctttgtctggtctctgtttaagaaatttcccatgataaaggagttgcctgaattcaatggtgaggagaaggcttatttcactcaactcgtatcctggcattaagtagatacaagtcttcacattcccttacatctcaattcaaatgtccaatcatttctgcatacacaccaagtccccaaattgcccacttaatattacaaatatatttatgtaatatctattgatatccagatgttaagtggagaaggaattggcagactgaaaggcaacacgtgtttatgagaccattctttctcctttaagaatttctagtagcaaaagaaaccattaccaaccttgtgtgtccgcaggacgtggaatacactctagcgttttaagatcatattcatgttctcctcatacttcacataaatacctgcccacctgatgaaatcccttcacattcaggtttcaaaaactacatttgatggatttgaccgatttccagagaggaaatagttagaaggtagatttgatgacttttctgtcatttttacgtaattgtcaacataacattcatgttcatgtcgacccagggaccacaggtgtgcacaaccatgcctggctaatttttttttttttttttaaagatggggtcttgctcttttgcccaggctggtctcaaactcttgggctcaagcagtcttccctccttgggctcccaaagtgctggaattacaggtatgagctacaagacctggccagaaaacgatttctctctctttaaatagactaaagtgttttctacaattttaaatatggtcgtttactacaaaaaattaaattttattctctacacgataaatgtacacatatgcaaaacagacaagtgatttgataaaataggcaaaataatctataaaagtgcattttggtcttaattactgccctttgcttgaggccaccagctgctaaacatggtcaccgtggtgggaggcatagtccaataagtaatctggatagttggttgttataaatgaaagaagggaacttacttcctttggtttgagttgattatgtgacaaatatatggacaatgaggagccatgaggagtccattgctgtgtgccagccttgttcgattccaggctgatgtctagaattccagcctgcggctgattagttcttgatatgtggaaggaggcttgaacctagaagacctctgtcgttcatagagcaagtatctccctgtgtcccatgttccctctctcctgcctgtttacatgtagagagtatggctctttcgccatgttagattagatacttctatttatcaggagttactctcttgttaagaaaaaccaccactttttttcacttcttagtttgcatttttcttttttttcttttcttttttttttgagacagagtctcgctctgtcacccaggctggagagcagtggcgctgtctcggctcactgcaagctccgcctcccaggttcacgccattctcctcctgcctcagcctcccgagtagccgggactacaggcgcccgccaccacgcctggctaattttttgtatttttagtagagacggggtttcaccacgttagccaggatggtctcaatctcctgacctcgtgatccgcccacctcggctcccaaaacgctgggattacaggcgtgagccaccgcgcccggcccttagtttgcatttttcaatcattattgttgactatgggtggattgtgaactgaaacaagtcaggattttcatttcatagacaggctgttcaacacggtggttaaagcataaatatcaattagaactttgtggggtctaatcccagccttgccactccagagggtatggcattgggcagggtacttagtctccttatgctcaatttcctcatccatataatggagataagaatagtacctatctcggagttgtaattaagctgttagtaaacaggttttttttgctcttataattgctatttttcagaaaaggaaagtataattcgtgatctcaccactgaactacttttactgaaggataccaacttctacgaacctatatattctttcttacaatagtggttgacagttggctcgcaatatgggtcgacgttttgtctaaagtcttgctcttttatctacagggagtagattctgctatcttggcctcacagcccttcctgttgattacaaagcccgtggaagaaaacagaacacaccctcctcagttccgtctaaatgtgtttcttctgcttcaattacaccagttctggggcaaagacactgatgaaacaacacccatacctgaaaagaataaatgtgtgactttcaaatcccctttcgcagtgaaagaaacagcaaacacttaagattcagcatctgttctccagttgcactgaggaatgcactgtctcgcagcaccagctctgcagagcccttgccccagactctttgcggttttatttatatgtatttccatatttcattcctgtgtgtcactgctgcattggtgtggcagcaagtgaccaaatgctacaggtcttactatggacaccaggtcaggtgcaaccacacaaaacaaagccagttccatgagctgcctatgatatgcattgcggaagtaacattttacccagggtgtgccattgcagtgatataaatatatttttttcttagactaaatatgagctgactatctcttttgatgtgtgtacataggtgtgagtgtgtctgtatgcgtgcctgtctgtgtgcgggtgtgtgtatgtgcgtagcctcatgcttaggactacccatgaatgttgtggaatgctacacctggagagttctggttttccaccagtttcaagatgaagaactacatgatacagtggacctggagaccatccccttggaaagacaacccagagatgttcagcatcctgtatctacacgcatcctgtatctacacgtgtattttgtagctgtcacactaaccttaataagaattctacagctttggacagaggcattttcaccttaatggtgaagtaatttaaaatataaatccattcaggtgacaacccatcatcaaaattacaaattttctgattgaactcatctgaatcatcagttccttgatggagagagagaaggagatggaatgtgtctggtaaccccaaatggagtacaagtagcctttgttttcctgcataaatggacttgttgaatgcgaacgaatatatgcaattcatatacttttggagatgaacgtagatatgtgtgtcagctttgagatggtgtgtcctggattaatactttgtctcccaatatcacagaaaaatacatgccagtgactcttgaggttaaggtagttgggatgaaatggcctcaggcaatttcacattccctaattacctggaaagttctacagtaattaatatgcagctaactcctgttgccctcacaagagcatcagccttctagaatcggagctccggagtgtgaagattcagtattgatatgatatgtataccaaactccagccaacttactgccatttttcataatctgagtggctgccttgcttatcctaagctgtggttgcagaaaccgtggccatttatataagctataacatcaaatcagggaaaaatgaggaaaaaaaatagattctgaaccatttattgttgaataagtagagaaaatcatcaataaatatttattacattctgacagggtgtgtggcattgtgttctatgccagagtgacaaagttgattcacccctttttggggaccttaatatattttttaagggatgtgcctatgcattgatgcctgaaaaatatgtataaagaaatgaggttgactcttctgagcagttcatcttttccagaggtaagggtaggaggccaacttcagggtctgggtctgagcccgtgggcaagccctggccgagtgagctccaatgctaactcatgtgccgatctctagagcagtgggaaactaccccgctgcaccaaatcaagtagcttcaccttgtgtatgcaggccccaagttattttttagcaatcttacgagtgaaatgttctggtgggttgaaaaacgttcttattttaaagaaaggttgtgctcgctacactgctggtgtgtgcattctgagacctcttgtattcaatctgtgaaggatatgtgtattaatccgtacacccgtatagcctcaatatttgtctgaagacacttaaattctgacccataaaggaaagttctagaagcaatattttcacttatttaacattctccaaacaacatcaagcattgatacacactgaagagtgcgtttattttttgtatcactctaagtatgttggaatatgcaaggactgtggttcaaattagaatgtataaggcatattataatttagttcatactgaataagaaattaacagaacattgttcggttcacacgttccaaactttgagtgatttctggagttagacatagattttctattttgttttaatttgtcaaggtatttttcttcccttcatgaactttaggtacacataacttatgtcatttatttatggtcttttatacctagtttgtaaaattgtaaaatagcaaactaaatgcaaagagtttgcatttgaaaataataaagtagttgccgtatacaaccctgcaa

SEQ ID NO: 465 - DNA, 2402 bp, Homo sapiens
actttgctgatttagcttatggaagaggaaccagaaatttgtccttgaataatgtttcccgtaagtaatcagttttttgataattatttggttttactgtgatctggcttagtaactagggtggctgcaatagaggaaaatctggtatttcccagtttttccaactggcggccgtgggtcaagaaggttagtttcctggttcgttgtcagattggtggtaataaaggaacaaggtcaaccttctgtcagagttcctgaattgggggaggaagataactggtgcctctgcctttggaatggggtgggtgccagagaagtcaaggtcctgggggtgtttgcttgcctggttctgttaaccagaggtggtgtggctgaaatgagaaagtgaaactttaggaaggtctgagaagccctcttccctttaaaaaaaaaaaaaaaaaggctgcttctcgcagagtggaaagccccggtccccatcccaccaaaaccatttgacaagcaggacaacgaagaggcagaaggatctgggcctgtgcgcgacgccccgggggacgaggctcatggagaagtttcgggcggtgctggacctgcacgtcaagcaccacagcgccttgggctacggcctggtgaccctgctgacggcgggcggggagcgcatcttctccgccgtggcattccagtgcccgtgcagcgccgcctggaacctgccctacggcctggtcttcttgctggtgccggcgctcgcgctcttcctcctgggctacgtgctgagcgcacgcacgtggcgcctgctcaccggatgctgctccagcgcccgcgcgagttgcggatcggcgctgcgcggctccctggtgtgcacgcaaatcagcgcggccgccgcgctcgcgcccctcacctgggtggccgtggcgctgctcgggggcgccttttacgagtgcgcggccaccgggagcgcggccttcgcgcagcgcctgtgcctcggccgcaaccgcagctgcgccgcggagctgccgctggtgccgtgcaaccaggccaaggcgtcggacgtgcaggacctcctgaaggatctgaaggctcagtcgcaggtctgccgctggcgctgggggcgtttgggaggagccgagaggccgagctttctcagggccgctggggtgagggaaaaatcggtgacttttctccagatatacagtaccctaagaaaatctagaatggctccttgcatctaatttgccgtcaagagaatatctgaataaaacgaatgaaaaggagaaaaacgcattcccgtagtatctggcactgtacatgaatcgtggaaagtgggagtgagagtgggcacgcctactcagtgccagatactgcgctaggcccttgacctcctgcattatttttacgtctcacaacagctctgttgggtgcaaaattgcggttttgccattacaagtaatagtttcgtatctcccctatatagtgacttcactgagtctaagtaaagttgtttgcccagccaatagaaagcagaattgttagaattaaaggggtctatagaataaaatgggtttgtctggctctaaagccaccactggacttagaaagctcagaggttctttaaaatgaacacttctttcccaggatttgcagaaattccacattttgagttctaagggaatggtatgggctcctccctgggcagaatcatagtgcataacttggactacagttgactttccaaacgagaagttgtactggggggctagggaggttactgcgacaccttactcttaaggaattaagacctaaaactgttgcttgttcatcatcataactggcgagtagttgaaactttatctgaggatttttaaatttcttgtaaaaaaccaagtaactaaattactattttgttgtgttttcttaaggtgttgggctggatcttgatagcagttgttatcatcattcttctgatttttacatctgtcacccgatgcctatctccagttagttttctgcagctgaaattctggaaaatctatttggaacaggagcagcagatccttaaaagtaaagccacagagcatgcaactgaattggcaaaagagaatattaaatgtttctttgagggctcgcatccaaaagaatataacactccaagcatgaaagagtggcagcaaatttcatcactgtatactttcaatccgaagggccagtactacagcatgttgcacaaatatgtcaacagaaaagagaagactcacagtatcaggtctactgaaggagatacggtgattcctgttcttggctttgtagattcatctggtataaacagcactcctgagttatgaccttttgaatgagtagaaaaaaaaattgttttgaattattgctttattaaaaaataaacattggta

SEQ ID NO: 466 - DNA, 7011 bp, Homo sapiens
acttcctgttcctccatctccagcggacactgctctttcaagggcaggtctccagcccagctctctgaaaacattttgctgaaaatataagcaaacatcggccttgtcctccttgtgttcatacactgtggaagcttttctctgcctcctccgtgagagtgcgtggccgggagaccagaaacgtggtcctttctcttgcctgtgagctggtgcagaggtaagtctgagtatttgtgcgtgtcatatttggatgtgtatgtgtgggtgtttgtgttgtacatgtgtgtttacatgtttgtatgtgttaacatgaatgtgtgtgagtgatgtttgtgtgtgtgatgtttgtgttgtgtgtgtatgtgagtgttgtgtgtgtgttgtgtatgtatatttgtgtttgtgtatgtgtttgtgtgttcacctgcatgtgtgtgagtggtacatgtgttttgtgtatgtgtgtgtgttgtgtatttgtgtgtgctgtggtgtgtgcaggtttgtaatgtgataaaaagagctgtgaccaacacgtctggagaactttttgccttgtgacaaagtcactgtttaatatttggcaagatgcttctctgagttttgctttcttccagagcaatatgacaaggatggtactatctgttccatcttctgtgttggagacaatgcacactgtggccaacatgggaggtgccattccggggagggtctaggaggaggcagggaggtgccttgcgtgcagacccattccccgaaccctgcgaaggcacagtgcaggttcctgcatgccacagcctagtcccacccggctgttgtttcctgttaagctgcctgcccgttctctctaaaggaggaatgagattacattggtaaagtgctgcctcaatttccaccagggatgtaaggaagccagggacaaagagattgagaggccaccagttaggaagaactaactccctttggtaggtgaaatattgtactccttccagaatctggctgttcaggtctgagtaaggctgtccgcctggcctgcttcttctttcttcctagaaagtcaacagaccttcctggactccctccatgcccagcccagcactgcaaaattgatctttaccaatcataaagcaatatccgcatatatacttctgggatctggggaggactggagtgtttgccaggtgaacagaatagaacaaacatctaacaatgtggcaatgagaaaaacatgtctatcaggttcccctggacttaggtttccccacaccccagacccttcatctggatctgtttcatctggttgtgaatgtcctacatgatctggaaaaacagtcatggaccatgcaacttcctcctcagtcccacagagaaaatccagcagagagaaccttatgggatcttggcacagagaactgtgttagtctatgaagccaggacacattgctgtcatgggaaaggggacaggagttcctggttgggaatgatgtggccctaatttgcaaaaaggactaagaattgctctaaaaaatgttatgaagtatgttgagaccttaataggggaagagacattcacaggcatctagttcaggcccaacattcttactgatgggatgctgaggcccagacagagctaactggtggctgcttctcccctgaggtctctggcttccttcccagctcagcccctgcaatcccagtcctctgtaaccctcactgcacagtcttctccaaagtctggccccaaggcccaccaagtggcccctcccaacaacatcctactcattcacgtcctccaggcacaccaggccttcctgctgctcccagggaacacaggatcagaatcacacctgcttctgtgcttcccttcctccacctcctccttcttcccttcctccacctccccccacctcccagaacagttccagaccctttgtctatccaaatttcatccattcctcagctcccaggccagttgcacctttatctgtaaaatctcttaaacttatgatggagaccacaatgaagggggcgagggatagcatccctaaagaaatagggtccctaaagccagcagagagtgtcttagaccccttcttccattgcctcactcagtcccaccccaaccctaaactaatgcaaaaaactttcctctggcaagagaaaggcgaaaggcaggtggctgttgaaactcatttggaaagtcagtagaacatatgattttttttttttttttttttttgtagatggaggaagaagaatatgaacaaattccccaggagaatcccccagaagagctgtcccaggatcctgtgctggagctgtcaggaggtaaaatgaatgaggagaggggagcaagtgggaaacatttggggtgcaggtgggacacagctccaccaccatagtgtgcttggagaggaagctgacgtcccccagtcacagaaatttacccgcctcagccaccatcagaggcctttggggtagggcccttcttatcactagccaaaaataagaaaaaagacccctggataggtatggtagataaaaggaggcgagaaatagcaccaatgactaaatcaccatgccagtcccaaaggaaatgctttcacatggtagatgttcttcctcaggatggatgtgctgacagtgcgtgtgacgaaaataagtggccttggactgaggcttggatgccaacagaccctgtatgggtgtttggctgactccgaagtggagctgtcacagttgtaagtttgaaagcgccttgtgcacaagcagaatgtacttggctgctgcctcagatctgggctctgccttatcgagggcgtccctttcccaaaagccattgcacagggtcaggcgcttaactttcatgggctcaacttcgtcattcatcctggggaggcaggatttacaaatgctggaaacccagccctttcctggccagaagaaatgatttgtgattcattatgtattttaatatgaatgaccttttactttatgaacttaaatggcctgagccatctggaaaaagccacgttaacctactacaatagggacattaccaatacctgtgtaacacctgtttgaccttttgttatagcaatcaaggttagctattcttttaagaatcctctccagagctcaagtgatgcatttggctttagtaaagtccagtggtgtgtgctagctccaggctgctcagatgggggttcctgtctcctctggctctgcactgggctaggtgggtggggatgaagatctactgcccagacttctgcccattcattcaaattccttccagccaccttggggaagctggagggggcccaatgtcactcagttagaattggcacgtgggtcagagccaagggtggctgtcaggccacagcaaggcctgttggtgcccaggagattcaggagatggccacgcccatgctgccacatgccagcttcatgctttgtcatctgagatacatcaatgtcttcagtggggacaagactgggaaaccagctattacttgtcacttctttatgtgctctgggtcttgggacccgcaaggccaggagaagggaattcccttcctgccttcttccccagtcatatctaaaaaccttggtattgggtttcttggtgttctattggccaagtctcgctcttctttctaggctctgctcttgcactgggagagaacgttcagccccaccttcaaggatgtgggcccagaatggtggcccagcgctggtttcagggcagatgttggtcttttacaatctgcccctgcagtctgggggtacacccagaggctcctggtgatgacaagatggggtacatgggcccttaccccagttccctctgctttctttggatatttctaggtctaagggagaaagaacagaagaccccaaggagactgaggctcattctcatggggaaaacagggagtgggaagagtgcaacaggaaacagcatcctcggcagggacgtcttcgagtctaaactcagcaccagacccgtgaccaagacctcccagagacggagccgagagtgggctgggaaggagcttgaggtgattgacacacccaacattctgtccccccaggtctcgccagaggtggcagacgctatctgccaagccatcgtcttatccgccccagggccccacgccgtgctcctggtgacacaactgggccggttcacggatgaggatcagcaggtggtcaggcgcctgcaggaggtctttggagtgggggttctgggtcacaccatcctggtgttcacccggaaggaagacctggctggcggctccctggaagactatgtgcgagagaccaacaaccaggcccttgcctggctggatgtgacccttgcacggcgccattgcggcttcaacaacagggcacagggggaggagcaggaggcccaactgcgagagctcatggagaaagttgaagccattatgtgggaaaacgaaggagattattacagcaacaaggcttaccaatatacccagcaaaactttcggctgaaagaactacaggaaaggcaagtaagccagggccaaggctctgaggacgtgcctggtgaggagtcttggctggaaggactgtcccagatccagaaggaatctgaggaagcccacagatgcctgctggggaaggctgacctttgagcctgtgctggacttgagccaaggacaccatcagcctttgcacccccctgtgtccagccctctgtttctctttccatcccatggagtgcttcccagtctccaggtcatgacgtctggtgtaggaagaggggcatggggcttgaggacagggtccagcatgcccagatcacattccagttccttcattccttcttccagaacatctgggtcctccctcctctgtgccccaacagcacgctgtcttcctattggaccttctatctcattgcattgcctttcatgagttacttgtctatactctgatagaaccaaagtttcttgagggcaggcctgtatcttttacttctgtgtaacttccacagcttttgactgcattggagtcatgcagtcacgtttggtgcggcaactccatgcaagctgttgaccagatgacttctcatctctccccacaccatgatggtttaaggtgcctgttgtgtctggtggctggaacatggcagtggtgctgagacatggggagggttggagactgggtggggagggttggagactgggctgggaggagagcaagcaggaacagggatggaggcaggaggagcagcccttttattcactcttgagctgtaacaaacaagccccgttggaacttcctagtgggaatgatgggagaagtttggggcagggtatccaagaagtcagactgtggtcaagtaggtggtcccttgccctggctacagaacatggaagcccctagggatgcaagtggacttgggcagaggaggtcacaccaccccaccaaggtagacttagattagagatgacttgcatctgttacttcccctttttccatgggtttcatggcccctcatgatatttgccttctgctcctagaaggcacagactactttcaacctgcctcgcccttcactgccacccctcccttctcccttgataatgggagcatgtggatggggtgtctgcgtgtgcaaacgggttccctagcaaagtatttgtgggggtccaatgcaaggaggcagggaagaaagggggcctgcaaaggaagcagtagagtgacttaaacatcttgcgaggcagcctgcctggtttatgggagaactctgaagcccatgatgttttcctggaaggctgttcctacagacggggtttataagtactgatactggacaggatgagaagggagtaggatgtcatcctgtctcaggcctcggataggaagctgcctgccagcaagaggagactgatgtgccccgggtgcaccccacctcctttgaggtccaagatgctcctggggagttgaccgacatttgggaagataataggaggcattggggaaactgctccccaatatattcctcttttcctttcttcaagctgcgtagcagggggcctttagctagtttctcccgagaggggcgggaagtacagctggtggagacagtgctgggagatgatcagaaatctcagggcacagcctcaggtctacctggacactcatccactgttggagatgctcaacagctagacacagatgctcacagccgacctgtggcctcttgctctgaagccatcccccatcttccctagacacagcagacatctgagaaagcttcagcatttctcttgctaacagattcagaaaagtgtctcaaagcagagcacagagttatttggtgtttgctgaagacagcctttgtgccacaatcacttattaaataagcgatcaatttcccattgaactgaacatgcaacatttatcatacattcagttctcattcacactccttaagatttggtcagaatttttatttctgttcatgtcttctacttttctactcctgtatgaataaaatattgatttgattacagtggctttgactataatgtgggagccaatttttgcctcagtcttcatttttatatttaccttgttattctcaggcatttttttcttctatgtgagagttaaaatcattctgtaatttccccccaaaatcatattggtattctagttggcaatgtcttacatttatgttaagtttgagggaattggtagttcaagtataagttaattaaggccattttatttctaagtgaacagacttgaaactccagagctactgaagtaaaagttagaatcatttgcattttcattcagataggagataattttgtaaattttgatgctattattttaactctattagcttaagtaatgtcataatagaaaacacaagcatttgaccaaatgagatccattcagcgactaactggcaaggcactcaaaacatgtcattcattaaatgttgtttttatttacctcaaa

SEQ ID NO: 467 - DNA, 7333 bp, Homo sapiens
ctctcttgcctgccgccatgtgcctttcgccttctgccgtgattgtgaggcctccccagccatatggaagtgtgagtccactaaacctttttttcccttatagattacccagtctcgggtgtctttatcagcggcgtgaaaatggactaatgtagctgttaatagtcaagttctcaaaatcaattgtaaaagcacagtaaggaaacttagaaaaattactgataattctaccttctagataaccaattttgatgcattttaaatctatattagattatcctacatataagaagatacaagtttcatatattttattcacttaattataccaagaacatttttccgtgtcattaaaaatcttgtaaaccatttttacggctgcgtaagaattcatcatatgcatgtactataatttaggtaatctcttatttttggatatttaaaccatttcctttctattatcattaacataaataatactacctgcattttctattatttccttagaataaatcccacaatgagtaatgctaaataaaaggcatgatcatatttaatgtaaagaaaaaatattggccaggtgtggtggctcactactgtaatcccagcactttgggaggctgagactggtggagagcttgagctaaggagttcgagaccagactgaccaacatggcaaaactccatctctacaaaaatacaaaaattagccgggcttggtggtgcatgcctgtagtcctaactactccggaggctgaagtgggaggatcgcttgtgcaagctgtgagcctgccactgcattccagcctgggtgacacagcaagtccctgtctcttaaaacaaacaaacaaatttttaaaaacccaaaatacaaatacagtgtcttttttgggaaaagcttaggatgcctcttaaactatggaacatacaaaacacaagttagggcagaaaaaaatatacatggctaatgaaaatgtgggtataattgctactgtggtttcagaaacctgtgttaaagatgaatgtggtggtcagattgcaagatgtgtttgtaatatctgggcacagaggtagcacagttattgtgcaaaagaaactattcctctgaagctctaattttagtgattctatgtgagaactctggcctgcttgctcttttgcaatcttggtttgcttgaggtgtgttgagggctgactgaatgcaagagatttaaagaatttgtgtttctcacattctttgtttcagttgtagctgagactgtatctctaagtcatatatcatcagttctacaaagaatatgcattgcttccagcccactaattcccttttctaaaaaaacaaagaaaagaaaagaaagaaagaaagaaaaagaaggaaagaaagaaagaaagagaaagaaaagaaaagagagaagaaaaactcaggcctgtaatcccagcacgttgggaggccaagatgggcagacaatttgaagtcaggggttcgagaacagcctggcaaacatggtgaaaccctgtctctaccaaaaatataaaaattagatggacgtgctggtgcacataagtaacccagctatctggaaggctgaggcacgacaatctcttggaccaaggaggcagaggttgcagtgagccactgcactccagcctggcgacagaacaagactctgtctcaaaaaaaaccaaacaaataccccccacccccaaactacacaaaagacaagaatttccaagaataaaatcaagagatctgtactcacaatttatgacagtttcaattagaaaagtctgggttttatccttgttttcctaatattttcttttctttttctttttttttttagacagagtcttgctctgtcgcccaggctggagtgcagtggcgtgatctcagctcactgcaacctctgcctcccggattcaagcaatcctctgcctcagcctcccaagtagctgggattacaggcgcccaccaccaggcccggctaatttttgtatttttagtagagacagggtttcaccatcttggccaggctggtcttgaacttctgacctcgtgatccacgcgcctcggcctcccaaagtgctgggattacaggcatgagccaccgcgtccagcctttctaatattttctttaaaacgtcccctttttcaaaattttttcaaattcatggaaaagaggataggaattatggttaaaattagtactaactgatgacattaaccgattaataaccaattatgttcttaaaaactggaaatgatatacaccactagataaaataatcttaaatgttcattgactttatagaattctctcaacattactttttggtcacagataacttctgggttgacaaaagcttttctccagcgccatttcatacagcttttacatggctgcacatcactagcctgctttaaaggacggtgctcccagcccaaagcctcaggaaaaagaccatggctcaaaaagctctgagatgtatcctatccacctgaagagcctattgcttgcctgtatccctcccttctagtgacactaatcttctgtacagaaatcctagtccagcaaacattgctctcatcttcgcccatacacaacctatgtaaagaatggctttcctactctttgctggcgaacttcagctcccggattaggcatgccacctcttccaggtagctctcagcaacgcacttttccatcagcctgggtgtgcccctctgtgttcccatggcgctttgctttcagcgcttctcccaaattatgtttacctgtttattagactctccacctctgaagaccaggccatttcatttggctttttactgccacgtagtaggtacctgttcaagcttgatggaaggacttccccagcctccccacacatattatgtaaagtgatcgctgtctttgcttcctcctggagaccatttattttatttttttgagacggagtctcgttctgtcgcccaggctggagtgcagtgtcgcaatctcgactgactgcaacctctgcctctcgagtagctgggactacaggcgcgcgccaccacgcccggctaatttttgtatttttagtagagacggggtttcaccatgttggccaggctggcctcgaacttctgacagcaagtgatccacctaccgcggcctttcaaagtgctgaaactacaggcatgagcctccacacccgtccaggagcccatttatatgggagcctgcttctaaagattattacctggtgccagggtattttccagacctgtcctcacattcctgttaaacaggaggaagtgaatcgcgctccttttcatctaccttctcggagggtttatgcctccaatattaacctcagcacagccaaagaaaatcattccattccattgagcggagtcagaaacatgactaggtcacgatcacaaccccgtgtgtgccagggtgaccgagactgggtgactttatggtgtttcaacgtgtgggttttgactgattatattatgggttttccagtcaaaaactcaaagcagtggataaagcacttgcgacctaaaataagcaatggaatgaacaggaaggcgaaaccagagtttaaagcggcaggacaaacaggaaaaaggaagagtgaggcaggaagggtttaaatgcaggctcctcggaggacaagtcgccgccacacccctgtctgccgtcccgccagccgccctcacgcggcgcgggaaaacggtcggcctcgccctgggctcaggttctctccgcccgccaggcagtggggtttttttttgttttttttgagacggagtctcgctcagtcgcccaggctggagtgtagtggcgtgatctcggctcactgcaacctccacctcccgggttcaagcgattctcctgcctcagcctcccgagtagctgagactacaggcacgcgccaccacgcccagctaatttttgtatctttagtagagacgggctttcaccatgttggccaggatggtctcgatgtcttaacgtcgtgatccggccgcctcggcctcccaagtgctgggattacaggcgttagccactgcgcccggccccagccaggcagttttaatcgagcgctcacaaccactgagacgcagtgaagcacccaccataaaatcccaggaggccgaccgccggttcagactttttcttttctttaatccccgtccaagggatccgccctcaccccccaccccagccaccccaattccctattccctccccttggacggcgccggggaaaacaagctgctcgagctttatttcttcggtgcaaccaactcagaatgaattcctccgcccctgcgtgctcagtgagtcggcaccctagcagtgaactgcatttaaaacctcaggaattgagcgaactctcccagtggctctcctcaccgggatccccttccacgcctcctccccgtgccgcgcctcagtccgcactgctcattggccgcgtgccctgccaatccgatgcacgtcggctagggcaaagaccgcgaaaaagcgcgtacacctggctctgggagcgcgcgcctaacgccagccagcagcaggaggcgcgcgaggcaccacggcctggcggccgagagtcagggaggaacctcatttacataacggccgcccctctgtctcctggcgggggccggagtcccgcccctcgtccaacttgaaatctgttgggtcacgggccagtcactccgacctaggcaagcctgtggtggagctggaagagtttgtgagggcggtcccgggagcggattgggtctgggagttcccagaggcggctataagaaccgggaactgggcgcggggagctgagttgctggtagtgcccgtggtgcttggttcgaggtggccgttagttgactccgcggagttcatctccctggttttcccgtcctaacgtcgctcgcctttcagtcaggatgtctgcccgtggcccggctatcggcatcgacctgggcaccacctattcgtgcgtcggggtcttccaacatggcaaggtggagatcatcgccaacgaccagggcaatcgcaccacccccagctacgtggccttcacggacaccgagcgcctcatcggcgacgccgccaagaaccaggtggccatgaaccccaccaacaccatcttcgacgccaagaggctgattggacggaaattcgaggatgccacagtgcagtcggatatgaaacactggccgttccgggtggtgagcgagggaggcaagcccaaagtgcaagtagagtacaagggggagaccaagaccttcttcccagaggagatatcctccatggtcctcacgaagatgaaggagatcgcggaagcctacctggggggcaaggtgcacagcgcggtcataacggtcccggcctatttcaacgactcgcagcgccaggccaccaaggacgcaggcaccatcacggggctcaatgtgctgcgcatcatcaacgagcccacggcggcggccatcgcctacggcctggacaagaagggctgcgcgggcggcgagaagaacgtgctcatctttgacctgggcggtggcactttcgacgtgtccatcctgaccatcgaggatggcatcttcgaggtgaagtccacggccggcgacacccacctgggcggtgaggacttcgacaaccgcatggtgagccacctggcggaggagttcaagcgcaagcacaagaaggacattgggcccaacaagcgcgccgtgaggcggctgcgcaccgcttgcgagcgcgccaagcgcaccctgagctcgtccacgcaggcgagcatcgagatcgactcgctctacgagggcgtggacttctatacgtccatcacgcgcgcccgcttcgaggagctcaatgccgacctctttcgcgggaccctggagccggtggagaaggcgctgcgcgacgccaagctggacaagggccagatccaggagatcgtgctggtgggcggctccactcgtatccccaagatccagaagctgctgcaggatttcttcaacggcaaggagctgaacaagagcatcaaccccgacgaggcggtggcctatggcgccgcggtgcaggcggccatcctcatcggcgacaaatcagagaatgtgcaggacctgctgctactcgacgtgaccccgttgtcgctgggcatcgagacagctggcggtgtcatgaccccactcatcaagaggaacaccacgatccccaccaagcagacgcagaccttcaccacctactcggacaaccagagcagcgtactggtgcaggtatacgagggcgaacgggccatgaccaaggacaataacctgctgggcaagttcgacctgaccgggattccccctgcgcctcgcggggtcccccaaatcgaggttaccttcgacattgacgccaatggcatccttaacgttaccgccgccgacaagagcaccggtaaggaaaacaaaatcaccatcaccaatgacaaaggtcgtctgagcaaggacgacattgaccggatggtgcaggaggcggagcggtacaaatcggaagatgaggcgaatcgcgaccgagtcgcggccaaaaacgccctggagtcctatacctacaacatcaagcagacggtggaagacgagaaactgaggggcaagattagcgagcaggacaaaaacaagatcctcgacaagtgtcaggaggtgatcaactggctcgaccgaaaccagatggcagagaaagatgagtatgaacacaagcagaaagagctcgaaagagtttgcaaccccatcatcagcaaactttaccaaggtggtcctggcggcggcagcggcggcggcggttcaggagcctccgggggacccaccatcgaagaagtggactaagcttgcactcaagtcagcgtaaacctctttgcctttctctctctctctttttttttgtttgtttctttgaaatgtccttgtgccaagtacgagatctattgttggaagtctttggtatatgcaaatgaaaggagaggtgcaacaacttagtttaattataaaagttccaaagtttgttttttaaaaacattattcgaggtttctctttaatgcattttgcgtgtttgctgacttgagcatttttgattagttcgtgcatggagatttgtttgagatgagaaaccttaagtttgcacacctgttctgtagaagcttggaaacagtaaaatatataggagcttaaattgtttatttttatgtactactttaaaactaaactgaacattgcagtaatgttaaggacaggtatactttttgcaaacaaatgcataaatgcaaatgtaaagtaaagctgaaattgatctcaaa

SEQ ID NO: 468 - DNA, 7734 bp, Homo sapiens
aagacatcaagacttaaacgaaggaaaggattcaaaagaggagaggaaagtgcattttcatgctagaaaaaccatattatacaaatataaaaaatagggatctctcaggctcaccagatgaggggatgctgtgaaagaaggtaatcttcctcatgtgatgtcagagagtatagagccagaacaagtcacaatcctgaagacacgtctgaccccacacatctacaaagccagcagaaatcaggcagactaacttctacaataaggcagaaagtttgaaatttggaacacacggaaaggacttggtgagttttgttcactgttctatctctaatacccaaaagagtgccagacatgtgacagacatctaaaataaacatttgctgaatgaatgagtaaatgaataaatgaactactatagaaaagggtagtgctttccaggacactctaaggcaggaacactgggaggaagagcagtaaagagggagagagtgttatagaaggagagagtatccacattagcacctgctaaagcctaattaggcttattttgtggttcaaggagatgaagtgaaaaggttacagcacaaaaccaatccctctccttactctgcataattttggatctatcacctgaagaagtgaagaactaaataaacctccctcagttttcaaactgtgatttagctctgaggaaaagcagacaaagatgtgtctacatgggggagggatagccccctcctctagggtcatacacaagcagcagcctccgtgaggaagattatgcagtagtcttcctcacagaggaaaaggaagaatttttttttctccctgtcttctcctctgtctccttctgaagtatctatatagtccctgacacatggagggggcgggggggagaacctgatatagtctgatatagaacttgttaggcgaaatgtgtgtgtgtgtgtgtgtgtgtgtgtgtgtgtgtgtgtgtgtatccagtgtatgtgcgtatccatccagagggaagaaaactaaagcagtggtcatctctggtggtaaggttcttcttattacacattttctaatgtttggttttttgtttttttgagacggagtctctctgggtcacccaggctggagtgcagtgacgcgatcttggctcgctgcaacttccgccttctgggttcaagcgattctcctgcctcaaccttgcaagtagctggaattacaggcatgcgccaccatacccagctgatttttgtatttttagtagagacagagtttcaccatgttggccaggctggtctcgaactcctgacctcaagtgatccgcctgcctcggtctcccaaactgctgggattacaggcatgagccaccatgcccagctctaatgtttttttaaaatatcagatattacctttgcagtaaggaagaaaataaaacaatagaaaataaaatacagtagtccccttgttatccttgggggatacattccaagactcccagcagagtactgaaggagaaaattgtgatccacagtttttctacacagctaagtagtaattcacacatgaaggcaaaaggaagagtttagtcttgttttatgtaaatttgaattatgtctattttctatttaaaatagtataatgtaaaaatatgtttaataatttccagggtctttttaaaaaaattaagaatccctatttaagaaattgtcttacaccaaagctatatgacaacactttagctagtaagcagaaatattcactattgtttgtctatattatttgaactatgctattgcattcatgcactttctgtaagtgatttttatgattagtatgctatttttatattcatggttattataatttaaaatatttttatatgctataacaatgtcaactcatcttttattaagtggttgtgtttgtgttaatgctgaaaaacagctgaaaacaagctagatgtggtatgccaattcaggaaaggacactgataataataatagcagttaatacattttgagtgctacatatttttctaaatgattaatatgcattacctcttttaatacctagtttataacagccctatgaaaaaggggtctgagaccagcctggccaacatggtaaaaccccatctctactaaaaatacaaaaattggctgggcgtggtaacacatgcctgtaatcccagctacttgggaggctgaggcaagaaaatcgcttgaacccaggaggcggaggttgcagtaagccgagatcatgccactgcactccagcctgggtggcacagagagactccatctcaaaaaaaaaaaaaagtactattattatccccagtctatagatgagaaaatagcctcaaaaagttgaggtaacttgttcataaataactgaatgtgggctgggcacagtggctcacgcctgtaatcccagcactttgggaggccaaggcggcaggatcacctgaggttaggagttcaagaccagcttggccaacatggctaaacaccatctctactaaaactataaaaattagccaggcatggaggcacgcacctgtaatcccagctacttgggaggctgaggcaggcgaatcacttgaatccaggaggcagaggctgtggtgagtcgagatcacaccactgcactccagcctgggctacagagcaagaatccatctcaaagataaataaataaataaataaataaataaataaataaataatcaagggtggatttgaacacaggctgactctagagccttccctattaacaactatgctctactgtgtttctaatgctgagaaaatgaaaagcaacattaaaaaataataacagataaggatttatgagctccaagaacacattccttttactttacccatattcctgagggaaaattagtctttctttacatatgttaaatgaattaatggaaaagaaggaaagaatattccagctacttggaaattaattaaaatacagtagccccctcaccttatccttgggggatatgttccaagacccccaatgagtgcctgaaactgcagatagtactgagccctgtatatattgtattttttcctgtacatatatacctataaaaaagtttgatttataaattagccacagtaagagcatcaacattaatatatagaataattacaacaatattctgtaataaaagttaagtgactgtgtagtctctctctcttcaaatatcttattgtactatactcactcttctagtgatgctgtgaaatgataaaatgtctatgtgatgggatgaagtgatggagcaagatgatgtgagatttcatcatgctactcagaaaagtgcacaatttaaaacttatgaattatttctagaatttctcatttaatgggggactactgtaaagactttcaaaggttttaaagactagtcatggttgttaaagaatttaaatgcaggattatatctaaataaatatataatttcaagataaaatgcaaatgataattctcaaaaaaagaagttgaataagataaaataataatctaaaagtaataaactggctataaattccccgattataccaacttttattggtaaaactaggaaataggagaaaattcttgaaagaaagttacagtgattttctcatgttacaaagacaggagctaaaaaaatattattgatggttgatgtaaataattagaaaaattcaggtaaaaatctttttaaagaattttaagaattaatatcaaaatgtaaaacaatgtattcctttcaaattacttaaggaaggccaagcaccgtggctcatcccagtaatcctagcactttgggagaccaaggcaggaggattgcttgaggcctggagttcatggctgcagtgagctatgattgtgccactcgactccagaatggtgacagagtgagacccatctcattaaaaaaaacaaaaatggcttcaaaaagttaaataaaatatatttaaagttagaaagaaatcaaagaaaacataaagaatcagcaaggaagcattttaaaaattacagattaccagttatacagtaaatatattttattaagcttacccattagaaagctcctttgatatgattttcttaaacatctacaagtgacacacttaaaacaaagatttaggaagcttaagaggaaaagataaagacaaaaaaataggaattacatcaaagtagaatctcagaggtaaaactatcacatgagcaaagaggatcacttttttttatgatccctaatacaactcatacaacttcatgtactaagtaacagtgctaaaatatatataaagtagctttccaccatggccaccattggagggcagcagccatgacactgcactaccctatagctgtgggcctcaacaagggccacaaggtgaccaagaatgtgagcaagcccaggcacagccactgtgggcgcctgaccaaactcactaaatttgtgtgggacatgatcccagaggtgtgtggcttcacccctaacgagtggcgtggcatggagttactgaaggtctccaaggtcaaacaggccctcaaattcatcaagaaaagggtagggacaaacatctgcaccaagagaaggcaggaggagctgagcaacgtcctggctgccatgaggaaagcagctgccaagaaggactgagccccctgccatctgcctataatgaaagctttgcagaataaaataaatataaaataaagtaataaaattaaattaaatttaaaaataaaataaagcaaaacaaaataaaatatataaagtaaaaattgttgaaaatgcaaaacaatatggacataaatacagaaacacagggaaacttctttaggcactcatttacaggtaaaaatatgaaattgaataaaggtcatctggtgtcaaataatataggccttatctattataagagtttggactgaaaagcaaaagtgagataataaaaaaaagcttttcagaatattattttgtatagatatgtgaaggatgaagggtgggtgaaaggaccaaaaacagaaacacagtcttcctgaatgaatgacaatcagaattccgctgcccaaagtagtccgacaattaaatggatttctaggaaaagctaccttaagaaggctggttaccatctgggttttcacagtgctttcacattcttatcactttcaacactactgcaaataggaagggacagtaacatttagaagagaacaaaacagaaactcttggaagcaggaaaggtgcatgactcaaagagggaaattcctgtgccataaaaggattgctggtgtataaaatgctctatatatgccaattatcaatttcctttcatgttcagcatttctactccttccaagaagagcagcaaagctgaagtagcagcagcagcaccagcagcaacagcaaaaaacaaacatgagtgtgaagggcatggctatagccttggctgtgatattgtgtgctacagttgttcaaggtatgcagtaatttttatttctcaacctataagttccttttctaatgtttcaaatgtcttttcttccacttttatcctaaaagacatgataaagttttatttaatctcacagattagaagttactacagctttagcacagaaatggtggacatgtttaagatactagagatgattattgaaactagaaattatgaacttcatggaatttttgatttggctagaatatctggcaaaagcctttagcaacagttttaaatgtctgttaagaagattttatatagcgatcatgttaacaagcttcctgggaaaatatttgaggataaaatcaagggggcaaaacaagcttcacctccaataaacttccttcatgcttcccatttgttagcgatttgcttactaatttaatgagaaaataatcaacatcttacttaacttttcccagtaacagttgtgttaagtgctatttgacaaattactatctttacccttaatgaaaattctgctcacgttcaccaccagctataaaccacagccatctgttgcaatcagatgcattactaactaatgctatgatctattctaggcttccccatgttcaaaagaggacgctgtctttgcataggccctggggtaaaagcagtgaaagtggcagatattgagaaagcctccataatgtacccaagtaacaactgtgacaaaatagaagtgatgtaagtaatgaacttgctgaagatgacaatggtgcaggcttttttgtttatgtatttgcatctaaactttaagactcttgtatgttcttttaacagtattaccctgaaagaaaataaaggacaacgatgcctaaatcccaaatcgaagcaagcaaggcttataatcaaagtaagttaccaaattactcccatgttataatctgttttatccaagacagatcttttgaaaaagaaaataatgtggacaactacagaaagattctgctatgatcctgtgtgaaatattctgttaaggggtccttggttgtaacagcttccccttcttactacatgtttttagatgtcctgggggaaacaagaacagcccaagtaaataaaactcttgttttcttattccagaaagttgaaagaaagaatttttaaaaatatcaaaacatatgaagtcctggaaaagagcatctgaaaaacctagaacaagtttaactgtgactactgaaatgacaagaattctacagtaggaaactgagacttttctatggttttgtgactttcaacttttgtacagttatgtgaaggatgaaaggtgggtgaaaggaccaaaaacagaaatacagtcttcctgaatgaatgacaatcagaattccactgcccaaaggagtccaacaattaaatggatttctaggaaaagctaccttaagaaaggctggttaccatcggagtttacaaagtgctttcacgttcttacttgttgcattatacattcatgcatttctaggctagagaaccttctagatttgatgcttacaactattctgttgtgactatgagaacatttctgtctctagaagtcatctgtctgtattgatctttatgctatattactatctgtggttacggtggagacattgacattattactggagtcaagcccttataagtcaaaagcatctatgtgtcgtaaaacattcctcaaacattttttcatgcaaatacacacttctttccccaaacatcatgtagcacatcaatatgtagggagacattcttatgcatcatttggtttgttttataaccaattcattaaatgtaattcataaaatgtactatgaaaaaaattatacgctatgggatactggcaaaagtgcacatatttcataaccaaattagtagcaccagtcttaatttgatgtttttcaacttttattcattgagatgttttgaagcaattaggatatgtgtgtttactgtactttttgttttgatccgtttgtataaatgatagcaatatcttggacacatctgaaatacaaaatgtttttgtctaccaaagaaaaatgttgaaaaataagcaaatgtatacctagcaatcacttttactttttgtaattctgtctcttagaaaaatacataatctaatcaatttctttgttcatgcctatatactgtaaaatttaggtatactcaagactagtttaaagaatcaaagtcatttttttctctaataaactaccacaacctttcttttttaaaaaaa

SEQ ID NO: 469 - DNA, 18190 bp, Homo sapiens
attacataacttctttctagttaggaattaggacagtgtaagaaggccatctacaatcaagattgagagtggctctaacaagtgccatttttccttgttagctttcatttctcagccctttacaagattaaaatagtctgcagtttaatctctccaaagctttacggacagtgattctgtcctaaacaagacagtgactccaggatttctgaagactattgtggaagaagcatccattaaggtgagatttctgggaagttctttagagaaagatctaggtatctagttggtaaccacaccatctcagtagagaataattgcctgagaccagaagtgttgttatcaatcatattcagaaaactgagaactgaatgctttaactgtctaggtagcaaatggatatcttttattctaccacaattggggtatgaaccaaaaaaatgtattttgtctacagcaggttttaaaaattaattcttgggtgtcttttggcataaattgatatttagaggagatacttggttttcttggctggaggatgacttggtgactgggtttgggcctaagttaaaagacaagacagtcagataagaaaattattatgaagtaatatttagtaaaaaataaaccaggatataaatctctattatatgattttatctctattttaaaaagcatagacatgtgcacacattaatttctcaattttacaagcatttactcaaaaataatctttacattttcatgaatcagtttcattttatgcttcattttacaacaagtgtaagaagaaataattctctttttcaaatggtctatgctttactcagtcatagataacattttttgtggcaaggtataatgaaaagacagggagaatcaattatatatttcctactttgggatacattttgacttttttatggctttgtacatatgaatgttttctaattactccatgagtacttgagaagagtttataaacgttggattccaaattctatttaagtaagataaagtttcttaagtaagcttgttaattatgtttgaaaaatctaaatctaaatctaagctattttttaccttgttctttcagtaactgagagatgtggtgaaatctccaactctaatagtgattttgttaatttctcattgtagttcttttgatttctaccatatatttttacatagaatatgtatatctaagtatatatgttatgtgtgtgtttagagagaagaaaaaacttctatatgctactttataaagtaataacagattatatttataatataatttaaattattatatctttttccaagttgcatactttaccattatgtagtgaaactatgtactgatacttattgacttaagcctattttaagctacactatttttcctaaaaagtctttctttaagttagagtttgaagaatataacttttccagctctttctcaaacttaagtgaacttatgctttatttgtactttgtcaacaacatatgactggatttatttttaatccaaattgaaaatttttcctcctagttgatgagtttagtccagatatgcaaattctataaaggtatatattttaacttggttttgccatcttactttgtttcaatttatagcacttattctgtgctttcttcttctcctttcttgtcaagtttcttatttttaaaaaatctatattctccttaaagacaagccccttagcaaactctcacatcttctggtcccccaaacatacaacttcacctgttaagagtatgttcatatagttcctgttttcttttatttgactctggctttacttatttttaagatagtaaaaacactaattaaagtatttgcttgatctttcttcccttttggcctccaacatttcttagatttatttcttttcataatgagtagttcttcacaaagagctgtgggtatggatattttcactgccaagcttctgaaagctttgaatataataattgttttcttttaattgtgttaagaaacatgtaacataaaatgtgtcatcttaatcagcttcaagtgtacagttcagtagtattaaatacattcatattgttgtgcaaccaacctccagaacgcctttgcatcttgcaaaactaaaactctaaccgttaaccaacaatttcaccattcccctttcctccagagcttggcaaacatcattctaccttctttccccataaatttaaaaactctaactcttcatatatgtttaatcatacagtaagcgtgtgctttttgtgactggcttttttcatttcatgttctcaaagttcattcatgttgtattgtatcatgtgtcagaatattctttcttcctagggtagaataatattccatttcatgtatttaccataaaatacgtaagaaaccatatttctttttattcattcatccattgaaggacacttgtaatactttcacatttttctgttgtgattaatgctgcaatgaacatatatgtacatgcatttatttgagatcacactttcacttattttgggaatatatctagaagtgaaattactgaatcatatggtaatgttatttttaattttaagagtaagaatcatatttttttcatagcatctgaaccattttacattcctaccaatgatgtacaaggtttcccttttttactcatcctcaccaacactggttattttctgtagttatttttttgacagtaccaaaaaacatcatcctaggagctccgatgttttgtgcatgtatgtttttaattgttatatctcattgtggtttttatgggtttgatttgtatttttctaaagattattgccgttgagcatactcatatgtgcttattggccatttgtatagcacctttgaagaaatgtctattcaagtcctttatcaatttttttttttttttttttgagacggagtttcgccctgtcgcccaggctggagtgcagtggcgcgatctcgactcactgcaagctccgcctcccgggttcacgccattctcctgcctcagcctcccatgtagctgggactacagacacgcgccaccatgcccggctaatttttgtatttttagtagagaaggggtttcaccgtgtttatcaatttttatcacactgtttggattctgttgttgttggagttgatttgtaggagttggctgtatattctggatataaagcactcatcaaatatataaagtgtgaatattttctctcattctctaggttcccttttttactctgttaattgtgtctttgatgtatataaaaattaaatgttgttgtagtctaatttatctattttattgttgttgttgttgcctgtgccatcggtgtcatgtccaagaaacccattgccaaatccaatgtcatggagcctttcccttttgttttattctgagagtttcatagttttaattcctacatttagatatttgatatactttgagttacattttgtatatgatgtaggtaagggttcaactttttgtatacagatgtcacaattgcccaacagcatttttgaaaagactgttctttctcattaaacagccttgacgtccatgtcaaaaatcaataagccatatttctcagggtttatttctatgctatctatcatattccattgttctttatgtctgtctttatgccaataccacactgttttgattattgtgtctttataacaagttttgaaagcaggaagtctgaaacctccatgttcttgttttcaagattaaaaaaggctatttaaagtacctttaaattctacatgaattttaagacaaatttttgtgttcgtgtaaaaaacacttctgggattttgcattacagattacattgcaaattgcattgcatatgcagttccttgggtattgacaccttaacagtatcaagtcttctaacccctggacacagatgccttcccatgtacatttgtgccttctttaattccttcaaagtgttgtataatttaccaccttgattaagtttattcctaagtattttactactttaagctattgtatacagaaaaagaactgtttccttaatttcctttttgttcgttgttagcgtataaaaacacaactgatttgtatgtgttgcctttgattcctgtaactttgctggatttgtttatcaattctaagtatttacatagaatctttgggactttccacatataagatcatatcaccagtaaagagagagaatttaccttttttctttcttatttggatattttatattttctgtttattgcctatttttggtgggggcggggggtgggtgttaaaccctcagtactatctcaaacagaagtgaacaaaaaaatcatccttgtctttttcctgatgtttcaggagcaagagaaatgttttcagtctcttaccattgggaataatgttagctatggtgttttcgtatgtagactttactatgttgaagtaattttctcctattcttcgtttactgagtgtttctaacatgaaaggctatttaattttgtcaaatgctttatttattttttgcatcaattgagatgatcattttttttttgtctttcattctggtaatgtggtgtattatcttaattgatttttacaagtgaaaaatgagcatctgtgtatttttcctcatctttcaggaataagagaaatattttcagtcttttaccattaagagtgttaattgattgttgcatggtgagccatcattgcattccagggataaaccttaaatggtcatgatgcataaataaatttaacgtgctatataattatgttcgctagcattttgtaaaaaaaaaatgcatcgacatgcataagggatattgtttagaaaattttatttttctagtgcctctgtctggctttgcattggagtaatgctgagtcatacaatgagtttggaagtgttccctccttttcaaattttgaaagactttgaggaattttggtcttaattcttctttatatatttggtagaatttaccagtaaaaccacttagtctggacttttctttattgagaggtttttgacttctgattcagtctcctgactagtcataatgactgttcggattttctatttctttatgattcaaaatttgcaggttgtatgtttctaataatttatccatttatccatttcatttaggttatcccacttattgatgtataattgttcaaagtattctctttatttctgtgaaatctgttgtaatgttctctttttagtttctgattttattatttgagtctccttctttttcttctatgtcaattcagttaaagttctgtcagtattattcacattttcagaaaaccaactcttttttttattgattttctttattatttttctaatctcaattttacctctaatttttattttttccttccttttgatggcttttggtttagtttgttctacttttttaagttccttatggtgtaaagtcagattattgatttgagagtcttctttgtaaatgtagttgtttaaatctgtaaattaccctcatcaccatattctttgcatttaatgaaatgatatgttgtgtttctatataatttctctaaatatggatttaaatttgacttgtgattctttgtacatgtttcattgtttgtgttgtttattttcacagggtcatgaattttctagttttctttctgttgatttctacttttattccattatgataaaaaaatatactctgtatgatttcaaacgtttaacatttattaacacttgtttggcatcctaatttgtggtatatgttgggacaatgttccatatgttcgtgtgaaaaatgtgtattctactgttgttggctttactgttttggatatatctgttagatataattggtctataagtggtctataatgtttttcaatatttattttttccaaattttcttctgtcagattgttctacctattattgaaagtggaacattaaagtctcttactattaccttagagttgtctatttctcccttcaattctgtaaatgtttcatatattaggagccctgatgttttgtgcatgtatgtttctaattgtcatatcttctaggtgaactggcctttttaacactatgtaatattctttgtctcttataacactttttgactgttatttttattttatctgatcctagtatagcaaactctgctctcttatttaatatttcaatggaatatctcttttattccttcactttctatctttgtccttacatctgtaaaatgagcctcttgtatgcaacatatacttggatcccctgtttttaaattcattgtgatatatatgtatatataattttaatatgctttttgattagtaagtttaaaccatttacatttgaactaattattgataaggaagaacttagaacttattgttgccattttttatttgttttctgtatgtcttaataggtttttgtctcttagtgacttctttttgttgatttttttctgtagtgaaacatttttatgttcttctattcctttgtgtacatcctacagatatctctgtggtcatcatcaggttgcatatgatattctaaagttatagcaatctatttttaactaataacaacttaacttcaatcatatgcaaaatgtttactcctttacagctccccaacacatattttatgttaatattacaaattgcatttatataatatgtaccaattaacattgatttataaattgttttgctttcacattttaaatcctataaaataataaaaaatgattacaaatcaaaatagcaaaagtcatgtttcatgtttatgtatatacttacctttcatcaagaacttacatttttgtatgagtttgagttaccatctagcatccttgtgtttcagcttgaagaaatctctttagtatttcttttaaggtagatatagtggtaatgaaatccttcagcttatgtttatctgggaatgtcttaatttctctcatttatgaatagcaggtttcccagatatagcatttttgatggacagacttttctttaaacacttgaaatgtattgtcccactaccttctggtctacaaagtatttgctgaaaaatgtgctcataatcctattgaagatttcttggatataatgagttgcctttttcttgcgctttttaaatgattttcttttcgtctttgagtgttggtaatttgataataatgtgtcatagtgtaagtttctttgagtttatcatagttgcagcttgtttggtttcttatatctgtacatttagtcttttctcaaatttggaaagttttcagtccttatttactcaataattttgttattcctttctcttttccatcaccttttcagacttacataatgcatatattgtcccacttgatgaactttataagttctgttcactttcctttatatcttttaaaaaagtttgttcttcagccttgataattacacatgacctgtctaaaagctaactgattcttctgcctattggtgtgggctgaggaacccctctagtggattttacaatgcagtcaatgtgtttttcagcttcagaatttatggaattttttctggtaatttctattttttgtctattctcattttttattaatcattttcctgattttatttagttgtctctacctattttcctttaactcatttatcatatttaagagtgctgttttagtctttgacaagaaagtctgagggctgtgtttctttagagaaagtttgtggagattcatttttttctttaaaattgaccatgtttacctgtttctttgtataccttttgttgaaaactggacatttgtaaaaacagccccctctcaaccattgttaactggcaccatattcaggggaggactttcactcttcagctaagtatgaaatataaacgttctctgaggcctatatggacgtgtgtcttgcctgggcttatgtgtgtgcattttttgtaattctctcatatacacactgcttttaatctgtaatttccctaagagccacacctgcctcttttcatgaccttagatgttctactgtattcctctatccataatctcttgccttctggcacccagggagtagcagatcccatgaagctctcacaagctggagcacccaccactactttttgcagcctcaaatctgacatttaaactatgccaccatttccatcaatgctccaagtcatgtgaagcagttactagtccctcaaggaacctacagagaagctataatgttgcaaagcagttccacacttttccttctattccaaaggaagaatgaggaattaggaagtttcctcctgatcacgtcacaccattcaagggagaaagttaaacagggacaaagaaaaacacctagaagttttccactattttgaatgtggcttaatcttggtttggaatttcctttgttgcaaccaattcttaacagctgaaaacattagtttggttcataaattgttctttatttggtgtttccatggtataatgaaagtctggaacgtccttgtctgcaatcttgctaatgtcactctcagtgagaagagaacaattttttaaaccataacattcaaataacattttgaccagatacaaaattttagtttgaaaaatatttttgcttgaaaactgattcacagcacttcacctgaaacccctgggacaactctgatttttaattcatttttttagggggggattttagaaagactacttaatgcatacattgtatgtaggcactgcaagtgtcccagtagaggtaatatcaacatcctaatatcaaatgcattaagagttcttcaacaaatcatgccactattcacattaaagtgagatgaataaggaagattaaaaatagccactgtattagttccttctcacgctgctatgaagaaatacctgagactgggtaatttataaagaaaagagatttgatttactcacagttccgcacggctggggagtcctaaggaaacttacaatcatgatggaaggcacctcttcacagggtggcaggagagagaatgagtgctagcaggggaaatgcctgatgtttataaaaccatagatctcatgagaacttgctcactatcacaagatgatatttcaagatgagatttgggttgggacatagccaaaccatatcagccacgtattacttcacattatatctctaatttgcaagatgattttgctaccacacttccctgctaactctcatcccttcccaagcccccaaaccgcacaaatcttttcatccttcagtatcttcttaggttttaaaattgcagacatataattatggatcagtactatgtaaaaattactttcttaacctgctgcagactgttcaatcagattatttaatctttgtaggtgttctactcagtatttctggaagattttatcattttgcttttaatattctttggctttactatatgtgcccatgtgtgaaatttctctttatctgataggtttaaacacaggaacactcatgttctcccaaaagagaacaatttacagccctaagaatttggacactctaattatataaaagttgcacaaacacatggtcaccaacctaaaggaatacctataaatttaaacagaaaattggaatatacgttaggaactgaatgcccttaggtagtacacaaggggttaaagaggcacacataagtgagagtgggaccacaacagctcgcagaagataaagcctcaattaagcattaaaaactctaaggaagtattcagaggaagaaaactgggaatgctttcccagatagcaggaagggaattagcagtaagaagacctgaaaaagaaagacatattgtgtatttctagagcataaggtataagaaattcaaaagtaacagacacacacaaaaagaaagatacagtttatgcaaggcctttcaagtcatgctgagtagaaatctatactaataaaaatcaaaactcattgaaggatttcaggaaaaatagagtcatgtctttatccataaagaaacctacttggttgtctgacagaaaccttttagtaaaagtaagactagttggaggtaaataattgactgtaaaaaacaaatgtgcaaaaaataaatgctgcaattccacactagagagcagataggaggatggcaaaatgacaattttatagatgcataggacacagagaacaagttctaagccccagggagaaaaagtgctaacgagagctgattagggagagccaagaaggactagagtccattccacaactcagaactgtagtgctgtggcagaaggttattcacataaggtgagtggctgcagcccatttatacttaggccactttggtcatagtggatgaccaggaagaatcagggaagaatcagggaagaatcaggaaccaagaggtaggcattgagggataggctcaggccccaataaaatatcagaagaggaaccagggactttgacaccacaaaacccatactataaatactgcaacaattacctgtttccaaacatcatttcaccacatacacctctgtcccaacttatcaacattaaaagggaagaacttcactgaacctcctaataaagcaagtcttgatccattgttcacagtgacatatctggtaacttagtccctttttcttatacgcatccaaggacaacattttggcctgggacactcactcacaaaagcatatctcattttttaaaattgtctgcataaatgtgtaatgttgtgtgtcatttttactttataggccaagctataacatcagaaatggtgaatgaatacaagaaaattcttttgctgaaaggatttgagctcatggatgattatcattttacatcaattaagtccttactggcctatgatttaggactaactacaaaaatgcaagaggaatacaacagaattaagattacagatttgatggaaaaaaagttccaaggcgttgcctgtctagacaaactaatagaacttgccaaagatatgccatcacttaaaaaccttgttaacaatcttcgaaaagagaagtcaaaaggtaatagagaaaaccttgcacatagctactctgccttgagtctccccagtcttcagtagaaccccaccttggtcatagctggtacatcccttttccaatttataactcagcagtcatggggatgttggcacctcagagactgaccagttggcaatttagaacattctgtttcatatgaaagagattgatatatttagaagaatgtatttgaggtaaggataaaaaaccaaagacagggatttatgagacggtgagtgtttcagtaaatcaaaaatgtcagaaaatgaaaaaaaaagctactttaaaaaatgtgttttatttgaaatatttatatttaaccaatttatgcagcaatagttctattaagagacgtgtagaatttttccacttaataaatcactgttctttttttaattcaaaagccaatattagcactttgccacattacaattcagatcatatttcctttcaggtcatatttctgtcatttgaacagatattgcacagaacatgaccagcctgtcagcatcatgaaagccttagatatttaaaagaaatggtaggagaacaagactgagaaagggttgattgaggcacatggagttcacaggaaaggaagcatgttctcactgcaaaggggaggagtgagtaaagcactgaggagaatgagacagtgcctatgcctaccatgctgctgttggcctcctaggagccaggctgggttaatgcagtagaggtaacaggcaaatccgaactctcatgcaggagctgacagcaggtaatattgaaactgcctcagctgtcttagataagctattccactctaggcctattgtgccctttttcttttcttttgtcagttgctaagaaaattaaaacacaagaaaaagctccagtgaaaaaaataaaccaggaagaagtgggtcttgcggcacctgcacccaccgcaagaaacaaactgacatcggaagcaagagggaggattcctgtagctcaggtaagcttgagaaagaggagcaggactgaagcctcacagaagatactctgctatggcacgtggctctttactaatatctcaacacagcttagatttaccaaattagtaattatggatcttctttgtgatgagtaaagagttaggtatcgtaaaaatgtaataaaaaatttctgtgacataaatatattatcatctccattataaaaatggggtaataatcatattggatatacatcttgcccatccttacacaaatctagattttctcattccaagtccagtgctcttctcatcacaccacagtggtgataacagtaatgcatctgttgaaatcatccatctcctttttagtgcaacaatctatgcccaatattatctattgtccatatcttcaagtgacagattgtaattccctggggtttccaaggacatcccatccaacataaatagaacttactatgttgtaatgaaaaaatgaaaacttgctctgcttcttttgatactaaactccattaacaggaaaattaaactactttcagaaaagaaaaactccaaacaaagaaaagactgaagccaaaaggaataaggtgtcccaagagcagagtaagcccccaggtccctcaggagccagcacatctgcagctgtggatcatcccccactaccccagacctcatcatcaactccatccaacacttcgtttactccggtacactcttcctggtcctcttctccatttttttttaacccagtcacagtgcattccactgttactattgttactctcatgcataactcttcatattactgatttgctgtgggaaaactgttttccatattatgataacttgtttacattggtgagaagccacatgcaagtaaagtccaattacctacaggtaatcactgtgtgtaaaacaccaggacagaccactaagcatttctggtctgtgcaggtaagtagcctggctcctagtaccagtacatacaagcccatggctcatctttgctccccacacttcctattacagatctgccaacgttctcttcagaaaagtattctgctgcaactcaaataggccaggacactgtggagagaggacatacgagataaacaaacttgtcctttttccattgttgttagcattttagccactgtgaaatgctgtgtatacacagtcgaggacatagctctaaccagaaatcctctacctgagactacttacatgctagccaggccaagtctttccacttgtaaaagcactgtttcttgggaagaaacaaacgagtttggccctcaaaatggcagagtacactagtgatcattagaatttctaatgaatgtttgatcattagaacatctaatgatgtttgaggcttctggtgggcatggttcttcatttttaatgctgtccaagttgttttcactttgttgattgtctttgataatttcagtaggtagaggagatatttggatttgttattatattctaatctttctttaaagtttcttcacaacaatgttttcatcatctgctactctagattgttcatgcagaagatcatgctttgcttcaggaagattattctgagtcaatgagggtgatttaatttccaagcctgttgtctgttaccttaggctttcagtagctaaactttaccagctcatgtgcctttcctttctgttcagtaatccctgtctagcctagcccccagctccaaatatctgtgaaagttgttgggtcgaaagctctgcagagtcactcgtgcagagtgactttgtattcctgctcaaagtttttgttgttgtttgtttgtttgtttgtttgtttgtttgtttttgagacggagtctcgctctatcgcccaggctggagtgcagtggtgcgatctggtctcactgcaagctccgcctcccaggttcatgccattctgctgcctcagcctcccgagtagctgggactacagacgcccgctacaacgcccggctagttttttttgtatttttagtagagatgggggtttcaccatgttagccaggatggtctcgatcttctgacctcgtgatccacccgcctcggcttcccaaagtgctaggattacaggcgtgagccaccgcgcccggcctcctgctcaaagttttaagtttattttcttgtgtctgcccaacacagaatcaggaaacccaggcccaacggcaggtggatgcaagaagaaatgttccccaaaacgacccagtgacagtggtggtactgaaagcaacagcgccatttaaatacgagtccccagaaaatgggaaaagcacaatgtttcatgctacagtggccagtaagactcaatatttccatgtgaaagtcttcgacatcaacttgaaagagaaatttgtaaggaagaaggtcattaccatatctgattactctgaatgtaaaggagtaatggaaataaaggaagcatcatctgtgtctgactttaatcaaaattttgaggtcccaaacagaattatcgaaatagcaaataaaactcccaagatcagtcaactttacaagcaagcatctggaacaatggtgtatgggttgtttatgttacaaaaggtaaacccttaattttgttttaattttctctaccattacctggaaataaatgtcttaatttgccagacttactgtctgaatattggaacacaagaatttatattgactagagatagtgatgaagttgtcccacaaaataggaaataggactaagtgacctattaactttcttacgccaaaataaatgtagggactttgaaaaaaagttagtaagaaatattggcagtaatgatctgttgtcagccacaatgaactaggacaatacagggtccaaatcaacgggagcaagctaataacatcatctctttcagctccatcccaatgagcactgataattttactgtgagttttgataaatttattttaagtaatgaattgtgctaccaaggttgaattctggttgtgacataattttggagtaataagtggattggctggtatgctcataaatgcaaatacattcaacagctatccatacaatctaaacatttgtgcttagatcagttgcccttctatcttatttatttattcatttatttatgaagatagcattgaacaactgagaaatattgaattccatgatacttaaaggataaggcaatctcttcatactatttacaaaaaaaaaataattccaaggcacagagttttattgatatgtccatgtccaaattcaagatgctagttaggataatgcattccatccctttctccactctaaaacattacacatttctatgaactcaactaacattttatatgattgactgctttataaccctacatacatgtctttcaatatagccccttaaatttacctccacattttctcacactctctttaagagatcttgcttataaatgcaattacagaattgatgagtaatagcttaagtgtgtgaaacactacagagtatgaatggagggagttaggtcaatggggacaagatattggaaaagaataagtaatgaggaaggctgagaaagaatgaatgattgtgttatagaagatttttcctttaaaatttctcataatctgaagtaactcaggagtggaaaaccaaatattgtatgttctcacttgtaaggaggagctaagctatgagtacacaaaggcatacagagtgatctaataaactttcaagactcagaagcgggaggctgggagggaggtgagggatacaaaactatatattgggtacaatgtacactacttgggtaatggctgccctaaaatctcagaattcaccgccatataattaatccatgtaacccaaaaccatttgtaccccaaaagctattgaaatttttaaaaattaaaataataataaagtgaaattcctcataatctactgaatgaataattgtagaaagcatacatttgtttttccacaggaccatgagccaagaagttctataggaatttttgattcctctatatctaggtgctttatttactctcagctgatctgaaggtggtagcaggagaaaaagagggaaatatttattgttgtataattgcagaaagaaaaataccttaagcaggaaaaaaaaatgctggataataaaagatggaccctgtgagatggcaggccaagccacatgtatgatctgtacctgtcattcctgtcgtgcatattgcattaactttgtcatgagactctttctcatctatatgatactaacaatcctctcagaaacaggatgttaatcttcttttgcagaaaagcgtacacaagaagaacacaatttatgaaatacaggataatacaggatccatggatgtagtggggagtggaaaatggcacaatatcaagtgtgagaaaggagataaacttcgactcttctgccttcaactgagaacagttgaccgcaagctgaaactggtgtgtggaagtcacagcttcatcaaggtgggaactggatagaggagaatgagtttgctaaagaggcaaataattttgcttaggctttgggaacaccaggttcctcatgtattactcagagagtccagcgagtggaaggagaacctaaacaatgcccttgcatttgtaactggaagattttcagaaggatattaaggtaaaggcattcatacagctctagaaaggatacaatactagtgttaattgatttaaagatgtgtctagcggcagggaacatagggctcaagagcaagggttctgaataagacagatctgatttgaatcctggatttaagaagcactagttggctgatattggggaaacagtttcattggtcctctaaaataatggaagtctccacttcattgggatggtttaaacattcagacaatgtatacatattaattatctcacaacctggcacatcataataaactgatctgtggtagatagttttatttttaggaaggtaaaaattggagggacttttaggcaaaggaaatgatacatgaaaattccaaaagtgtgacatagcgtaatgagttctgtacaactgaaattcagtagatgcagaagactgtgggacccaaagattaaaaaaaagggactactgaggcccaaagatgaaaaagaaatagaagtgtggctttttcaaaagtaaattaatggaaactttattgttgaaaatacatgaaaaattgaaacaaaattatgcagaagaatgcctgatcactttgatattttagcaaaaaatattccggtgtctatctatggagttgcattacagagcaattaggcttggggcagagatatctattagaagttgtgtgctggattcactcatatccttactgaagagagcttactgttggaaattcaggaattatatgcactgcttgctaaacatgtggtagtttgaaatcagccatgtgaaaatatgtatgccaccagactctgcaaatgttacaaatcgaaacttttaaaaaaaaatgggtagttggttaaccaggataccacagaagtttatttcaaaaatccattcaggaaggaaaaagacaaacagagattagttaatggggggaaaatgagttttttgaaggtagatcttcataactttgtgactaacgagctttcataggggataaggagaataatgtagccaatgggaagaaaagatatggcaggtgaaaggagaactataagcagagcttcatttcaatatctagggtctcattatgtctttcttatctctctttaaaggtcatcaaggccaagaaaaacaaggaaggaccaatgaatgttaattgaaatatgaaagctgaaatgcaacaaacaacttccgcttaaaacaattaagttgttaataactgtgattttgtaaatttcagtaattcatttaaatgatgtttcagtagatatattctagcatattaagagcttttataactgagttatagattagtttgctttctggaataaaattttcttcttatactcttccttttttttagatattacattttgcttttatgacattcacgaggcaaaaaataaaatatctttttttgaaggacatt

SEQ ID NO: 470 - DNA, 1795 bp, Homo sapiens
agcacaggacacagctgggttctgaagcttctgagttctgcagcctcacctctgagaaaacctctttgccaccaataccatgaagctctgcgtgactgtcctgtctctcctcatgctagtagctgccttctgctctccagcgctctcagcaccaagtaagtctacttttgcagctgctatttcgagtcaaggtgtaggcagagtccttttttctagtcatggctggcaaacagtgggatctggggatgggacaaaaggcagctaggaagattgccatgtagtctgctgctaaatgtagagtctagtagatattcaataacattcaagttcctattttcttaagaattagcaaccagcagaggaaaacgatgggctggaagtcagactgttgaattggctctgcctttaattatttgttcaagcaagcccctgtccctctctgtgccttggtttccccatctgtcatatgaagggagtgcgatgtgttctgagactgaatccagttccaatcttctagatttctttctcgttcttctctgaagatccactattcaaaataagactcctgctcatgttaggtgggaatggatatttggggttctggtagctccacagggatgctcaatgaagatacaaaattagaagtcaaaataaacagctcccatgggcagtgttgatctcaccctggcctttcctttcagtgggctcagaccctcccaccgcctgctgcttttcttacactgcgaggaagcttcctcgcaactttgtggtagattactatgagaccagcagcctctgctcccagccagctgtggtgtgagtatcaacccctgggctgccctgggaggcaagggtgagggctggattttaaaagagggcctgttttggggagggggtgattgagcattggggaggcagctcccagggctgaagccttccctgagagcagtgaggacacaggtcatgaactcacttttcaagtgctgaaggcggcagagtgggagccgagagagaagggggttgctggggaggaagttattcagaggacagggaagcaggggaaggcagacaggtcccatgagatatggaccgattccttaaaccgtgctagaaagacatgtggaaaagtcactgccaggctggcagggaatggggagatctattcatattgattgcaatgccccttggttcctaatctgggcaactcctggggcccacagctaaatccagtgggtggaagttacagggagtctgcttccagtgctgctccaggaaggatcccatccaccagagctgccccacatggaccatggtcaggcagaggaagatgcaaaggataaagccagatgacctcaaaggtctcatgagattctaatctgtccgctccttgttctacagattccaaaccaaaagaagcaagcaagtctgtgctgatcccagtgaatcctgggtccaggagtacgtgtatgacctggaactgaactgagctgctcagagacaggaagtcttcagggaaggtcacctgagcccggatgcttctccatgagacacatctcctccatactcaggactcctctccgcagttcctgtcccttctcttaatttaatcttttttatgtgccgtgttattgtattaggtgtcatttccattatttatattagtttagccaaaggataagtgtcccctatggggatggtccactgtcactgtttctctgctgttgcaaatacatggataacacatttgattctgtgtgttttcataataaaactttaaaataaaatgcagacagtt

SEQ ID NO: 471 - DNA, 2042 bp, Homo sapiens
tgcatcctagggacagcatagaaaggaggggcaaagtggagagagagcaacagacactgggatggtgaccccaaaacaatgagggcctagaatgacatagttgtgcttcattacggcccattcccagggctctctctcacacacacagagcccctaccagaaccagacagctctcagagcaaccctggctccaacccctcttccctttccagaggacctgaacaaggtgttcccacccgaggtcgctgtgtttgagccatcagaagcagagatctcccacacccaaaaggccacactggtgtgcctggccacaggcttcttccccgaccacgtggagctgagctggtgggtgaatgggaaggaggtgcacagtggggtcagcacggacccgcagcccctcaaggagcagcccgccctcaatgactccagatactgcctgagcagccgcctgagggtctcggccaccttctggcagaacccccgcaaccacttccgctgtcaagtccagttctacgggctctcggagaatgacgagtggacccaggatagggccaaacccgtcacccagatcgtcagcgccgaggcctggggtagagcaggtgagtggggcctggggagatgcctggaggagattaggtgagaccagctaccagggaaaatggaaagatccaggtagcagacaagactagatccaaaaagaaaggaaccagcgcacaccatgaaggagaattgggcacctgtggttcattcttctcccagattctcagcccaacagagccaagcagctgggtcccctttctatgtggcctgtgtaactctcatctgggtggtgccccccatccccctcagtgctgccacatgccatggattgcaaggacaatgtggctgacatctgcatggcagaagaaaggaggtgctgggctgtcagaggaagctggtctgggcctgggagtctgtgccaactgcaaatctgactttacttttaattgcctatgaaaataaggtctctcatttattttcctctccctgctttctttcagactgtggctttacctcgggtaagtaagcccttccttttcctctccctctctcatggttcttgacctagaaccaaggcatgaagaactcacagacactggagggtggagggtgggagagaccagagctacctgtgcacaggtacccacctgtccttcctccgtgccaacagtgtcctaccagcaaggggtcctgtctgccaccatcctctatgagatcctgctagggaaggccaccctgtatgctgtgctggtcagcgcccttgtgttgatggccatggtaagcaggagggcaggatggggccagcaggctggaggtgacacactgacaccaagcacccagaagtatagagtccctgccaggattggagctgggcagtagggagggaagagatttcattcaggtgcctcagaagataacttgcacctctgtaggatcacagtggaagggtcatgctgggaaggagaagctggagtcaccagaaaacccaatggatgttgtgatgagccttactatttgtgtggtcaatgggccctactactttctctcaatcctcacaactcctggctcttaataacccccaaaactttctcttctgcaggtcaagagaaaggatttctgaaggcagccctggaagtggagttaggagcttctaacccgtcatggtttcaatacacattcttcttttgccagcgcttctgaagagctgctctcacctctctgcatcccaatagatatccccctatgtgcatgcacacctgcacactcacggctgaaatctccctaacccagggggaccttagcatgcctaagtgactaaaccaataaaaatgttctggtctggcctgactctgacttgtgaatgtctggatagctccttggctgtctctgaactccctgtgactctccccattcagtcaggatagaaacaagaggtattcaaggaaaatgcagactcttcacgtaagagggatgaggggcccaccttgagatcaatagcagaa

SEQ ID NO: 472 - DNA, 10685 bp, Homo sapiens
gacatagctgccctaaaaggaatgaggaagcgagagctctccagtgtctggctggctccgtccgtgtgacagcccatgatgttctttccggtctctgtaatattctgaatttccacctgcccgccccttcgcttataatgcagagcatgtgaagggagaccggctcggtctctctctctcccagtggactagaaggagcagagagttatgctgtttctcccattctttacagctcaccggatgtaaaagaactctggctagagaccctccaagggtaagtacactatatattaacatgcctagaaattacaagctgcctcgcaagtcacaggtcactcagatcacaggcaacagaaaacagctatcccgtggaatatgctctcactttataaagtctcaggacaaagctttgcttcaacgtgaaggctgcacctttttggtgtaggagttctgtaaatgttatctttgtttcatgtttactattttagcatcctagggatatgtttttttttttttcctttttggattagatgagaaaatccatgcaaagcacctactacgacagctggcatatagtcagcactccaccaaaaaagttaatgttcatgttaatttaaaatgttaacgtaattgatatccagattatctcttgatggaacggaataaattggtaacaacgtttagagtggtaaagatagttgacttaaataatttagaaataattgtgttcagatgctgctcttaacaacatacaacatctggtaacagaactgattttaaatgaaaacttgtctatgtaatagttttttccaaagtaaaggcaagtgaaaaaatagcaaaagagaaaaataaataaatagtttcaaactctgtgctttggcaaagtggcgctgaaagtggcctactgtgtgagtccctcctaactcctttccatgtgattcgttgtagacagaggcacagccacacgggagtgaaatccacccctggacagtcagccgcaatactgatgaagctgagaagcagccacaatgctgtgagtgcccctctcacattcattcattcacgtttcctacaggcaagggccaaaagatatttacctaattttattttttctcttttagtcaaaaacactaaacgccaataatatggagacactaatcgaatgtcaatcagaggtaagaaagcaatttttaagactttttatctgtactgtgagaaggtggaaaactttgttttaattgaatattatttgggttgaatagtaattataagagtagtaaactaacatcacacatgtagtaaattaagcacattaattaggatcttatatgatgacaatcaagaccttaatattgcttctagaagctagaaaaaacatcaatgcactctactgacttcatttttaatatgaataaaatgctgtatgtgtgttttgtggggaaagactcgataggtttcttcagtcactatatttaactgaaataaaaatgtttttagggtgatatcaaggaacatcccctgttggcatcatgtgagagtgaagacagtatttgccagctcattggtgagttttaaaaacataccgatcttttatgtaagtgctaacaaccagtgctcttggtttgcaaaaccacagcgcttttactctactaggaatttttttgtataagttgttctgttaaagaccgcagaacattaacccttaaatggcaggtatgctccaactcactagagcagggagtgctgggaaaggaaagagcctctccatagagaatccccagttctgccaagcgtttttaatgcggttcaatctcctggccatgtatgtttcgacaattagcatgcacacatttgaaaaacacacagtgtcttttccattttcttccttctcttatggagaatgcatccaagagcctatgaagcaactgttgctgatctcaaatcccaaaggacccaccattcactctcaacttttttcataatgcatttcattatagcgtaaccctgacccagttctcctgaaccataaagacaggccacttctttctcatcatgcttccacttgccaatctgaaatgtatagaaacagatgccaatgcatttagaaaatatagcctttataattagtaagaaaggagaaggaaggaaggaaggaaaagaaaagaaagaaggaaatgtttgagattgcaatatccattgcacacacatcttgtggatttcagaaggacagaatatcttgataacgttttgctgataattcccagttgccagatctaggttcaaggcttcccgcagcgattcgtatttgcctctgtcctaaagcagcaacctggaaaacccaaggtgaccagtcacctggaaggaaaaatggtgttagctccctctagtggctgtttagtgcctgcgtggctgcaaagggttggagccagccctgctatgtgccttcgaaaagatattcagcaagtcacttcctcaccttttaagtttcgttttcttcgccagttaaaggaggaaatcaaaataatctatttcatatcagaaatttcctctatagttattcaggccagtaggttaagatggttgtttatgatcagcacagttaggttttgctaattttctgtagcaaacagctggaaagagtgaaaacaggaaaggtggaggccttgaggaactctggtgttgctgtttagggaactggttgccctggtaacagtgtggttgtttatcggttggtttttctagattaagattcacgccctttgctttctcaagttttcaaaattatttttctcacatcgcatactattgaccacattatgcggccaacgatacccattttcttacctggatctttgcttcttaacactgtagtctaatttttctcgttgccttgttttcttggctgtagaagttaagaagagaaagaaggtgctgtcctggccctttctcatgagaaggctctcccctgcatcagatttttctggggctttggagacagacttgaaagcatcgctatttgatcagcccttgtcaattatctgcggtgacagtgacacactccccagacccatccaggtaggcgtgcattctctcataaacctacttcagttttcagttggacatgcaaaatactcgggaaatctgaatgtcattctcctattaagtttgtagggactgatcttccatattttccactcttcaacatggcactcccacatacgcgtgcagtcagaagaatatctgactgcttccattccagaaattgaaattagttgtatttgccaatgagctcagagctatggtcccgccattcctctgacttcacagagtggagaatgctgaagatttgtagcttctgaaaagtcaaaagggggaaacagaatatagactttgtgatctgaaatccaatgttcatatggaagtatttgaaaggagagagctccaaagtgattttagaaagtgcaaaattagagctttcacaatttgcctcctcttagaaaaatagcagggttgaggaaggccattgacagcaactggactgaaagcaaaatctgacatcaatattcctgttaagactatctcagtatactaaagaagaagggtaaccctttcctgttcctattgctgtttcctttaggacattctcactattctatgccttaaaggcccttcaacggaagggatattcaggagagcagccaacgagaaagcccgtaaggagctgaaggaggagctcaactctggggatgcggtggatctggagaggctccccgtgcacctcctcgctgtggtctttaaggtgagttcaacacacttgcgccaaataacctgccaaggggccctgacacactcattctcaggatgcaagaaataggctcttctccccacacagcaaggtacactgatcttggagtttaatttttttcattaagccctttatttatttatttagtaagcacctctgtttctgtgacctcagattccaacagaaagtgatgcattctgctctcccaaaactttgccaagtacgggcaatttgattgttccgtggcagaatccatacgtcaaaatccagtggcccctcagaacacacccacctggggatggtgcctctgactctgcctgatgttagaaagttgcagagaggccaagggtgttggagagagggttccctggattcatcaaatgcaggaatgaagggccacaatctatgatgggctaagcatagagcaccctgcgatggaacgaaaaccgggtgaaaacaaggacatgggacatcatacagtaccaataggccaacagcccactctcatcccccaggacttcctcagaagtatcccccggaagctactttcaagcgacctctttgaggagtggatgggtgctctggagatgcaggacgaggaggacagaatcgaggccctgaaacagtaagtcatcaaagtcatcggtcattgccaggccacatcacctccgtcttttgattctttacacagctttctaaatgcttcatgatccctgttccatgagaattgtgatgtttagggaatccgagtggaattgctcgtccactcccagaacaaaaaccagagggtgccctggacttttgaattttaattttagccaaatgaaatatttcttcaaaaagtagaaagcgaacttcaatcctcacaaatcccaagaggtagggaagtctgaaaatgtaagatgttcaaaaaggtatgagataaaatcagacctgagaactttaacacaggctcaccagcaaagtgtagaaattcgggattatctttaagctacactgactggtgtcatgcaaggcaacagttctcccataaaacatccctcaggatgcagccagacagtgtggtggggggcagttgttttgttcataaaacttcacagcatatttcatcttcttataattaacccaaatgaaaactatataataacacattccagtgagagtaaaaataataacatatgcaatggaaagtgtgatctgttagtgactagagaattctaaaacccaagctttgaaatgtcagcatggttgtcacatcctatgaaagtttatctaaatgttataattgtcccacatggctaaatactttcaatgacatatgtatagaattgaagacattaaaatgtctgtcccaaaatgaaaattctaagattatcacaatgagtttctacctagacataaggcatttttataacaattccttcttctgagaaatgaaaataatcaccatttcgtttttgaaaaagtgagactttaagaagtctaatttcttatcattagaaacaatgttgcgatttaagtgccgccttatatgaacatgcccttagaaactgatttagtcttcataaagctttctcagaatgttgtaaaaatgtgtcatcttcgtttggtaattatagttttgtttccgtctttgttttaaggcaagaaaaccagtctagtcgtgttagaaacagaaagaaattctacatgactaaatgattactcaacaaaactattttctaaacataaaggcaaactatggtgtttaatgcagattggcttcataatttaagctctgtataaataataaagggctgtgttattggtgtcccaattacaaaggccagtttcttagctcctcaagaccttgtggttaaccagtctcactctgtgtcagttgccactggaagtgtctgaatgagcatttcacaatattacttgtgaaaatgcaccttcctcattttaaaggaagtctggtttcggcagaaactctcagcttgctacactgaagaccattagcctttttgaaaactaacatcccttcactttattccagggttgcagataagctcccccggcccaacctcctgctactcaagcacttggtctatgtgctgcacctcatcagcaagaactctgaggtgaacaggatggactccagcaatctggccatctgcattggacccaacatgctcaccctggagaatgaccagagcctgtcatttgaagcccagaaggacctgaacaacaaggtttgttctgcttactgatgagaaatccccaacttatgatctcaccatctgtttgccaagtccaggcaataaaatgcttcagaatgtctccaactgactcagaatcacagtgaaaatataaaatgcaaaatgcttttgtcatagttccactctctcagatacatgtatctaatgaaactgaataaatccgtgtcttctgtcatctgtgagacagatgagtgctgcgagtatttacatcactctctcccgatataaaaaagcccttttgtttttgtgttttgtacaccacagtctatcagtctatcaatctgggacactacttacttaaatgaaaattttattaatactttaaatttttttaagttcttaaatttaaaatgcatgtctcaaaacaccaaggagtatctaactttaatgtatgtgattgttggcatggtggctcacgtctgaaatctcagcactttgggaggccgaggcaggcgaattgcctgagctcaggagtttgagaccagcctgggcaacatgacaaaaccccgtctccactaaaaatagaaaaaattagccaggcgtggtggcgggcgcccgtagtcccagctgctcggaaggctgaggcgggagaatcgcttgagcccgggaggcagaggttgcagtgagctgagatcaggctactgcactccagcctggtgacagagtgaaagcctgtctcaaaaaaaaaaaaaagtatctgattgttaccaaatttctgtatgctcttttcagacacataaagatctcagattctcattttggcacctgactccagtgtccccattcttcctcacctccaaaaaaaaaaaaaaaaaaaaaaagtcttcaagctgacaaattgcttacttttcctcacaggtgaagacactggtggaattcctcattgataactgctttgaaatatttggggagaacattccagtgcattccagtatcacttctgatgactccctggagcacactgacagttcaggtatggaatgtgctatcatttgattacgattgtagggaaaagttcatgccagtctgccagtcatgtaaagcatctctgatatttgaggcagaagttaccttcacaaatcaccgagtcagactagactccagtccattaggaagtcattaaacatgaaaaccctgctccgggcttttcctgcagcgcctcctcagaccacagatagtctttcccccttcccagtgtacatcgcaaatcactgctgatttcactaagctacctttagctctggagttggagtgagaaacttttgtttccacttcatgggatatgactccatcacaatgaaaatgggtccagtaaaaggagcagttttaaaaattaaggtcaatacattttcagtgaaatgctgttctctcttttcttattctctcctctctttctctccttcctccctcctttactcatttcctttccctatttttcttctgatctcaaaataaattcagaaagaaataaacttttcatgtggtacatttcttgtcatatcaagcccctaagtagttctgctaataaatcacctagtgccctgattggtatgagcagggcgaactgtagcaaagttcatttctaaaagaacctaaatggccgtgtgtggtggctcacgcctataatcccagcactttgggaggccaaggcaggcagattacctgagatcaggagttcaaaaacagcctagccaacatggtgaaaccccgtctctactaaaaatagaaaaaatagccaggcatggtggcgggcacctgtaatcccagctactgaggctgaggaaggagaatcacttgaacccgggaggtagaggttgcagtgagccgagatcacatcactgcactccagcctgggcaacaaaccgagactccatctcaaaaaatgaaaataaaaaatacaaataaaaataaataaataaataaacccaaacaaatgttcaactgctgcttgacttcccccagatgtgtcgaccctgcagaatgactcagcctacgacagcaacgaccctgatgtggaatccaacagcagcagtggcatcagctctcccagcaggcagccccaggtgcccatggccacagctgctggcttggatagcgcgggcccacaggatgcccgagaggtcagcccagagcccattgtgagcaccgtggccaggctgaaaagctccctcgcacagcccgataggagatactcagagcccagcatgccatcctcccaggagtgcctcgagagccgggtgacaaaccaaacactaacaaagagtgaaggggacttccccgtgccccgggtaggctctcgtttggaaagtgaggaggctgaagacccatttccagaggaggtcttccctgcagtgcaaggcaaaaccaagaggccggtggacctgaagatcaagaacttggccccgggttcggtgctcccgcgggcactggttctcaaagccttctccagcagctcgctggacgcgtcctctgacagctcgcccgtggcttctccttccagtcccaaaagaaatttcttcagcagacatcagtctttcaccacaaagacagagaaaggcaagcccagccgagaaattaaaaagcactccatgtctttcacctttgcccctcacaaaaaagtgctgaccaaaaacctcagcgcgggctctgggaaatcgcaagactttaccagggaccacgtcccgaggggtgtcagaaaggaaagccagcttgccggccgaatcgtgcaggaaaatgggtgtgaaacccacaaccaaacagcccgcggcttctgcctgagaccccacgccctctcggtggatgatgtgttccagggagctgactgggagaggcctggaagcccaccctcttatgaagaggccatgcagggcccggcagccagactagtggcctccgagagccagaccgtggggagcatgacggtggggagcatgagggcgaggatgctggaggcgcactgcctcctaccccctcttccacctgctcaccacgtagaggactcaagacacaggggcagcaaagagccactccctggccacggactctctcccctgcctgagcgatggaaacagagcagaactgtccatgcttctggggactctctggggcacgtgtctggcccagggagacctgagctcctcccgctgaggaccgtctccgagtccgtgcagaggaataagcgggactgtctcgtgcgacgatgtagccagccggtctttgaggctgaccaattccaatatgccaaagaatcgtatatttaggagggaggccatacgccatgccatagcttgtgctatctgtaaatatgagacttgtaaagaactgcctgtagattgtttttaaaaggtcttgaataagctccttgagaaagttgtggaaagccctcctcagtgaggatagctacaccatggccatggcgcatcagatagtctctgtgtacctggatttgtgcaatatgtaaaaatgtatcaaatgtattatagataaggtgttaggtgcaaaggatgtctaataatccctgcacacgttttgaacttgcagtgaagtacactgctgttccttgcttcctggggcacttttctcttggttagtgtttaaaaattatcttcgcttttttaatgtggcctcaaatgtcatgccaattttcacatcttccacaaactccatttagggagaaatgtttaaatctctggtataagtttactccataccagagtaaactatatattactctatataagcagtcttgcaataactaatcaccaccatagaagaaagaaacagactgcaaggaacagagttgagtgtctggagtcatcaaaggcattaaaaactccagtaaaagctggggccgtagcaaaaatcatgaaaaacacttcaacgtgtcctttcaatcatccaattaaatgtgggtagattaatgaaaatgtattacatcaatattaactcatctatagcactttgagtatctttgtagttcatgatatcctatcctataatgtggaggtaaatgattttatatgcattgggggtcatatataaaacttcaatgtaatttcactacaataaattgccttccttatttgaaagtaaaaatgttctttttttattgacatgttaactcctttccctcaattaatagaaatccactaagaaaatcattcacatattggttcactcaacaagcatttattaaatatatattcactattctagactaatagcaagaccggggatcttgtttaggaagaagcagtccctgttctccagaatttgcaaaaccattaaaaaagcacctactttaagccattttttttcagcaaggagtcattctgccagaaaaatgtagtacacaaatacaggataatataacaaatgtaaaatttctcatttctagtgaattaaactttccagtaattttacatctcacctcattcttatgatgctcagtttgcttaattattggcaaacataatggtaaaatgtttgtactgtattagagctttactgttcgattattaagatatttatccagtatcttagagatgctggacttcaattttccttattttatctttttaaaataaaatatcatgcatgcttctgatttgttatagaaa
